United States Patent Application Publication US 2023/0026259 A1 - sequence listing, part 71

SEQ ID NO: 171938 - DNA, 8175 bp, Homo sapiens
  Payload ID: 13779
  Gene Symbol: PTPRZ1
  Gene Name: protein tyrosine phosphatase, receptor-type, Z polypeptide 1
  Uniprot ID: P23471
  ENST ID: ENST00000393386
  CDS Start-End: 412-7359
aggagccgcggcgcgcacagccgggctggagcgcgcacccggcactgaggcttcgctgctctcggagcgctcagaccgcggccgccgcagccggcgaaagaggcaaagtcccgcacgccggaggacatgcgcctcggctagcggccccgggccccaccaccgtgcggctttctccagattattcctctctcgctgtctctgactgtctctctctgtctctgtctctgtctctctctctctcacacacacacacacacacacaaacacacatacgcacgcacgatctcacttcgatctatacactggaggattaaaacaaacaaacaaaaaaaacatttccttcgctccccctccctctccactctgagaagcagaggagccgcacggcgaggggccgcagaccgtctggaaatgcgaatcctaaagcgtttcctcgcttgcattcagctcctctgtgtttgccgcctggattgggctaatggatactacagacaacagagaaaacttgttgaagagattggctggtcctatacaggagcactgaatcaaaaaaattggggaaagaaatatccaacatgtaatagcccaaaacaatctcctatcaatattgatgaagatcttacacaagtaaatgtgaatcttaagaaacttaaatttcagggttgggataaaacatcattggaaaacacattcattcataacactgggaaaacagtggaaattaatctcactaatgactaccgtgtcagcggaggagtttcagaaatggtgtttaaagcaagcaagataacttttcactggggaaaatgcaatatgtcatctgatggatcagagcatagtttagaaggacaaaaatttccacttgagatgcaaatctactgctttgatgcggaccgattttcaagttttgaggaagcagtcaaaggaaaagggaagttaagagctttatccattttgtttgaggttgggacagaagaaaatttggatttcaaagcgattattgatggagtcgaaagtgttagtcgttttgggaagcaggctgctttagatccattcatactgttgaaccttctgccaaactcaactgacaagtattacatttacaatggctcattgacatctcctccctgcacagacacagttgactggattgtttttaaagatacagttagcatctctgaaagccagttggctgttttttgtgaagttcttacaatgcaacaatctggttatgtcatgctgatggactacttacaaaacaattttcgagagcaacagtacaagttctctagacaggtgttttcctcatacactggaaaggaagagattcatgaagcagtttgtagttcagaaccagaaaatgttcaggctgacccagagaattataccagccttcttgttacatgggaaagacctcgagtcgtttatgataccatgattgagaagtttgcagttttgtaccagcagttggatggagaggaccaaaccaagcatgaatttttgacagatggctatcaagacttgggtgctattctcaataatttgctacccaatatgagttatgttcttcagatagtagccatatgcactaatggcttatatggaaaatacagcgaccaactgattgtcgacatgcctactgataatcctgaacttgatcttttccctgaattaattggaactgaagaaataatcaaggaggaggaagagggaaaagacattgaagaaggcgctattgtgaatcctggtagagacagtgctacaaaccaaatcaggaaaaaggaaccccagatttctaccacaacacactacaatcgcatagggacgaaatacaatgaagccaagactaaccgatccccaacaagaggaagtgaattctctggaaagggtgatgttcccaatacatctttaaattccacttcccaaccagtcactaaattagccacagaaaaagatatttccttgacttctcagactgtgactgaactgccacctcacactgtggaaggtacttcagcctctttaaatgatggctctaaaactgttcttagatctccacatatgaacttgtcggggactgcagaatccttaaatacagtttctataacagaatatgaggaggagagtttattgaccagtttcaagcttgatactggagctgaagattcttcaggctccagtcccgcaacttctgctatcccattcatctctgagaacatatcccaagggtatatattttcctccgaaaacccagagacaataacatatgatgtccttataccagaatctgctagaaatgcttccgaagattcaacttcatcaggttcagaagaatcactaaaggatccttctatggagggaaatgtgtggtttcctagctctacagacataacagcacagcccgatgttggatcaggcagagagagctttctccagactaattacactgagatacgtgttgatgaatctgagaagacaaccaagtccttttctgcaggcccagtgatgtcacagggtccctcagttacagatctggaaatgccacattattctacctttgcctacttcccaactgaggtaacacctcatgcttttaccccatcctccagacaacaggatttggtctccacggtcaacgtggtatactcgcagacaacccaaccggtatacaatggtgagacacctcttcaaccttcctacagtagtgaagtctttcctctagtcacccctttgttgcttgacaatcagatcctcaacactacccctgctgcttcaagtagtgattcggccttgcatgctacgcctgtatttcccagtgtcgatgtgtcatttgaatccatcctgtcttcctatgatggtgcacctttgcttccattttcctctgcttccttcagtagtgaattgtttcgccatctgcatacagtttctcaaatccttccacaagttacttcagctaccgagagtgataaggtgcccttgcatgcttctctgccagtggctgggggtgatttgctattagagcccagccttgctcagtattctgatgtgctgtccactactcatgctgcttcagagacgctggaatttggtagtgaatctggtgttctttataaaacgcttatgttttctcaagttgaaccacccagcagtgatgccatgatgcatgcacgttcttcagggcctgaaccttcttatgccttgtctgataatgagggctcccaacacatcttcactgtttcttacagttctgcaatacctgtgcatgattctgtgggtgtaacttatcagggttccttatttagcggccctagccatataccaatacctaagtcttcgttaataaccccaactgcatcattactgcagcctactcatgccctctctggtgatggggaatggtctggagcctcttctgatagtgaatttcttttacctgacacagatgggctgacagcccttaacatttcttcacctgtttctgtagctgaatttacatatacaacatctgtgtttggtgatgataataaggcgctttctaaaagtgaaataatatatggaaatgagactgaactgcaaattccttctttcaatgagatggtttacccttctgaaagcacagtcatgcccaacatgtatgataatgtaaataagttgaatgcgtctttacaagaaacctctgtttccatttctagcaccaagggcatgtttccagggtcccttgctcataccaccactaaggtttttgatcatgagattagtcaagttccagaaaataacttttcagttcaacctacacatactgtctctcaagcatctggtgacacttcgcttaaacctgtgcttagtgcaaactcagagccagcatcctctgaccctgcttctagtgaaatgttatctccttcaactcagctcttattttatgagacctcagcttcttttagtactgaagtattgctacaaccttcctttcaggcttctgatgttgacaccttgcttaaaactgttcttccagctgtgcccagtgatccaatattggttgaaacccccaaagttgataaaattagttctacaatgttgcatctcattgtatcaaattctgcttcaagtgaaaacatgctgcactctacatctgtaccagtttttgatgtgtcgcctacttctcatatgcactctgcttcacttcaaggtttgaccatttcctatgcaagtgagaaatatgaaccagttttgttaaaaagtgaaagttcccaccaagtggtaccttctttgtacagtaatgatgagttgttccaaacggccaatttggagattaaccaggcccatcccccaaaaggaaggcatgtatttgctacacctgttttatcaattgatgaaccattaaatacactaataaataagcttatacattccgatgaaattttaacctccaccaaaagttctgttactggtaaggtatttgctggtattccaacagttgcttctgatacatttgtatctactgatcattctgttcctataggaaatgggcatgttgccattacagctgtttctccccacagagatggttctgtaacctcaacaaagttgctgtttccttctaaggcaacttctgagctgagtcatagtgccaaatctgatgccggtttagtgggtggtggtgaagatggtgacactgatgatgatggtgatgatgatgatgatgacagaggtagtgatggcttatccattcataagtgtatgtcatgctcatcctatagagaatcacaggaaaaggtaatgaatgattcagacacccacgaaaacagtcttatggatcagaataatccaatctcatactcactatctgagaattctgaagaagataatagagtcacaagtgtatcctcagacagtcaaactggtatggacagaagtcctggtaaatcaccatcagcaaatgggctatcccaaaagcacaatgatggaaaagaggaaaatgacattcagactggtagtgctctgcttcctctcagccctgaatctaaagcatgggcagttctgacaagtgatgaagaaagtggatcagggcaaggtacctcagatagccttaatgagaatgagacttccacagatttcagttttgcagacactaatgaaaaagatgctgatgggatcctggcagcaggtgactcagaaataactcctggattcccacagtccccaacatcatctgttactagcgagaactcagaagtgttccacgtttcagaggcagaggccagtaatagtagccatgagtctcgtattggtctagctgaggggttggaatccgagaagaaggcagttataccccttgtgatcgtgtcagccctgacttttatctgtctagtggttcttgtgggtattctcatctactggaggaaatgcttccagactgcacacttttacttagaggacagtacatcccctagagttatatccacacctccaacacctatctttccaatttcagatgatgtcggagcaattccaataaagcactttccaaagcatgttgcagatttacatgcaagtagtgggtttactgaagaatttgagacactgaaagagttttaccaggaagtgcagagctgtactgttgacttaggtattacagcagacagctccaaccacccagacaacaagcacaagaatcgatacataaatatcgttgcctatgatcatagcagggttaagctagcacagcttgctgaaaaggatggcaaactgactgattatatcaatgccaattatgttgatggctacaacagaccaaaagcttatattgctgcccaaggcccactgaaatccacagctgaagatttctggagaatgatatgggaacataatgtggaagttattgtcatgataacaaacctcgtggagaaaggaaggagaaaatgtgatcagtactggcctgccgatgggagtgaggagtacgggaactttctggtcactcagaagagtgtgcaagtgcttgcctattatactgtgaggaattttactctaagaaacacaaaaataaaaaagggctcccagaaaggaagacccagtggacgtgtggtcacacagtatcactacacgcagtggcctgacatgggagtaccagagtactccctgccagtgctgacctttgtgagaaaggcagcctatgccaagcgccatgcagtggggcctgttgtcgtccactgcagtgctggagttggaagaacaggcacatatattgtgctagacagtatgttgcagcagattcaacacgaaggaactgtcaacatatttggcttcttaaaacacatccgttcacaaagaaattatttggtacaaactgaggagcaatatgtcttcattcatgatacactggttgaggccatacttagtaaagaaactgaggtgctggacagtcatattcatgcctatgttaatgcactcctcattcctggaccagcaggcaaaacaaagctagagaaacaattccagctcctgagccagtcaaatatacagcagagtgactattctgcagccctaaagcaatgcaacagggaaaagaatcgaacttcttctatcatccctgtggaaagatcaagggttggcatttcatccctgagtggagaaggcacagactacatcaatgcctcctatatcatgggctattaccagagcaatgaattcatcattacccagcaccctctccttcataccatcaaggatttctggaggatgatatgggaccataatgcccaactggtggttatgattcctgatggccaaaacatggcagaagatgaatttgtttactggccaaataaagatgagcctataaattgtgagagctttaaggtcactcttatggctgaagaacacaaatgtctatctaatgaggaaaaacttataattcaggactttatcttagaagctacacaggatgattatgtacttgaagtgaggcactttcagtgtcctaaatggccaaatccagatagccccattagtaaaacttttgaacttataagtgttataaaagaagaagctgccaatagggatgggcctatgattgttcatgatgagcatggaggagtgacggcaggaactttctgtgctctgacaacccttatgcaccaactagaaaaagaaaattccgtggatgtttaccaggtagccaagatgatcaatctgatgaggccaggagtctttgctgacattgagcagtatcagtttctctacaaagtgatcctcagccttgtgagcacaaggcaggaagagaatccatccacctctctggacagtaatggtgcagcattgcctgatggaaatatagctgagagcttagagtctttagtttaacacagaaaggggtgggggaactcacatctgagcattgttttcctcttcctaaaattaggcaggaaaatcagtctagttctgttatctgttgatttcccatcacctgacagtaactttcatgacataggattctgccgccaaatttatatcattaacaatgtgtgcctttttgcaagacttgtaatttacttattatgtttgaactaaaatgattgaattttacagtatttctaagaatggaattgtggtatttttttctgtattgattttaacagaaaatttcaatttatagaggttaggaattccaaactacagaaaatgtttgtttttagtgtcaaatttttagctgtatttgtagcaattatcaggtttgctagaaatataacttttaatacagtagcctgtaaataaaacactcttccatatgatattcaacattttacaactgcagtattcacctaaagtagaaataatctgttacttattgtaaatactgccctagtgtctccatggaccaaatttatatttataattgtagatttttatattttactactgagtcaagttttctagttctgtgtaattgtttagtttaatgacgtagttcattagctggtcttactctaccagttttctgacattgtattgtgttacctaagtcattaactttgtttcagcatgtaattttaacttttgtggaaaatagaaataccttcattttgaaagaagtttttatgagaataacaccttaccaaacattgttcaaatggtttttatccaaggaattgcaaaaataaatataaatattgccattaa

SEQ ID NO: 171939 - DNA, 4627 bp, Homo sapiens
  Payload ID: 13779
  Gene Symbol: PTPRZ1
  Gene Name: protein tyrosine phosphatase, receptor-type, Z polypeptide 1
  Uniprot ID: P23471
  ENST ID: ENST00000449182
  CDS Start-End: 140-4486
cgcacgcacgatctcacttcgatctatacactggaggattaaaacaaacaaacaaaaaaaacatttccttcgctccccctccctctccactctgagaagcagaggagccgcacggcgaggggccgcagaccgtctggaaatgcgaatcctaaagcgtttcctcgcttgcattcagctcctctgtgtttgccgcctggattgggctaatggatactacagacaacagagaaaacttgttgaagagattggctggtcctatacaggagcactgaatcaaaaaaattggggaaagaaatatccaacatgtaatagcccaaaacaatctcctatcaatattgatgaagatcttacacaagtaaatgtgaatcttaagaaacttaaatttcagggttgggataaaacatcattggaaaacacattcattcataacactgggaaaacagtggaaattaatctcactaatgactaccgtgtcagcggaggagtttcagaaatggtgtttaaagcaagcaagataacttttcactggggaaaatgcaatatgtcatctgatggatcagagcatagtttagaaggacaaaaatttccacttgagatgcaaatctactgctttgatgcggaccgattttcaagttttgaggaagcagtcaaaggaaaagggaagttaagagctttatccattttgtttgaggttgggacagaagaaaatttggatttcaaagcgattattgatggagtcgaaagtgttagtcgttttgggaagcaggctgctttagatccattcatactgttgaaccttctgccaaactcaactgacaagtattacatttacaatggctcattgacatctcctccctgcacagacacagttgactggattgtttttaaagatacagttagcatctctgaaagccagttggctgttttttgtgaagttcttacaatgcaacaatctggttatgtcatgctgatggactacttacaaaacaattttcgagagcaacagtacaagttctctagacaggtgttttcctcatacactggaaaggaagagattcatgaagcagtttgtagttcagaaccagaaaatgttcaggctgacccagagaattataccagccttcttgttacatgggaaagacctcgagtcgtttatgataccatgattgagaagtttgcagttttgtaccagcagttggatggagaggaccaaaccaagcatgaatttttgacagatggctatcaagacttgggtgctattctcaataatttgctacccaatatgagttatgttcttcagatagtagccatatgcactaatggcttatatggaaaatacagcgaccaactgattgtcgacatgcctactgataatcctgaacttgatcttttccctgaattaattggaactgaagaaataatcaaggaggaggaagagggaaaagacattgaagaaggcgctattgtgaatcctggtagagacagtgctacaaaccaaatcaggaaaaaggaaccccagatttctaccacaacacactacaatcgcatagggacgaaatacaatgaagccaagactaaccgatccccaacaagaggaagtgaattctctggaaagggtgatgttcccaatacatctttaaattccacttcccaaccagtcactaaattagccacagaaaaagatatttccttgacttctcagactgtgactgaactgccacctcacactgtggaaggtacttcagcctctttaaatgatggctctaaaactgttcttagatctccacatatgaacttgtcggggactgcagaatccttaaatacagtttctataacagaatatgaggaggagagtttattgaccagtttcaagcttgatactggagctgaagattcttcaggctccagtcccgcaacttctgctatcccattcatctctgagaacatatcccaagggtatatattttcctccgaaaacccagagacaataacatatgatgtccttataccagaatctgctagaaatgcttccgaagattcaacttcatcaggttcagaagaatcactaaaggatccttctatggagggaaatgtgtggtttcctagctctacagacataacagcacagcccgatgttggatcaggcagagagagctttctccagactaattacactgagatacgtgttgatgaatctgagaagacaaccaagtccttttctgcaggcccagtgatgtcacagggtccctcagttacagatctggaaatgccacattattctacctttgcctacttcccaactgaggtaacacctcatgcttttaccccatcctccagacaacaggatttggtctccacggtcaacgtggtatactcgcagacaacccaaccggtatacaatgaggccagtaatagtagccatgagtctcgtattggtctagctgaggggttggaatccgagaagaaggcagttataccccttgtgatcgtgtcagccctgacttttatctgtctagtggttcttgtgggtattctcatctactggaggaaatgcttccagactgcacacttttacttagaggacagtacatcccctagagttatatccacacctccaacacctatctttccaatttcagatgatgtcggagcaattccaataaagcactttccaaagcatgttgcagatttacatgcaagtagtgggtttactgaagaatttgaggaagtgcagagctgtactgttgacttaggtattacagcagacagctccaaccacccagacaacaagcacaagaatcgatacataaatatcgttgcctatgatcatagcagggttaagctagcacagcttgctgaaaaggatggcaaactgactgattatatcaatgccaattatgttgatggctacaacagaccaaaagcttatattgctgcccaaggcccactgaaatccacagctgaagatttctggagaatgatatgggaacataatgtggaagttattgtcatgataacaaacctcgtggagaaaggaaggagaaaatgtgatcagtactggcctgccgatgggagtgaggagtacgggaactttctggtcactcagaagagtgtgcaagtgcttgcctattatactgtgaggaattttactctaagaaacacaaaaataaaaaagggctcccagaaaggaagacccagtggacgtgtggtcacacagtatcactacacgcagtggcctgacatgggagtaccagagtactccctgccagtgctgacctttgtgagaaaggcagcctatgccaagcgccatgcagtggggcctgttgtcgtccactgcagtgctggagttggaagaacaggcacatatattgtgctagacagtatgttgcagcagattcaacacgaaggaactgtcaacatatttggcttcttaaaacacatccgttcacaaagaaattatttggtacaaactgaggagcaatatgtcttcattcatgatacactggttgaggccatacttagtaaagaaactgaggtgctggacagtcatattcatgcctatgttaatgcactcctcattcctggaccagcaggcaaaacaaagctagagaaacaattccagctcctgagccagtcaaatatacagcagagtgactattctgcagccctaaagcaatgcaacagggaaaagaatcgaacttcttctatcatccctgtggaaagatcaagggttggcatttcatccctgagtggagaaggcacagactacatcaatgcctcctatatcatgggctattaccagagcaatgaattcatcattacccagcaccctctccttcataccatcaaggatttctggaggatgatatgggaccataatgcccaactggtggttatgattcctgatggccaaaacatggcagaagatgaatttgtttactggccaaataaagatgagcctataaattgtgagagctttaaggtcactcttatggctgaagaacacaaatgtctatctaatgaggaaaaacttataattcaggactttatcttagaagctacacaggatgattatgtacttgaagtgaggcactttcagtgtcctaaatggccaaatccagatagccccattagtaaaacttttgaacttataagtgttataaaagaagaagctgccaatagggatgggcctatgattgttcatgatgagcatggaggagtgacggcaggaactttctgtgctctgacaacccttatgcaccaactagaaaaagaaaattccgtggatgtttaccaggtagccaagatgatcaatctgatgaggccaggagtctttgctgacattgagcagtatcagtttctctacaaagtgatcctcagccttgtgagcacaaggcaggaagagaatccatccacctctctggacagtaatggtgcagcattgcctgatggaaatatagctgagagcttagagtctttagtttaacacagaaaggggtgggggaactcacatctgagcattgttttcctcttcctaaaattaggcaggaaaatcagtctagttctgttatctgttgatttcccatcacctgacagtaactttcatgacataggattctgccgccaa

SEQ ID NO: 171940 - DNA, 1551 bp, Homo sapiens
  Payload ID: 13780
  Gene Symbol: PROZ
  Gene Name: protein Z, vitamin K-dependent plasma glycoprotein
  Uniprot ID: P22891
  ENST ID: ENST00000342783
  CDS Start-End: 8-1276
ggtgggaatggcaggctgcgtcccactgctccagggcctggtcctggtcctcgccctccatcgtgtggagccctcagccacttcactgaaggaacgacatggactccattctgactctgcctgcacaggcgtccaggaaagcttatttctcccggcctccaaagcaaacgacgttctggtgaggtggaagcgtgcgggctcctatcttctggaagaactcttcgagggaaacttggaaaaagaatgttatgaagaaatctgtgtctatgaagaagcaagagaagtgtttgaaaatgaagtagtcactgatgaattctggagacgatataagggcggctccccgtgcatctcccagccctgcctccacaacggctcttgccaggacagcatctggggctacacctgcacctgctcccccggctatgagggcagcaactgcgagctggctaaaaatgaatgtcacccagagcggactgatgggtgtcaacacttctgcctcccaggacaggaatcctacacatgcagctgtgctcagggctacaggcttggtgaggaccacaaacagtgtgtgccccacgaccagtgtgcctgcggggtgctgacctctgagaagcgtgcaccggatctacaggacctcccgtggcaggtaaagttaacaaattccgaaggaaaagacttctgtggtggtgttataatacgggaaaattttgtactgacaacagcaaaatgttcactgttacacaggaatattactgtaaaaacatattttaacagaacgagccaagacccgctgatgatcaagataacgcacgtccatgtgcacatgcggtatgacgcggacgcgggggagaatgacctgtcactgctggagctggagtggcccatccagtgcccaggtgcggggctccccgtgtgcacccctgagaaagacttcgctgagcacctcctcatcccacgcaccaggggcctcctcagcggctgggcacgcaatggcactgacctgggcaactcgctgaccacgcggcctgtcacacttgtggagggggaggagtgcgggcaggtcctgaatgtgactgtcaccaccaggacctactgtgagagaagcagcgtggcggccatgcactggatggatggaagtgtggtcaccagagaacacagaggctcctggtttctcacgggggtcctgggctcgcagccagtaggagggcaggctcacatggtccttgtcaccaaggtctccaggtactcactctggtttaaacagatcatgaactaactgaaactcagctagccagaatgaacaacacaaccggaagcgggattccaagctggcactgccactgtggagggcgctgaaacttcatcacacactgagaggccgtcacagccccagaccacccgcttggcccacgcagcagcagagccgccgtttgctgggttgtttaccgagcactgtgacctttctttccctggaactctttatctcaatagagaccttaaaagaaaacatgagatacgttaaataataaaataagataatctgtcagtcat

SEQ ID NO: 171941 - DNA, 1488 bp, Homo sapiens
  Payload ID: 13780
  Gene Symbol: PROZ
  Gene Name: protein Z, vitamin K-dependent plasma glycoprotein
  Uniprot ID: P22891
  ENST ID: ENST00000375547
  CDS Start-End: 8-1210
ggtgggaatggcaggctgcgtcccactgctccagggcctggtcctggtcctcgccctccatcgtgtggagccctcagtatttctcccggcctccaaagcaaacgacgttctggtgaggtggaagcgtgcgggctcctatcttctggaagaactcttcgagggaaacttggaaaaagaatgttatgaagaaatctgtgtctatgaagaagcaagagaagtgtttgaaaatgaagtagtcactgatgaattctggagacgatataagggcggctccccgtgcatctcccagccctgcctccacaacggctcttgccaggacagcatctggggctacacctgcacctgctcccccggctatgagggcagcaactgcgagctggctaaaaatgaatgtcacccagagcggactgatgggtgtcaacacttctgcctcccaggacaggaatcctacacatgcagctgtgctcagggctacaggcttggtgaggaccacaaacagtgtgtgccccacgaccagtgtgcctgcggggtgctgacctctgagaagcgtgcaccggatctacaggacctcccgtggcaggtaaagttaacaaattccgaaggaaaagacttctgtggtggtgttataatacgggaaaattttgtactgacaacagcaaaatgttcactgttacacaggaatattactgtaaaaacatattttaacagaacgagccaagacccgctgatgatcaagataacgcacgtccatgtgcacatgcggtatgacgcggacgcgggggagaatgacctgtcactgctggagctggagtggcccatccagtgcccaggtgcggggctccccgtgtgcacccctgagaaagacttcgctgagcacctcctcatcccacgcaccaggggcctcctcagcggctgggcacgcaatggcactgacctgggcaactcgctgaccacgcggcctgtcacacttgtggagggggaggagtgcgggcaggtcctgaatgtgactgtcaccaccaggacctactgtgagagaagcagcgtggcggccatgcactggatggatggaagtgtggtcaccagagaacacagaggctcctggtttctcacgggggtcctgggctcgcagccagtaggagggcaggctcacatggtccttgtcaccaaggtctccaggtactcactctggtttaaacagatcatgaactaactgaaactcagctagccagaatgaacaacacaaccggaagcgggattccaagctggcactgccactgtggagggcgctgaaacttcatcacacactgagaggccgtcacagccccagaccacccgcttggcccacgcagcagcagagccgccgtttgctgggttgtttaccgagcactgtgacctttctttccctggaactctttatctcaatagagaccttaaaagaaaacatgagatacgttaaataataaaataagataatctgtcagtcataaa

SEQ ID NO: 171942 - DNA, 841 bp, Homo sapiens; identical to SEQ ID NO: 164250
  Payload ID: 13781
  Gene Symbol:
  Gene Name: Protein-arginine deiminase type-4 [Source:UniProtKB/Swiss-Prot
  Acc:Q9UM07]
  ENST ID: ENST00000626048
  CDS Start-End: 29-412

SEQ ID NO: 171943 - DNA, 2267 bp, Homo sapiens; identical to SEQ ID NO: 164249
  Payload ID: 13781
  Gene Symbol:
  Gene Name: Protein-arginine deiminase type-4 [Source:UniProtKB/Swiss-Prot
  Acc:Q9UM07]
  Uniprot ID: Q9UM07
  ENST ID: ENST00000628229
  CDS Start-End: 27-2018

SEQ ID NO: 171944 - DNA, 2396 bp, Homo sapiens; identical to SEQ ID NO: 164251
  Payload ID: 13782
  Gene Symbol:
  Gene Name: Protein-arginine deiminase type-6 [Source:UniProtKB/Swiss-Prot
  Acc:Q6TGC4]
  Uniprot ID: Q6TGC4
  ENST ID: ENST00000625380
  CDS Start-End: 51-2135

SEQ ID NO: 171945 - DNA, 1026 bp, Homo sapiens
  Payload ID: 13783
  Gene Symbol: PRTN3
  Gene Name: proteinase 3
  Uniprot ID: P24158
  ENST ID: ENST00000234347
  CDS Start-End: 50-820
cattgggctataagaggagcttgaccgtgggtgcaccctggaccccaccatggctcaccggccccccagccctgccctggcgtccgtgctgctggccttgctgctgagcggtgctgcccgagctgcggagatcgtgggcgggcacgaggcgcagccacactcccggccctacatggcctccctgcagatgcgggggaacccgggcagccacttctgcggaggcaccttgatccaccccagcttcgtgctgacggccgcgcactgcctgcgggacataccccagcgcctggtgaacgtggtgctcggagcccacaacgtgcggacgcaggagcccacccagcagcacttctcggtggctcaggtgtttctgaacaactacgacgcggagaacaaactgaacgacgttctcctcatccagctgagcagcccagccaacctcagtgcctccgtcgccacagtccagctgccacagcaggaccagccagtgccccacggcacccagtgcctggccatgggctggggccgcgtgggtgcccacgaccccccagcccaggtcctgcaggagctcaatgtcaccgtggtcaccttcttctgccggccacataacatttgcactttcgtccctcgccgcaaggccggcatctgcttcggagactcaggtggccccctgatctgtgatggcatcatccaaggaatagactccttcgtgatctggggatgtgccacccgccttttccctgacttcttcacgcgggtagccctctacgtggactggatccgttccacgctgcgccgtgtggaggccaagggccgcccctgaaccgcccctcccacagcgctggccgggaccccgagcctggctccaaaccctcgaggcggatctttggacagaagcagctcttccccgaacactgtggcgtccgggacggccccacccgtccccccacactccctcccacggggctccgggagacaggccggccctgcacctcaccccaccgtgacctcaataaacgttgaaactcc

SEQ ID NO: 171946 - DNA, 1036 bp, Homo sapiens
  Payload ID: 13783
  Gene Symbol: PRTN3
  Gene Name: proteinase 3
  ENST ID: ENST00000544537
  CDS Start-End: 183-830
aggcactgaccgggttgcagatcgggagacggaggctcggagaggcccaggggctgctctgccatcccccctttccctgcagcctgggggctccctgacgcctggactccccccctgcaggtgctgcccgagctgcggagatcgtgggcgggcacgaggcgcagccacactcccggccctacatggcctccctgcagatgcgggggaacccgggcagccacttctgcggaggcaccttgatccaccccagcttcgtgctgacggccgcgcactgcctgcgggacataccccagcgcctggtgaacgtggtgctcggagcccacaacgtgcggacgcaggagcccacccagcagcacttctcggtggctcaggtgtttctgaacaactacgacgcggagaacaaactgaacgacgttctcctcatccagctgagcagcccagccaacctcagtgcctccgtcgccacagtccagctgccacagcaggaccagccagtgccccacggcacccagtgcctggccatgggctggggccgcgtgggtgcccacgaccccccagcccaggtcctgcaggagctcaatgtcaccgtggtcaccttcttctgccggccacataacatttgcactttcgtccctcgccgcaaggccggcatctgcttcggagactcaggtggccccctgatctgtgatggcatcatccaaggaatagactccttcgtgatctggggatgtgccacccgccttttccctgacttcttcacgcgggtagccctctacgtggactggatccgttccacgctgcgccgtgtggaggccaagggccgcccctgaaccgcccctcccacagcgctggccgggaccccgagcctggctccaaaccctcgaggcggatctttggacagaagcagctcttccccgaacactgtggcgtccgggacggccccacccgtccccccacactccctcccacggggctccgggagacaggccggccctgcacctcaccccaccgtgacctcaataaacgttgaaactcc

SEQ ID NO: 171947 - DNA, 1036 bp, Homo sapiens; identical to SEQ ID NO: 171946
  Payload ID: 13783
  Gene Symbol: PRTN3
  Gene Name: proteinase 3
  ENST ID: ENST00000622152
  CDS Start-End: 183-830

SEQ ID NO: 171948 - DNA, 1026 bp, Homo sapiens; identical to SEQ ID NO: 171945
  Payload ID: 13783
  Gene Symbol: PRTN3
  Gene Name: proteinase 3
  Uniprot ID: P24158
  ENST ID: ENST00000612112
  CDS Start-End: 50-820

SEQ ID NO: 171949 - DNA, 2864 bp, Homo sapiens; identical to SEQ ID NO: 140003
  Payload ID: 13784
  Gene Symbol:
  Gene Name: Protein-cysteine N-palmitoyltransferase HHAT [Source:UniProtKB/Swiss-Prot
  Acc:Q5VTY9]
  ENST ID: ENST00000628249
  CDS Start-End: 284-532

SEQ ID NO: 171950 - DNA, 3626 bp, Homo sapiens; identical to SEQ ID NO: 139999
  Payload ID: 13784
  Gene Symbol:
  Gene Name: Protein-cysteine N-palmitoyltransferase HHAT [Source:UniProtKB/Swiss-Prot
  Acc:Q5VTY9]
  Uniprot ID: Q5VTY9
  ENST ID: ENST00000625820
  CDS Start-End: 228-1709

SEQ ID NO: 171951 - DNA, 3594 bp, Homo sapiens; identical to SEQ ID NO: 139997
  Payload ID: 13784
  Gene Symbol:
  Gene Name: Protein-cysteine N-palmitoyltransferase HHAT [Source:UniProtKB/Swiss-Prot
  Acc:Q5VTY9]
  Uniprot ID: Q5VTY9
  ENST ID: ENST00000629360
  CDS Start-End: 196-1677

SEQ ID NO: 171952 - DNA, 2714 bp, Homo sapiens; identical to SEQ ID NO: 139998
  Payload ID: 13784
  Gene Symbol:
  Gene Name: Protein-cysteine N-palmitoyltransferase HHAT [Source:UniProtKB/Swiss-Prot
  Acc:Q5VTY9]
  ENST ID: ENST00000629127
  CDS Start-End: 246-797

SEQ ID NO: 171953 - DNA, 3507 bp, Homo sapiens; identical to SEQ ID NO: 140002
  Payload ID: 13784
  Gene Symbol:
  Gene Name: Protein-cysteine N-palmitoyltransferase HHAT [Source:UniProtKB/Swiss-Prot
  Acc:Q5VTY9]
  Uniprot ID: Q5VTY9
  ENST ID: ENST00000628693
  CDS Start-End: 106-1590

SEQ ID NO: 171954 - DNA, 3164 bp, Homo sapiens; identical to SEQ ID NO: 140005
  Payload ID: 13784
  Gene Symbol:
  Gene Name: Protein-cysteine N-palmitoyltransferase HHAT [Source:UniProtKB/Swiss-Prot
  Acc:Q5VTY9]
  Uniprot ID: Q5VTY9
  ENST ID: ENST00000625523
  CDS Start-End: 177-1247

SEQ ID NO: 171955 - DNA, 721 bp, Homo sapiens; identical to SEQ ID NO: 140000
  Payload ID: 13784
  Gene Symbol:
  Gene Name: Protein-cysteine N-palmitoyltransferase HHAT [Source:UniProtKB/Swiss-Prot
  Acc:Q5VTY9]
  ENST ID: ENST00000631353
  CDS Start-End: 99-721

SEQ ID NO: 171956 - DNA, 3575 bp, Homo sapiens; identical to SEQ ID NO: 140001
  Payload ID: 13784
  Gene Symbol:
  Gene Name: Protein-cysteine N-palmitoyltransferase HHAT [Source:UniProtKB/Swiss-Prot
  Acc:Q5VTY9]
  Uniprot ID: Q5VTY9
  ENST ID: ENST00000627903
  CDS Start-End: 177-1658

SEQ ID NO: 171957 - DNA, 3446 bp, Homo sapiens; identical to SEQ ID NO: 140004
  Payload ID: 13784
  Gene Symbol:
  Gene Name: Protein-cysteine N-palmitoyltransferase HHAT [Source:UniProtKB/Swiss-Prot
  Acc:Q5VTY9]
  Uniprot ID: Q5VTY9
  ENST ID: ENST00000626327
  CDS Start-End: 243-1529

SEQ ID NO: 171958 - DNA, 3300 bp, Homo sapiens
  Payload ID: 13785
  Gene Symbol: PRKRIR
  Gene Name: protein-kinase, interferon-inducible double stranded RNA dependent inhibitor, repressor of (P58 repressor)
  Uniprot ID: O43422
  ENST ID: ENST00000260045
  CDS Start-End: 107-2392
cgagccggccggccggcctggctcccctccccggccccgacgggcgggcggactgccctgaggaggcggggaggggagggctgggccggccggcgggcgggcgacgatgccgaacttctgcgctgcccccaactgcacgcggaagagcacgcagtccgacttggccttcttcaggttcccgcgggaccctgccagatgccagaagtgggtggagaactgtaggagagcagacttagaagataaaacacctgatcagctaaataaacattatcgattatgtgccaaacattttgagacctctatgatctgtagaactagtccttataggacagttcttcgagataatgcaataccaacaatatttgatcttaccagtcatttgaacaacccacatagtagacacagaaaacgaataaaagaactgagtgaagatgaaatcaggacactgaaacagaaaaaaattgatgaaacttctgagcaggaacaaaaacataaagaaaccaacaatagcaatgctcagaaccccagcgaagaagagggtgaagggcaagatgaggacattttacctctaacccttgaagagaaggaaaacaaagaatacctaaaatctctatttgaaatcttgattctgatgggaaagcaaaacatacctctggatggacatgaggctgatgaaatcccagaaggtctctttactccagataactttcaggcactgctggagtgtcggataaattctggtgaagaggttctgagaaagcggtttgagacaacagcagttaacacgttgttttgttcaaaaacacagcagaggcagatgctagagatctgtgagagctgtattcgagaagaaactctcagggaagtgagagactcacacttcttttccattatcactgacgatgtagtggacatagcaggggaagagcacctacctgtgttggtgaggtttgttgatgaatctcataacctaagagaggaatttataggcttcctgccttatgaagccgatgcagaaattttggctgtgaaatttcacactatgataactgagaagtggggattaaatatggagtattgtcgtggccaggcttacattgtctctagtggattttcttccaaaatgaaagttgttgcttctagacttttagagaaatatccccaagctatctacacactctgctcttcctgtgccttaaatatgtggttggcaaaatcagtacctgttatgggagtatctgttgcattaggaacaattgaggaagtttgttcttttttccatcgatcaccacaactgcttttagaacttgacaacgtaatttctgttctttttcagaacagtaaagaaaggggtaaagaactgaaggaaatctgccattctcagtggacaggcaggcatgatgcttttgaaattttagtggaactcctgcaagcacttgttttatgtttagatggtataaatagtgacacaaatattagatggaataactatatagctggccgagcatttgtactctgcagtgcagtgtcagattttgatttcattgttactattgttgttcttaaaaatgtcctatcttttacaagagcctttgggaaaaacctccaggggcaaacctctgatgtcttctttgcggccggtagcttgactgcagtactgcattcactcaacgaagtgatggaaaatattgaagtttatcatgaattttggtttgaggaagccacaaatttggcaaccaaacttgatattcaaatgaaactccctgggaaattccgcagagctcaccagggtaacttggaatctcagctaacctctgagagttactataaagaaaccctaagtgtcccaacagtggagcacattattcaggaacttaaagatatattctcagaacagcacctcaaagctcttaaatgcttatctctggtaccctcagtcatgggacaactcaaattcaatacgtcggaggaacaccatgctgacatgtatagaagtgacttacccaatcctgacacgctgtcagctgagcttcattgttggagaatcaaatggaaacacagggggaaagatatagagcttccgtccaccatctatgaagccctccacctgcctgacatcaagttttttcctaatgtgtatgcattgctgaaggtcctgtgtattcttcctgtgatgaaggttgagaatgagcggtatgaaaatggacgaaagcgtcttaaagcatatttgaggaacactttgacagaccaaaggtcaagtaacttggctttgcttaacataaattttgatataaaacacgacctggatttaatggtggacacatatattaaactctatacaagtaagtcagagcttcctacagataattccgaaactgtggaaaatacctaagagacttttaaaaataggctttcttatatttgatatttggaagaaaaagccgtaaggtgtatgtagaccacttaatcactaaatatctttgcctataggactccattgaatacattagccattgataatctacctgtttaaatggcccctgtttgaactctcaagctttgaagacctacctgttcttccagaagagaacgttgaaagtgccatgtttccttttgcgtgatctctgttgatggcactctggaattgtttcagttaagtcattttagacatagcatttattatcactgtggatctctacttgttgggtgttatgaattctttgaagaaatatattttgaagaggtgtgggaggaaggaatacattttataaaatgttgtagtgaagcccacaattgacctttgactaataggagttttaagtatgttaaaaatctatactggacagttacaagaaattaccggagaaaagcttgtgagctcaccaaacaaggatttcagtgtagattttgtctttcttgaacttaaagaaacaaatgacaaagtttgaatggaaaagcctgctgttgttccacatctcgttgctgtttacattcctttgtggagcctacatcttcctaagctttttagcaggtatatgttgaacacttctgtttcatggttgagacagaatcagaggccatggatactgacaactgatttgtctgttttttttctctgtctttttccatgactcttatatactgcctcatcttgatttataagcaaaacctggaaaacctacaaaataagtgttgtggtttatctagaaaaatatggaaaatattgctgttatttttggtgaagaaaatcaattttgtatagtttatttcaatctaaataaaatgtgaattttgtttaaa

SEQ ID NO: 171959 - DNA, 882 bp, Homo sapiens
  Payload ID: 13785
  Gene Symbol: PRKRIR
  Gene Name: protein-kinase, interferon-inducible double stranded RNA dependent inhibitor, repressor of (P58 repressor)
  ENST ID: ENST00000528993
  CDS Start-End: 136-375
cccgcccctcccccgcgcgtcggccctgccgagccggccggccggcctggctcccctccccggccccgacgggcgggcggactgccctgaggaggcggggaggggagggctgggccggccggcgggcgggcgacgatgccgaacttctgcgctgcccccaactgcacgcggaagagcacgcagtccgacttggccttcttcaggttcccgcgggaccctgccagatgccagaagtgggtggagaactgtaggagagcagacttagaagataaaacacctgatcagctaaataaacattatcgattatgtgccaaacattttgagacctctatgatctgtagaactatacattttgcagaggcatcagaaaactaaagaatgattgggttattttatttctcaaaattaattgaagcagatacttgtgaagtcattgggagagtccttataggacagttcttcgagataatgcaataccaacaatatttgatcttaccagtcatttgaacaacccacatagtagacacagaaaacgaataaaagaactgagtgaagatgaaatcaggacactgaaacagaaaaaaattgatgaaacttctgagcaggaacaaaaacataaagaaaccaacaatagcaatgctcagaaccccagcgaagaagagggtgaagggcaagatgaggacattttacctctaacccttgaagagaaggaaaacaaagaatacctaaaatctctatttgaaatcttgattctgatgggaaagcaaaacatacctctggatggacatgaggctgatgaaatcccagaaggtctctttactccagataactttcaggcactgctggagtgtcggataaattctggtgaagaggttctgagaa

SEQ ID NO: 171960 - DNA, 1293 bp, Homo sapiens
  Payload ID: 13786
  Gene Symbol: PCMT1
  Gene Name: protein-L-isoaspartate (D-aspartate) O-methyltransferase
  ENST ID: ENST00000367378
  CDS Start-End: 285-1142
ccgccatcccgccgtcccgctcggtgaccggagacacagccgggaacgcgactgatcaggctaccgagccgggccgcagggcgaaagcggtgcggtccgaggcctcagaaagggacacgcagcagcggaagtggcgctgactcagcccggcctccctgcagtcccctggcagcggtagcagccacaggggcgggcggctgggccacacgcctcccccgccctcggccccacccggccgcaccctaagccgcgcggcgtcacagagcgcatgcgtgccgcgggggatgccgggagcgcgcagtggcggcagcggcggcgacggcagtaacagcggcagctacagcggggacgcgagcggggcggtgacggtgtgggaggtggtctcactcttgggaaaactgctgggcaccgtcgtcgcgctgaaggtggttctgtacctgctccgagtgtgcttagcgatggcctggaaatccggcggcgccagccactcggagctaatccacaatctccgcaaaaatggaatcatcaagacagataaagtatttgaagtgatgctggctacagaccgctcccactatgcaaaatgtaacccatacatggattctccacaatcaataggtttccaagcaacaatcagtgctccacacatgcatgcatatgcgctagaacttctatttgatcagttgcatgaaggagctaaagctcttgatgtaggatctggaagtggaatccttactgcatgttttgcacgtatggttggatgtactggaaaagtcataggaattgatcacattaaagagctagtagatgactcagtaaataatgtcaggaaggacgatccaacacttctgtcttcagggagagtacagcttgttgtgggggatggaagaatgggatatgctgaagaagccccttatgatgccattcatgtgggagctgcagcccctgttgtaccccaggcgctaatagatcagttaaagcccggaggaagattgatattgcctgttggtcctgcaggcggaaaccaaatgttggagcagtatgacaagctacaagatggcagcatcaaaatgaagcctctgatgggggtgatatacgtgcctttaacagataaagaaaagcagtggtccaggtggaagtgattttatcttctgctctttcttcttccacacatgcaaggtgaaagggtgtggattttaagacattagactacaagagctgtttttggttgtcacctttatgctcctccattataacgtcagaaattcattacattaaaaatgtgaaaaatgt

SEQ ID NO: 171961 - DNA, 1628 bp, Homo sapiens
  Payload ID: 13786
  Gene Symbol: PCMT1
  Gene Name: protein-L-isoaspartate (D-aspartate) O-methyltransferase
  Uniprot ID: P22061
  ENST ID: ENST00000367380
  CDS Start-End: 34-786
gcggcgtcacagagcgcatgcgtgccgcgggggatgccgggagcgcgcagtggcggcagcggcggcgacggcagtaacagcggcagctacagcggggacgcgagcggggcggtgacggtgtgggaggtggtctcactcttgggaaaactgctgggcaccgtcgtcgcgctgaaggtggttctgtacctgctccgagtgtgcttagcgatggcctggaaatccggcggcgccagccactcggagctaatccacaatctccgcagtttccaagcaacaatcagtgctccacacatgcatgcatatgcgctagaacttctatttgatcagttgcatgaaggagctaaagctcttgatgtaggatctggaagtggaatccttactgcatgttttgcacgtatggttggatgtactggaaaagtcataggaattgatcacattaaagagctagtagatgactcagtaaataatgtcaggaaggacgatccaacacttctgtcttcagggagagtacagcttgttgtgggggatggaagaatgggatatgctgaagaagccccttatgatgccattcatgtgggagctgcagcccctgttgtaccccaggcgctaatagatcagttaaagcccggaggaagattgatattgcctgttggtcctgcaggcggaaaccaaatgttggagcagtatgacaagctacaagatggcagcatcaaaatgaagcctctgatgggggtgatatacgtgcctttaacagataaagaaaagcagtggtccaggtggaagtgattttatcttctgctctttcttcttccacacatgcaagggatgaattgtaaaagcaacatcagcttgaccagtataaaattacagtggattgctcatctcagtcctcaaagctttttgaaaaccaacaccatcacagcttgttttggactttgttacactgttattttcagcatgaaaatgtgtgtttttttagggtttctgattcttcaaagaggcacagagccaaattggtagaggaaggatgcaaagtataaatttgtgtaatattactttaacatgcccatattttacttggaaatattaaaagaaagggttctgtaaaatggaaaacttagtttgtgaattgattttgaggagtggtttttcttttcttggacacttaattctgttctgatattaatttatcagattgcttttgtgcattggataacaccaccattcacaagttaagattcttggtatttggatatctgttagatgctactaagaaaatagagatgagctttctttttaaagcttttgatgtggtgtcatagaatagcatgttgtagatacaatcagctgctttgttaccttaaaactaggcatttgtaaatattaaaccataagatggcaggtgatgtcctgtaaacactcagctgttcagattggacataactgacttagttcttcccttctctctctctcaaaattataggagacttgtagtttagtgtggttttctgtttctaatttgctgctgataatgtatatgaacttaacatgctgtgtaagctgtgtcctagttcttgaacagtttatgcagtgctgctttgccaaataaagttaaaagtaaaagaggc

SEQ ID NO: 171962 - DNA, 1938 bp, Homo sapiens
  Payload ID: 13786
  Gene Symbol: PCMT1
  Gene Name: protein-L-isoaspartate (D-aspartate) O-methyltransferase
  ENST ID: ENST00000367384
  CDS Start-End: 286-1146
cccgccatcccgccgtcccgctcggtgaccggagacacagccgggaacgcgactgatcaggctaccgagccgggccgcagggcgaaagcggtgcggtccgaggcctcagaaagggacacgcagcagcggaagtggcgctgactcagcccggcctccctgcagtcccctggcagcggtagcagccacaggggcgggcggctgggccacacgcctcccccgccctcggccccacccggccgcaccctaagccgcgcggcgtcacagagcgcatgcgtgccgcgggggatgccgggagcgcgcagtggcggcagcggcggcgacggcagtaacagcggcagctacagcggggacgcgagcggggcggtgacggtgtgggaggtggtctcactcttgggaaaactgctgggcaccgtcgtcgcgctgaaggtggttctgtacctgctccgagtgtgcttagcgatggcctggaaatccggcggcgccagccactcggagctaatccacaatctccgcaaaaatggaatcatcaagacagataaagtatttgaagtgatgctggctacagaccgctcccactatgcaaaatgtaacccatacatggattctccacaatcaataggtttccaagcaacaatcagtgctccacacatgcatgcatatgcgctagaacttctatttgatcagttgcatgaaggagctaaagctcttgatgtaggatctggaagtggaatccttactgcatgttttgcacgtatggttggatgtactggaaaagtcataggaattgatcacattaaagagctagtagatgactcagtaaataatgtcaggaaggacgatccaacacttctgtcttcagggagagtacagcttgttgtgggggatggaagaatgggatatgctgaagaagccccttatgatgccattcatgtgggagctgcagcccctgttgtaccccaggcgctaatagatcagttaaagcccggaggaagattgatattgcctgttggtcctgcaggcggaaaccaaatgttggagcagtatgacaagctacaagatggcagcatcaaaatgaagcctctgatgggggtgatatacgtgcctttaacagataaagaaaagcagtggtccagggatgaattgtaaaagcaacatcagcttgaccagtataaaattacagtggattgctcatctcagtcctcaaagctttttgaaaaccaacaccatcacagcttgttttggactttgttacactgttattttcagcatgaaaatgtgtgtttttttagggtttctgattcttcaaagaggcacagagccaaattggtagaggaaggatgcaaagtataaatttgtgtaatattactttaacatgcccatattttacttggaaatattaaaagaaagggttctgtaaaatggaaaacttagtttgtgaattgattttgaggagtggtttttcttttcttggacacttaattctgttctgatattaatttatcagattgcttttgtgcattggataacaccaccattcacaagttaagattcttggtatttggatatctgttagatgctactaagaaaatagagatgagctttctttttaaagcttttgatgtggtgtcatagaatagcatgttgtagatacaatcagctgctttgttaccttaaaactaggcatttgtaaatattaaaccataagatggcaggtgatgtcctgtaaacactcagctgttcagattggacataactgacttagttcttcccttctctctctctcaaaattataggagacttgtagtttagtgtggttttctgtttctaatttgctgctgataatgtatatgaacttaacatgctgtgtaagctgtgtcctagttcttgaacagtttatgcagtgctgctttgccaaataaagttaaaagtaaaagaggc

SEQ ID NO: 171963 - DNA, 600 bp, Homo sapiens
  Payload ID: 13786
  Gene Symbol: PCMT1
  Gene Name: protein-L-isoaspartate (D-aspartate) O-methyltransferase
  ENST ID: ENST00000494411
  CDS Start-End: 2-394
gatgccgggagcgcgcagtggcggcagcggcggcgacggcagtaacagcggcagctacagcggggacgcgagcggggcggtgacggtgtgggaggtggtctcactcttgggaaaactgctgggcaccgtcgtcgcgctgaaggtggttctgtacctgctccgagtgtgcttagcgatggcctggaaatccggcggcgccagccactcggagctaatccacaatctccgcaaaaatggaatcatcaagacagataaagtatttgaagtgatgctggctacagaccgctcccactatgcaaaatgtaacccatacatggattctccacaatcaatagctgactctacaggagaagaaatttttagctgccgtactttagagggactgttttactagatgagcacgttaccctttggcatgattatattttctaattttaactgctgggtgacagtactctaatagaagtttccaagcaacaatcagtgctccacacatgcatgcatatgcgctagaacttctatttgatcagttgcatgaaggagctaaagctcttgatgtaggatctggaagtggaatccttactgcatgttttgcacgta

SEQ ID NO: 171964 - DNA, 1095 bp, Homo sapiens
  Payload ID: 13786
  Gene Symbol: PCMT1
  Gene Name: protein-L-isoaspartate (D-aspartate) O-methyltransferase
  ENST ID: ENST00000484601
  CDS Start-End: 285-659
ccgccatcccgccgtcccgctcggtgaccggagacacagccgggaacgcgactgatcaggctaccgagccgggccgcagggcgaaagcggtgcggtccgaggcctcagaaagggacacgcagcagcggaagtggcgctgactcagcccggcctccctgcagtcccctggcagcggtagcagccacaggggcgggcggctgggccacacgcctcccccgccctcggccccacccggccgcaccctaagccgcgcggcgtcacagagcgcatgcgtgccgcgggggatgccgggagcgcgcagtggcggcagcggcggcgacggcagtaacagcggcagctacagcggggacgcgagcggggcggtgacggtgtgggaggtggtctcactcttgggaaaactgctgggcaccgtcgtcgcgctgaaggtggttctgtacctgctccgagtgtgcttagcgatggcctggaaatccggcggcgccagccactcggagctaatccacaatctccgcaaaaatggaatcatcaagacagataaagtatttgaagtgatgctggctacagaccgctcccactatgcaaaatgtaacccatacatggattctccacaatcaataggttttgctgaactgctgagccttggcagtgggcgcctttgaggcttagaagtgcctcaggattctgtcagtcggctgccatgctatcttcttttgacgcactataacagtcagcagagaagatcctggggagcttctgaaccccgaaggcacctgctaccaccgctcagtgaaacttgcttcagaggcagaaagaagcaggtttccaagcaacaatcagtgctccacacatgcatgcatatgcgctagaacttctatttgatcagttgcatgaaggagctaaagctcttgatgtaggatctggaagtggaatccttactgcatgttttgcacgtatggttggatgtactggaaaagtcataggaattgatcacattaaagagctagtagatgactcagtaaataatgtcaggaaggacgatccaacacttctgtcttcagggagagtacagcttgttgtgggggatggaagaatggg

SEQ ID NO: 171965 - DNA, 801 bp, Homo sapiens
  Payload ID: 13786
  Gene Symbol: PCMT1
  Gene Name: protein-L-isoaspartate (D-aspartate) O-methyltransferase
  ENST ID: ENST00000486585
  CDS Start-End: 1-203
gggaggtggtctcactcttgggaaaactgctgggcaccgtcgtcgcgctgaaggtggttctgtacctgctccgagtgtgcttagcgatggcctggaaatccggcggcgccagccactcggagctaatccacaatctccgcagcatgatggctcatacctgtaataccagcactttgggaggacgaggaaggtggatcacctaagaaaatggaatcatcaagacagataaagtatttgaagtgatgctggctacagaccgctcccactatgcaaaatgtaacccatacatggattctccacaatcaatagaaagtcctgtatttaactccttctcctgaagcaggttttgctgaactgctgagccttggcagtgggcgcctttgaggcttagaagtgcctcaggattctgtcagtcggctgccatgctatcttcttttgacgcactataacagtcagcagagaagatcctggggagcttctgaaccccgaaggcacctgctaccaccgctcagtgaaacttgcttcagaggcagaaagaagcaggtttccaagcaacaatcagtgctccacacatgcatgcatatgcgctagaacttctatttgatcagttgcatgaaggagctaaagctcttgatgtaggatctggaagtggaatccttactgcatgttttgcacgtatggttggatgtactggaaaagtcataggaattgatcacattaaagagctagtagatgactcagtaaataatgtcaggaaggacgatccaacacttctgtcttcagggagagtacagcttgttg

SEQ ID NO: 171966 - DNA, 548 bp, Homo sapiens
  Payload ID: 13786
  Gene Symbol: PCMT1
  Gene Name: protein-L-isoaspartate (D-aspartate) O-methyltransferase
  ENST ID: ENST00000495487
  CDS Start-End: 261-548
gtccccgcgcgcctgttggagggcttcggcgcagagttgccccggtagtcccgaacggcgtgcgcttgcagtcgcctccctcgggacctgtcactcgtcgacgacgtggactggaaggggagagaaagagccaggggccgctgctggtgggggcaggggcagtcgtctccctgcaggccctgggggagggagtgcagtacaggtgatgctgctgtcactcagaaaatggaatcatcaagacagataaagtatttgaagtgatgctggctacagaccgctcccactatgcaaaatgtaacccatacatggattctccacaatcaataggtttccaagcaacaatcagtgctccacacatgcatgcatatgcgctagaacttctatttgatcagttgcatgaaggagctaaagctcttgatgtaggatctggaagtggaatccttactgcatgttttgcacgtatggttggatgtactggaaaagtcataggaattgatcacattaaagagctagtagatgactcagtaaataatgtcaggaaggacgat

SEQ ID NO: 171967 - DNA, 582 bp, Homo sapiens
  Payload ID: 13786
  Gene Symbol: PCMT1
  Gene Name: protein-L-isoaspartate (D-aspartate) O-methyltransferase
  ENST ID: ENST00000460828
  CDS Start-End: 2-364
gatgccgggagcgcgcagtggcggcagcggcggcgacggcagtaacagcggcagctacagcggggacgcgagcggggcggtgacggtgtgggaggtggtctcactcttgggaaaactgctgggcaccgtcgtcgcgctgaaggtggttctgtacctgctccgagtgtgcttagcgatggcctggaaatccggcggcgccagccactcggagctaatccacaatctccgcaaaaatggaatcatcaagacagataaagtatttgaagtgatgctggctacagaccgctcccactatgcaaaatgtaacccatacatggattctccacaatcaatagaaagtcctgtatttaactccttctcctgaagcaggttttgctgaactgctgagccttggcagtgggcgcctttgaggcttagaagtgcctcaggattctgtcagtcggctgccatgctatcttcttttgacgcactataacagtcagcagagaagatcctggggagcttctgaaccccgaaggcacctgctaccaccgctcagtgaaacttgcttcagaggcagaaagaagcaggtttccaagcaac

SEQ ID NO: 171968 - DNA, 1984 bp, Homo sapiens
  Payload ID: 13786
  Gene Symbol: PCMT1
  Gene Name: protein-L-isoaspartate (D-aspartate) O-methyltransferase
  ENST ID: ENST00000464889
  CDS Start-End: 285-1142
ccgccatcccgccgtcccgctcggtgaccggagacacagccgggaacgcgactgatcaggctaccgagccgggccgcagggcgaaagcggtgcggtccgaggcctcagaaagggacacgcagcagcggaagtggcgctgactcagcccggcctccctgcagtcccctggcagcggtagcagccacaggggcgggcggctgggccacacgcctcccccgccctcggccccacccggccgcaccctaagccgcgcggcgtcacagagcgcatgcgtgccgcgggggatgccgggagcgcgcagtggcggcagcggcggcgacggcagtaacagcggcagctacagcggggacgcgagcggggcggtgacggtgtgggaggtggtctcactcttgggaaaactgctgggcaccgtcgtcgcgctgaaggtggttctgtacctgctccgagtgtgcttagcgatggcctggaaatccggcggcgccagccactcggagctaatccacaatctccgcaaaaatggaatcatcaagacagataaagtatttgaagtgatgctggctacagaccgctcccactatgcaaaatgtaacccatacatggattctccacaatcaataggtttccaagcaacaatcagtgctccacacatgcatgcatatgcgctagaacttctatttgatcagttgcatgaaggagctaaagctcttgatgtaggatctggaagtggaatccttactgcatgttttgcacgtatggttggatgtactggaaaagtcataggaattgatcacattaaagagctagtagatgactcagtaaataatgtcaggaaggacgatccaacacttctgtcttcagggagagtacagcttgttgtgggggatggaagaatgggatatgctgaagaagccccttatgatgccattcatgtgggagctgcagcccctgttgtaccccaggcgctaatagatcagttaaagcccggaggaagattgatattgcctgttggtcctgcaggcggaaaccaaatgttggagcagtatgacaagctacaagatggcagcatcaaaatgaagcctctgatgggggtgatatacgtgcctttaacagataaagaaaagcagtggtccaggtggaagtgattttatcttctgctctttcttcttccacacatgcaagggatgaattgtaaaagcaacatcagcttgaccagtataaaattacagtggattgctcatctcagtcctcaaagctttttgaaaaccaacaccatcacagcttgttttggactttgttacactgttattttcagcatgaaaatgtgtgtttttttagggtttctgattcttcaaagaggcacagagccaaattggtagaggaaggatgcaaagtataaatttgtgtaatattactttaacatgcccatattttacttggaaatattaaaagaaagggttctgtaaaatggaaaacttagtttgtgaattgattttgaggagtggtttttcttttcttggacacttaattctgttctgatattaatttatcagattgcttttgtgcattggataacaccaccattcacaagttaagattcttggtatttggatatctgttagatgctactaagaaaatagagatgagctttctttttaaagcttttgatgtggtgtcatagaatagcatgttgtagatacaatcagctgctttgttaccttaaaactaggcatttgtaaatattaaaccataagatggcaggtgatgtcctgtaaacactcagctgttcagattggacataactgacttagttcttcccttctctctctctcaaaattataggagacttgtagtttagtgtggttttctgtttctaatttgctgctgataatgtatatgaacttaacatgctgtgtaagctgtgtcctagttcttgaacagtttatgcagtgctgctttgccaaataaagttaaaagtaaaagaggc

SEQ ID NO: 171969 - DNA, 1628 bp, Homo sapiens
  Payload ID: 13786
  Gene Symbol: PCMT1
  Gene Name: protein-L-isoaspartate (D-aspartate) O-methyltransferase
  ENST ID: ENST00000544496
  CDS Start-End: 34-786
gcggcgtcacagagcgcatgcgtgccgcgggggatgccgggagcgcgcagtggcggcagcggcggcgacggcagtaacagcggcagctacagcggggacgcgagcggggcggtgacggtgtgggaggtggtctcactcttgggaaaactgctgggcaccgtcgtcgcgctgaaggtggttctgtacctgctccgagtgtgcttagcgatggcctggaaatccggcggcgccagccactcggagctaatccacaatctccgcaaaaatggaatcatcaagacagataaagtatttgaagtgatgctggctacagaccgctcccactatgcaaaatgtaacccatacatggattctccacaatcaataggtttccaagcaacaatcagtgctccacacatggttggatgtactggaaaagtcataggaattgatcacattaaagagctagtagatgactcagtaaataatgtcaggaaggacgatccaacacttctgtcttcagggagagtacagcttgttgtgggggatggaagaatgggatatgctgaagaagccccttatgatgccattcatgtgggagctgcagcccctgttgtaccccaggcgctaatagatcagttaaagcccggaggaagattgatattgcctgttggtcctgcaggcggaaaccaaatgttggagcagtatgacaagctacaagatggcagcatcaaaatgaagcctctgatgggggtgatatacgtgcctttaacagataaagaaaagcagtggtccaggtggaagtgattttatcttctgctctttcttcttccacacatgcaagggatgaattgtaaaagcaacatcagcttgaccagtataaaattacagtggattgctcatctcagtcctcaaagctttttgaaaaccaacaccatcacagcttgttttggactttgttacactgttattttcagcatgaaaatgtgtgtttttttagggtttctgattcttcaaagaggcacagagccaaattggtagaggaaggatgcaaagtataaatttgtgtaatattactttaacatgcccatattttacttggaaatattaaaagaaagggttctgtaaaatggaaaacttagtttgtgaattgattttgaggagtggtttttcttttcttggacacttaattctgttctgatattaatttatcagattgcttttgtgcattggataacaccaccattcacaagttaagattcttggtatttggatatctgttagatgctactaagaaaatagagatgagctttctttttaaagcttttgatgtggtgtcatagaatagcatgttgtagatacaatcagctgctttgttaccttaaaactaggcatttgtaaatattaaaccataagatggcaggtgatgtcctgtaaacactcagctgttcagattggacataactgacttagttcttcccttctctctctctcaaaattataggagacttgtagtttagtgtggttttctgtttctaatttgctgctgataatgtatatgaacttaacatgctgtgtaagctgtgtcctagttcttgaacagtttatgcagtgctgctttgccaaataaagttaaaagtaaaagaggc

SEQ ID NO: 171970 - DNA, 4252 bp, Homo sapiens
  Payload ID: 13787
  Gene Symbol: PCMTD1
  Gene Name: protein-L-isoaspartate (D-aspartate) O-methyltransferase domain containing 1
  Uniprot ID: Q96MG8
  ENST ID: ENST00000360540
  CDS Start-End: 408-1481
ggcggctccggagtccgggaggctctggctgctccagtcgcgggtccgggccccgcctctccactcggcggtggcgtccgtgttgttattgtggtggtagcggcgtctggctgctgcggaccccgccgagtcctagcgcctggcctgcgcgccgctgcccgcgccacagccccatcactgagaagaattttttcactgtatagttgcctctgcacttaaagcaggcttggtccatgaatcccatgacaagagctttgaggacatgaggagcattctttgttcaaacatactgtgttttcctttggatcactggattaatttatttttggaaatcaagtgcaatattggaagccatttctactaattttatttcacttttaaatttatgatttgatttgaatactatcatgggaggagctgtgagtgctggggaagataatgatgacttaattgataatttaaaagaagctcagtatattcgtactgaaagagtggagcaagccttcagagcgattgatcgtggagattactatttggaaggctacagagacaatgcttacaaagacttagcctggaagcatggaaacatccacttgtcagcaccttgcatttattctgaagttatggaagcattgaaacttcaaccaggattgtcttttcttaacctgggaagtggaaccggatatttaagtacaatggtgggcttaattttaggtccttttggaataaatcatgggattgagcttcattcagatgtggtggaatatgccaaggaaaaactggagagcttcatcaaaaatagtgatagctttgataaatttgagttctgtgaacctgcatttgttgttggtaattgcctccagatagcttctgacagtcatcagtatgatcgaatttattgtggagctggagtgcagaaagaccatgaaaactacatgaaaatattactaaaagttggaggcatattagtcatgcctatagaggatcagttaacacagattatgcgaactggacagaacacttgggaaagtaaaaatatccttgctgtttcatttgctccacttgtgcaaccaagtaagaatgataatggcaaaccagattctgtgggactccctccctgtgctgtcaggaatctacaggacttggctcgtatttacattcgacgcacacttagaaatttcataaatgatgagatgcaggccaaggggattcctcaaagggctccacccaaaaggaaaagaaagagagttaaacagagaattaacacttacgtatttgtgggtaatcagcttattcctcagcctctagacagtgaagaggatgaaaaaatggaagaggataacaaagaagaggaggaaaaagatcacaatgaagcaatgaagccagaggagccacctcaaaatttactgagagaaaaaatcatgaagctgcccctccctgaatctttaaaagcttacttgacatattttagagacaaataacttagatcaagaagaaaaatgcctactgataattcctttagtcttgaaaatgtagcatttgttaggagttaaaagagagaattatttctttcatcagagcaaattatagtggaaaaaaaatcacttgtttctgtcagtaacacaaatgatgtattcagtgaataaaagaatcccttttataaaatctatttttctttaaatcttggaaaaatgttgttttagctcagagtgatttcaaagtggaatgcaacagtagtcaagacttgtgtactataaatccttttctgattccttacagatttgtagtgatgaggtttagatttaattttatatatggtttaaataattgttaagcttatataacctgatctgaattgcagttgtttgcatttcctctatgaaaacttcatttatctaataaggaagtcaaatgctttgtagactatttaccttacttttgttgcaatcactgttgttgggttgctgtatatatattccgggcaatatatgagtgcaataacaatacaagatattgaataatttagctttaaaaaatcccacaaattttatgaaattttacagccctgctacttttgcttttgaatctcttgccaaaagacatgggtaaaatatctgcctctctcatagagattttaagagcacagcaagtgaattattaaaacaaagtctatacttaatacaactctttatatggaccctttacattttcagtatttaaaaaaatgaggttatcttaactctatagaattttaaaagtatatttagaattgttttttctgtagttcactgtataaagtatttggttttttaaaaaaagcaaaaccattgttatgtgtgactcttgataggacacagaacgagtgaatgagcatgagtgaggccactttcttggatggctgtaagtagcagggccagggtagacctggtcagcggatgcactttagcagatggaacttctagtttatctgaatatttatctttgacaaggtagggctgagcctacatttgcttttgatctatctagtataagaaatattcacagaaattgtatgtagataccctttgttttgaaaatgctgttcagaatcatagtgtaatctttgggacctatgccatgttcatttcactccttcccatattttttgtgtttcttttggtaaaactataatggttttcattttttacttaatatcacacagttaaactgtccatatttgagctttattttagcttatcagtgataaaaaacaggtagtaactgccattgtttgtttgttttcctaataaggcctgaaaacagccattccttgttaagaaagtgtacaatgtaacatatttgctagagttacatggattatatatttcttaaagggaaaaatttgagagtatcatggactaccaccagcattattattacagtagttactcagatttggttaaggaagcccaagcaatgtatagtgaaaggattattatctctctgctaagattcagatattgtttcagaaatctcagctccagtaattccacaacatctaaaaacaaatgtttgtgatcatgtgtaagcatgaaattgttccaagtaagtgaggatattttagttatgtgaaagacagtttcatggaaggtatttgttttataccagtggctgggatggtggaattggggttatttctacaattattcttagacgattactaaactgttaagaaatgccccatatcatttttgtatctaggaaagaaaaaaatcagtttcatactgttgtcatctgtcagaaatgctcattttattttgaattaaatgtggcttttgaagtacctagttaccttgaattcctggtgaccacatgtttttatctggaaaacctggagaaagttatctgtcccatctcccctgcttgtttttttttttttttttggttggagctgctgtttagatgatgcttttactatgcaggagagagtttttgttaaggatatatttgaagattggcttttccatattgtccttcattctttgaccatggcaaagtgtacagtagattttcatgatcattgcatatttcttgtcattgaaatgtatcttttatgtttttaaatgcattcattttacacttgtgagtttatcattgactttaagaggtagaaatgaaaaatgaaaattaaagctaaagcctttttatctattaatgcagatatattagaataagaatattttgggtttgtgtttattttttaatgaatttatgtttacttgatatggaaaattacgctttataggtggaaaagtagcaaataaagattaagtaaaagtaagtgaaaatgatggggaatatagtattggaattttatagctagttaaaacagtaagtatcatctaatttgggtgtttattttgcagatgagaaaacagacctagaaccgtggcatgttttgcctgaaacatacagtgagttagagacagggcctaagatagcttctagcatcagatcaatcccaagaatccatcagcaacctcagaccaacccaagaagataatttaaatctatactgcttattggtcaatatatttggttctagtattaataaagaaaaatgttattaaaatagcatacatagtagtaaaataaaatacaaaaagtgtgttgatttatagctgtttgagatgataaaagtgaagcaaagcctgttaaatcattggaagacttggaaaattattttaaataaacaattacatgtaattaagca

SEQ ID NO: 171971 - DNA, 1287 bp, Homo sapiens
  Payload ID: 13787
  Gene Symbol: PCMTD1
  Gene Name: protein-L-isoaspartate (D-aspartate) O-methyltransferase domain containing 1
  Uniprot ID: Q96MG8
  ENST ID: ENST00000522514
  CDS Start-End: 203-1276
actcggcggtggcgtccgtgttgttattgtggtggtagcggcgtctggctgctgcggaccccgccgagtcctagcgcctggcctgcgcgccgctgcccgcgccacaggattaatttatttttggaaatcaagtgcaatattggaagccatttctactaattttatttcacttttaaatttatgatttgatttgaatactatcatgggaggagctgtgagtgctggggaagataatgatgacttaattgataatttaaaagaagctcagtatattcgtactgaaagagtggagcaagccttcagagcgattgatcgtggagattactatttggaaggctacagagacaatgcttacaaagacttagcctggaagcatggaaacatccacttgtcagcaccttgcatttattctgaagttatggaagcattgaaacttcaaccaggattgtcttttcttaacctgggaagtggaaccggatatttaagtacaatggtgggcttaattttaggtccttttggaataaatcatgggattgagcttcattcagatgtggtggaatatgccaaggaaaaactggagagcttcatcaaaaatagtgatagctttgataaatttgagttctgtgaacctgcatttgttgttggtaattgcctccagatagcttctgacagtcatcagtatgatcgaatttattgtggagctggagtgcagaaagaccatgaaaactacatgaaaatattactaaaagttggaggcatattagtcatgcctatagaggatcagttaacacagattatgcgaactggacagaacacttgggaaagtaaaaatatccttgctgtttcatttgctccacttgtgcaaccaagtaagaatgataatggcaaaccagattctgtgggactccctccctgtgctgtcaggaatctacaggacttggctcgtatttacattcgacgcacacttagaaatttcataaatgatgagatgcaggccaaggggattcctcaaagggctccacccaaaaggaaaagaaagagagttaaacagagaattaacacttacgtatttgtgggtaatcagcttattcctcagcctctagacagtgaagaggatgaaaaaatggaagaggataacaaagaagaggaggaaaaagatcacaatgaagcaatgaagccagaggagccacctcaaaatttactgagagaaaaaatcatgaagctgcccctccctgaatctttaaaagcttacttgacatattttagagacaaataacttagatcaag

SEQ ID NO: 171972 - DNA, 1712 bp, Homo sapiens
  Payload ID: 13787
  Gene Symbol: PCMTD1
  Gene Name: protein-L-isoaspartate (D-aspartate) O-methyltransferase domain containing 1
  ENST ID: ENST00000521344
  CDS Start-End: 280-597
gcatgcccggaccccggcggctccggagtccgggaggctctggctgctccagtcgcgggtccgggccccgcctctccactcggcggtggcgtccgtgttgttattgtggtggtagcggcgtctggctgctgcggaccccgccgagtcctagcgcctggcctgcgcgccgctgcccgcgccacaggattaatttatttttggaaatcaagtgcaatattggaagccatttctactaattttatttcacttttaaatttatgatttgatttgaatactatcatgggaggagctgtgagtgctggggaagataatgatgacttaattgataatttaaaagaagctcagtatattcgtactgaaagagtggagcaagccttcagagcgattgatcgtggagattactatttggaaggctacagagacaatgcttacaaagacttagcctggaagcatggaaacatccacttgtcagcaccttgcatttattctgaagttatggaagcattgaaacttcaaccaggattgtcttttcttaacctgggaagtggaaccggatatttaagtacaatgtattttgacctcagagtcctcaactgaaatgatggatcttgaattatttcatcttcagaactttatgtattgtgaagtactttttgcctgtggctatgttctgtaagttagctttacacaaaatactaaaggcacagtgaacttcattcaaatgcagtgtggaactctcaggtttccttggtctgcctcagtcttctactcatcagcaccacactgtcaaaatgttggacattacaaggggcgaacatagacataaataaaaaatattggtattgcatagacacttgatgcctaaacctaataattattaacttttatgtgcaagcttgggttcttgactaattggtaaatgataaatgaactagattagatccaattattagaaaagcactcttaagagtgcaatgaatgtgatttgaaaacttgaaagcagcctagattttactatatttgttattgttatcaatgggggtttgtcaaccttaaaaattattttttatgtaaagatacctaggaatttctaataactgtatttgttttaataaactttgactttgctgtatgtttctatgttctctttaatatttagctattaaaggtcaatattttctttttttaaaaaaaaagttacaaaaattaagcccttgtttcatagaaacatctttacattggcgaatacaaaataacattggaattcagagtcaaattcatgcctcagttggcctgttaatatcatcatcttttggataccatttcacttttttccattgacaacttgtacctattagctatatattacttgtttatttatttgaacatttatgttttttttaatctttcagtagcccattgttttttaattgaaaaagttatacacgcaaatggttaaaacaaattttatacaagagcatataatgataaaaatgtttccttaccaccctagatctcttagtcccctttctcagaagcagctatgtatgctttttcagttttctgttttattttcctgttgttctatttaatacagataccaaatgtgagttgtaataatcagcattgcattacatttttatacacttaatgcattcaaggtgtatatcacattctaaataaatgagatattggtgacattgctatttaaa

SEQ ID NO: 171973 - DNA, 814 bp, Homo sapiens
  Payload ID: 13787
  Gene Symbol: PCMTD1
  Gene Name: protein-L-isoaspartate (D-aspartate) O-methyltransferase domain containing 1
  ENST ID: ENST00000519554
  CDS Start-End: 1-392
atgggattgagcttcattcagatgtggtggaatatgccaaggaaaaactggagagcttcatcaaaaatagtgatagctttgataaatttgagttctgtgaacctgcatttgttgttggtaattgcctccagatagcttctgacagtcatcagtatgatcgaatttattgtggagctggagtgcagaaagaccatgaaaactacatgaaaatattactaaaagttggaggcatattagtcatgcctatagaggatcagttaacacagattatgcgaactggacagaacacttgggaaagtaaaaatatccttgctgtttcatttgctccacttgtgcaaccaagtaagaatgataatggcaaaccagattctgtgggactccaccttggttgaccatagaaagcggaaaccgtggaaagtgaaactgtgcataaagggagactactgtacttgaaattctacaataaggagaaaagtcatcagtaaccaacagtaacttataaaaataagtcaggaattatgtgaatttctaaaaaataaaagcttcatatagtaatattcagagcatgaaaatagttttgaaaattgatatttgccaaaatttaataggatgtatggagaataagtttttgtgggtgtgtagaagtaagttaaaatagctttctgttgagaggacattattccttaattgcaggaaattaaaatatgaaagaacgcgactccaaaaatcccaaaaataatatatatataaattatttgccaaatgtatcttgtagtaatcaagttgctcatattaaacaacttactaaagtgga

SEQ ID NO: 171974 - DNA, 3697 bp, Homo sapiens
  Payload ID: 13787
  Gene Symbol: PCMTD1
  Gene Name: protein-L-isoaspartate (D-aspartate) O-methyltransferase domain containing 1
  ENST ID: ENST00000544451
  CDS Start-End: 76-921
agatgggggcgtctcccggccttgttgactttggcgtccgcggggagctgcccctgtgcccgtggttctctgcgcatgcccggaccccggcggctccggagtccgggaggctctggctgctccagtcgcgggtccgggccccgcctctccactcggcggtggcgtccgtgttgttattgtggtggtagcggcgtctggctgctgcggaccccgccgagtcctagcgcctggcctgcgcgccgctgcccgcgccacagatttgagttctgtgaacctgcatttgttgttggtaattgcctccagatagcttctgacagtcatcagtatgatcgaatttattgtggagctggagtgcagaaagaccatgaaaactacatgaaaatattactaaaagttggaggcatattagtcatgcctatagaggatcagttaacacagattatgcgaactggacagaacacttgggaaagtaaaaatatccttgctgtttcatttgctccacttgtgcaaccaagtaagaatgataatggcaaaccagattctgtgggactccctccctgtgctgtcaggaatctacaggacttggctcgtatttacattcgacgcacacttagaaatttcataaatgatgagatgcaggccaaggggattcctcaaagggctccacccaaaaggaaaagaaagagagttaaacagagaattaacacttacgtatttgtgggtaatcagcttattcctcagcctctagacagtgaagaggatgaaaaaatggaagaggataacaaagaagaggaggaaaaagatcacaatgaagcaatgaagccagaggagccacctcaaaatttactgagagaaaaaatcatgaagctgcccctccctgaatctttaaaagcttacttgacatattttagagacaaataacttagatcaagaagaaaaatgcctactgataattcctttagtcttgaaaatgtagcatttgttaggagttaaaagagagaattatttctttcatcagagcaaattatagtggaaaaaaaatcacttgtttctgtcagtaacacaaatgatgtattcagtgaataaaagaatcccttttataaaatctatttttctttaaatcttggaaaaatgttgttttagctcagagtgatttcaaagtggaatgcaacagtagtcaagacttgtgtactataaatccttttctgattccttacagatttgtagtgatgaggtttagatttaattttatatatggtttaaataattgttaagcttatataacctgatctgaattgcagttgtttgcatttcctctatgaaaacttcatttatctaataaggaagtcaaatgctttgtagactatttaccttacttttgttgcaatcactgttgttgggttgctgtatatatattccgggcaatatatgagtgcaataacaatacaagatattgaataatttagctttaaaaaatcccacaaattttatgaaattttacagccctgctacttttgcttttgaatctcttgccaaaagacatgggtaaaatatctgcctctctcatagagattttaagagcacagcaagtgaattattaaaacaaagtctatacttaatacaactctttatatggaccctttacattttcagtatttaaaaaaatgaggttatcttaactctatagaattttaaaagtatatttagaattgttttttctgtagttcactgtataaagtatttggttttttaaaaaaagcaaaaccattgttatgtgtgactcttgataggacacagaacgagtgaatgagcatgagtgaggccactttcttggatggctgtaagtagcagggccagggtagacctggtcagcggatgcactttagcagatggaacttctagtttatctgaatatttatctttgacaaggtagggctgagcctacatttgcttttgatctatctagtataagaaatattcacagaaattgtatgtagataccctttgttttgaaaatgctgttcagaatcatagtgtaatctttgggacctatgccatgttcatttcactccttcccatattttttgtgtttcttttggtaaaactataatggttttcattttttacttaatatcacacagttaaactgtccatatttgagctttattttagcttatcagtgataaaaaacaggtagtaactgccattgtttgtttgttttcctaataaggcctgaaaacagccattccttgttaagaaagtgtacaatgtaacatatttgctagagttacatggattatatatttcttaaagggaaaaatttgagagtatcatggactaccaccagcattattattacagtagttactcagatttggttaaggaagcccaagcaatgtatagtgaaaggattattatctctctgctaagattcagatattgtttcagaaatctcagctccagtaattccacaacatctaaaaacaaatgtttgtgatcatgtgtaagcatgaaattgttccaagtaagtgaggatattttagttatgtgaaagacagtttcatggaaggtatttgttttataccagtggctgggatggtggaattggggttatttctacaattattcttagacgattactaaactgttaagaaatgccccatatcatttttgtatctaggaaagaaaaaaatcagtttcatactgttgtcatctgtcagaaatgctcattttattttgaattaaatgtggcttttgaagtacctagttaccttgaattcctggtgaccacatgtttttatctggaaaacctggagaaagttatctgtcccatctcccctgcttgtttttttttttttttttggttggagctgctgtttagatgatgcttttactatgcaggagagagtttttgttaaggatatatttgaagattggcttttccatattgtccttcattctttgaccatggcaaagtgtacagtagattttcatgatcattgcatatttcttgtcattgaaatgtatcttttatgtttttaaatgcattcattttacacttgtgagtttatcattgactttaagaggtagaaatgaaaaatgaaaattaaagctaaagcctttttatctattaatgcagatatattagaataagaatattttgggtttgtgtttattttttaatgaatttatgtttacttgatatggaaaattacgctttataggtggaaaagtagcaaataaagattaagtaaaagtaagtgaaaatgatggggaatatagtattggaattttatagctagttaaaacagtaagtatcatctaatttgggtgtttattttgcagatgagaaaacagacctagaaccgtggcatgttttgcctgaaacatacagtgagttagagacagggcctaagatagcttctagcatcagatcaatcccaagaatccatcagcaacctcagaccaacccaagaagataatttaaatctatactgcttattggtcaatatatttggttctagtattaataaagaaaaatgttattaaaatagcatacatagtagtaaaataaaatacaaaaagtgtgttgatttatagctgtttgagatgataaaagtgaagcaaagcctgttaaatcattggaagacttggaaaattattttaaataaacaattacatgtaattaagcattttt

SEQ ID NO: 171975 - DNA, 1049 bp, Homo sapiens
  Payload ID: 13788
  Gene Symbol: PCMTD2
  Gene Name: protein-L-isoaspartate (D-aspartate) O-methyltransferase domain containing 2
  ENST ID: ENST00000299468
  CDS Start-End: 201-1049
gcagtcaggccgttgtgcgcaggcgcagaggcggcggcggcggcggcggcggcggatgtttacggcggccgaggttggagcggcgctgctcggccgcggacacacgagggacgcgcccgaggagctgcaggtggcagcccaggcggtccgaacccgtcggccggccgagcctggagtattgcctaagtgtaatcttgaacatgggcggtgctgtgagtgctggtgaagacaatgatgagctgatagataatttgaaagaagcacagtatatccggactgagctggtagagcaggctttcagagctatcgatcgtgcagactattatcttgaagaatttaaagaaaatgcttataaagacttggcatggaagcatggaaacattcacctctcagccccgtgcatctactcggaggtgatggaagccctagatctgcagcctggactctcgtttctgaacctgggcagtggcactgggtatctcagctccatggtgggcctcattctaggtccttttggtgtgaaccatggggtggaacttcactcagatgtgatagagtatgcaaagcagaaactggacttcttcatcagaacaagtgatagttttgacaagtttgacttctgtgaaccttcctttgttactgggaattgcctggagatttctccggattgttctcagtatgatcgtgtatactgtggggctggcgtgcagaaagagcatgaagagtacatgaagaatcttctcaaagtgggagggatccttgtcatgccactggaagagaagttgactaagataacacgcacaggtccttcagcttgggaaaccaaaaagattcttgctgtttcttttgctcctctgatccagccctgccattcagagtcaggaaaatcaagacttgtccagttacggtctccctcttttgtccaaggctggagtgtggtagtgctatcacagctgactgcagcctcaaccttccaggctgaagcgatcctcccatctcaatctcctacgtggctgacactacaggtgcttgccactatgcccaactaa

SEQ ID NO: 171976 - DNA, 3843 bp, Homo sapiens
  Payload ID: 13788
  Gene Symbol: PCMTD2
  Gene Name: protein-L-isoaspartate (D-aspartate) O-methyltransferase domain containing 2
  Uniprot ID: Q9NV79
  ENST ID: ENST00000308824
  CDS Start-End: 128-1213
gttggagcggcgctgctcggccgcggacacacgagggacgcgcccgaggagctgcaggtggcagcccaggcggtccgaacccgtcggccggccgagcctggagtattgcctaagtgtaatcttgaacatgggcggtgctgtgagtgctggtgaagacaatgatgagctgatagataatttgaaagaagcacagtatatccggactgagctggtagagcaggctttcagagctatcgatcgtgcagactattatcttgaagaatttaaagaaaatgcttataaagacttggcatggaagcatggaaacattcacctctcagccccgtgcatctactcggaggtgatggaagccctagatctgcagcctggactctcgtttctgaacctgggcagtggcactgggtatctcagctccatggtgggcctcattctaggtccttttggtgtgaaccatggggtggaacttcactcagatgtgatagagtatgcaaagcagaaactggacttcttcatcagaacaagtgatagttttgacaagtttgacttctgtgaaccttcctttgttactgggaattgcctggagatttctccggattgttctcagtatgatcgtgtatactgtggggctggcgtgcagaaagagcatgaagagtacatgaagaatcttctcaaagtgggagggatccttgtcatgccactggaagagaagttgactaagataacacgcacaggtccttcagcttgggaaaccaaaaagattcttgctgtttcttttgctcctctgatccagccctgccattcagagtcaggaaaatcaagacttgtccagttaccaccagtggcagttcgcagcctccaggacttggctcgcatcgccatccggggcaccattaaaaagattattcatcaggaaactgtgagcaaaaacggaaacggactaaagaacacccccaggtttaaacgaaggagagttcgccgccgtcgaatggaaacgattgtctttttggacaaagaagtctttgccagtcggatttccaacccctcagatgacaacagctgtgaagacttggaagaggaacggagggaagaagaagagaagaccccgccggaaacaaagccagaccccccagtgaacttcctacgccagaaggtcctgagcctccctctgccagatcccctgaaatactacttgctttattacagagaaaaataagtctcctgtttgaaagggggaaataggaagagcagattgctgagtgtgaagttcgtgctgcctgtgtgctgttgaagggtcacctggaggcagacgttgtggggaagggaactgctgggctcatccacaccatggttttcttctagttcctgattgacctctaaaattctattcagttgtatgatttgtttacatagttccacaagaccttcattgcatagaagattgttttcccaaagtggagagaatcttcatagagaaaaagagaaggctgtttctttttcggctctgacgaaacactgaagtctgcgtaagagagactgtttgatgaccgtccctcatgcaacatgcacggtactcactaaaaatgaaaactgaagtggaaactaacctgtgttgcttataaagtgtgaaagcacaagcttataaatgtataaaatcttttctgggtgtgacgcacctgcgtccaagtttgaatttttatgatatgtaccacttaattactggcactgagtatcactgaatttcttagttttctagtggggaaacattattgagaagccctcccttattttaagtaagttgattaaatcttatgtgagttgccagttgtaatttttcaaaggaaaaattttgatggggtggaggaatgaattgccagataatctttctggaattccgagagaattccaaagagggtttttttttttttttttaggacatcttttgatacctttaaaagaaccactgtcaagtaatccttaaaagaatatcttggaaaaggaaacagattttttcctgtgtgtaagcaataagtgaagttacatttgccctaaccctagggatgattctttacccagttttaaagcccatcatggtattctaaggtgttgacaccctccatcctcagagcaggtcgaaaatattaaatagactggggactctatgatgggcagcctgtgctttttgacttcagtttgctatttttctgtgatcacattagtactgattcatagattctatcttttataattctggagaaaaagatttgttagttttgtaatttttttgtaagaccaaatgtatgtattttagtagctccattgcatgagaagagtgtaactcacactgacttgtgatatcagccttctctgggccttgtgtgtggagagctttctatcttaccaagtggtagggctaaaagaacaacagcctttttggtagtcacatagcagaatgatcagagttacattgcttattccaaaacattggttctttttaaaacatttttttttacccaaagaaaagaataatagaaattactaacaataaatataaattcagagtgttgatataggattcagtatccagagtttatttttaatcttaatcctcagcttcttgggagttgctgggcttcagtgtctctgtggtttcaccagcttagcttgagctctggttattttggatcttttctgctttttttaagtaactgagtcatttttaccacacagtccagtttgcatgtatagctaggaaacatgtattgctctagattgggcagtttaagtcattttaaagaaagttagttcatagttgttgccttttaactcatagtcaagcttcagtctttcaaagagaaatgtgtgattttcatttacttgctgatattttgtagtttggagatccttgtgggcattattctaactgatacgtagacacttacttggaaatttttggacattatattaaatgagtgctatctgtgaaattggttatattaggtggcttgactaatgttttttctataattgtatatggactgcatttttaaaaaaaccgcatttgcctttatgctagattgtaaaaaattatattagaatgcataagacatgtttttccttcatatgctagacttttcctagcatttcgtatttctgtgttgtcagtgtgtgatttttaaaccggaatttggtttaaaaaaaatctggtggtaatatatgtgagaaatactttggtgtttaccttatgaaaataaaggattgtaagtaaagtttcctgcgcaccttataccagaattcagtataatacactactttctgttttcaaacagataaatcataatatagtctgtattatctgtaagatctgtcttgtaaaccacattcttgacaactatttgcttttgagtagtttgtattttaatatgtgacttttgtcttgaaaagtagtaaagccatagacttgtgcaaaacaagtttcaagtttatagatattaagtttgtaatgtgagcatcaaatgtgtatgtaaaaatactttttaccagtctggaacttgggaaaatccagggaatttgaaacatagattttaatgagctggtaaacacaaatcatgtcaataaaggtagtcaggatattttatccttagcattgcttctgcatcctgtgtaggattccaattcttgaatatgttcttttcaaaatcttaagaaaagaaccttttttctttattaacatcatgtgtttactttcagcaaatatttgtattactgcttgattctgtgacagtcacaatagatgtagagaaggcattatttttcattaataaatgtgaaattggaatggacaaa

SEQ ID NO: 171977 - DNA, 3212 bp, Homo sapiens
  Payload ID: 13788
  Gene Symbol: PCMTD2
  Gene Name: protein-L-isoaspartate (D-aspartate) O-methyltransferase domain containing 2
  Uniprot ID: Q9NV79
  ENST ID: ENST00000369758
  CDS Start-End: 155-1159
cggcggcggatgtttacggcggccgaggttggagcggcgctgctcggccgcggacacacgagggacgcgcccgaggagctgcaggtggcagcccaggcggtccgaacccgtcggccggccgagcctggagtattgcctaagtgtaatcttgaacatgggcggtgctgtgagtgctggtgaagacaatgatgagctgatagataatttgaaagaagcacagtatatccggactgagctggtagagcaggctttcagagctatcgatcgtgcagactattatcttgaagaatttaaagaaaatgcttataaagacttggcatggaagcatggaaacattcacctctcagccccgtgcatctactcggaggtgatggaagccctagatctgcagcctggactctcgtttctgaacctgggcagtggcactgggtatctcagctccatggtgggcctcattctaggtccttttggtgtgaaccatggggtggaacttcactcagatgtgatagagtatgcaaagcagaaactggacttcttcatcagaacaagtgatagttttgacaagtttgacttctgtgaaccttcctttgttactgggaattgcctggagatttctccggattgttctcagtatgatcgtgtatactgtggggctggcgtgcagaaagagcatgaagagtacatgaagaatcttctcaaagtgggagggatccttgtcatgccactggaagagaagccctgccattcagagtcaggaaaatcaagacttgtccagttaccaccagtggcagttcgcagcctccaggacttggctcgcatcgccatccggggcaccattaaaaagattattcatcaggaaactgtgagcaaaaacggaaacggactaaagaacacccccaggtttaaacgaaggagagttcgccgccgtcgaatggaaacgattgtctttttggacaaagaagtctttgccagtcggatttccaacccctcagatgacaacagctgtgaagacttggaagaggaacggagggaagaagaagagaagaccccgccggaaacaaagccagaccccccagtgaacttcctacgccagaaggtcctgagcctccctctgccagatcccctgaaatactacttgctttattacagagaaaaataagtctcctgtttgaaagggggaaataggaagagcagattgctgagtgtgaagttcgtgctgcctgtgtgctgttgaagggtcacctggaggcagacgttgtggggaagggaactgctgggctcatccacaccatggttttcttctagttcctgattgacctctaaaattctattcagttgtatgatttgtttacatagttccacaagaccttcattgcatagaagattgttttcccaaagtggagagaatcttcatagagaaaaagagaaggctgtttctttttcggctctgacgaaacactgaagtctgcgtaagagagactgtttgatgaccgtccctcatgcaacatgcacggtactcactaaaaatgaaaactgaagtggaaactaacctgtgttgcttataaagtgtgaaagcacaagcttataaatgtataaaatcttttctgggtgtgacgcacctgcgtccaagtttgaatttttatgatatgtaccacttaattactggcactgagtatcactgaatttcttagttttctagtggggaaacattattgagaagccctcccttattttaagtaagttgattaaatcttatgtgagttgccagttgtaatttttcaaaggaaaaattttgatggggtggaggaatgaattgccagataatctttctggaattccgagagaattccaaagagggtttttttttttttttttaggacatcttttgatacctttaaaagaaccactgtcaagtaatccttaaaagaatatcttggaaaaggaaacagattttttcctgtgtgtaagcaataagtgaagttacatttgccctaaccctagggatgattctttacccagttttaaagcccatcatggtattctaaggtgttgacaccctccatcctcagagcaggtcgaaaatattaaatagactggggactctatgatgggcagcctgtgctttttgacttcagtttgctatttttctgtgatcacattagtactgattcatagattctatcttttataattctggagaaaaagatttgttagttttgtaatttttttgtaagaccaaatgtatgtattttagtagctccattgcatgagaagagtgtaactcacactgacttgtgatatcagccttctctgggccttgtgtgtggagagctttctatcttaccaagtggtagggctaaaagaacaacagcctttttggtagtcacatagcagaatgatcagagttacattgcttattccaaaacattggttctttttaaaacatttttttttacccaaagaaaagaataatagaaattactaacaataaatataaattcagagtgttgatataggattcagtatccagagtttatttttaatcttaatcctcagcttcttgggagttgctgggcttcagtgtctctgtggtttcaccagcttagcttgagctctggttattttggatcttttctgctttttttaagtaactgagtcatttttaccacacagtccagtttgcatgtatagctaggaaacatgtattgctctagattgggcagtttaagtcattttaaagaaagttagttcatagttgttgccttttaactcatagtcaagcttcagtctttcaaagagaaatgtgtgattttcatttacttgctgatattttgtagtttggagatccttgtgggcattattctaactgatacgtagacacttacttggaaatttttggacattatattaaatgagtgctatctgtgaaattggttatattaggtggcttgactaatgttttttctataattgtatatggactgcatttttaaaaaaaccgcatttgcctttatgctagattgtaaaaaattatattagaatgcataagacatgtttttccttcatatgctagacttttcctagcatttcgtatttctgtgttgtcagtgtgtgatttttaaaccggaatttggtttaaaaaaaatctggtggtaatatatgtgagaaatactttggtgtttaccttatgaaaataaaggattgtaagtaaa

SEQ ID NO: 171978 - DNA, 551 bp, Homo sapiens
  Payload ID: 13788
  Gene Symbol: PCMTD2
  Gene Name: protein-L-isoaspartate (D-aspartate) O-methyltransferase domain containing 2
  ENST ID: ENST00000609818
  CDS Start-End: 1-551
aacaatttcctgcatttcacaaatgaggaaacagaggcagggacaggtgagggagatgcagggtcacgcacatgccctagctggggccagaagctgactcagttgactaagataacacgcacaggtccttcagcttgggaaaccaaaaagattcttgctgtttcttttgctcctctgatccagccctgccattcagagtcaggaaaatcaagacttgtccagttaccaccagtggcagttcgcagcctccaggacttggctcgcatcgccatccggggcaccattaaaaagattattcatcaggaaactgtgagcaaaaacggaaacggactaaagaacacccccaggtttaaacgaaggagagttcgccgccgtcgaatggaaacgattgtctttttggacaaagaagtctttgccagtcggatttccaacccctcagatgacaacagctgtgaagacttggaagaggaacggagggaagaagaagagaagaccccgccggaaacaaagccagaccccccagtgaacttcctacgccagaaggtcctgag

SEQ ID NO: 171979 - DNA, 476 bp, Homo sapiens
  Payload ID: 13788
  Gene Symbol: PCMTD2
  Gene Name: protein-L-isoaspartate (D-aspartate) O-methyltransferase domain containing 2
  ENST ID: ENST00000610196
  CDS Start-End: 194-476
acggcggccgaggttggagcggcgctgctcggccgcggacacacgagggacgcgcccgaggagctgcaggtggcagcccaggcggtccgaacccgtcggccggccgagcctggaggtagagccgccgccgccgccgccgcccctcggtccggcctgcggcgagcgggtgtattgcctaagtgtaatcttgaacatgggcggtgctgtgagtgctggtgaagacaatgatgagctgatagataatttgaaagaagcacagtatatccggactgagctggtagagcaggctttcagagctatcgatcgtgcagactattatcttgaagaatttaaagaaaatgcttataaagacttggcatggaagcatggaaacattcacctctcagccccgtgcatctactcggaggtgatggaagccctagatctgcagcctggactctcgtttctgaacctgggcagtggcactgggtatctca

SEQ ID NO: 171980 - DNA, 541 bp, Homo sapiens
  Payload ID: 13788
  Gene Symbol: PCMTD2
  Gene Name: protein-L-isoaspartate (D-aspartate) O-methyltransferase domain containing 2
  ENST ID: ENST00000610074
  CDS Start-End: 136-541
aatctattattttcagaattcagaatttcaaattggtatctgtttagaacttctattgttctgctcttacctttaacataaatcgctctttttaaacatttttaattatagtattgcctaagtgtaatcttgaacatgggcggtgctgtgagtgctggtgaagacaatgatgagctgatagataatttgaaagaagcacagtatatccggactgagctggtagagcaggctttcagagctatcgatcgtgcagactattatcttgaagaatttaaagaaaatgcttataaagacttggcatggaagcatggaaacattcacctctcagccccgtgcatctactcggaggtgatggaagccctagatctgcagcctggactctcgtttctgaacctgggcagtggcactgggtatctcagctccatggtgggcctcattctaggtccttttggtgtgaaccatggggtggaacttcactcagatgtgatagagtatgcaaagcagaaactggacttcttcatcagaacaagtgatagttttg

SEQ ID NO: 171981 - DNA, 528 bp, Homo sapiens
  Payload ID: 13788
  Gene Symbol: PCMTD2
  Gene Name: protein-L-isoaspartate (D-aspartate) O-methyltransferase domain containing 2
  ENST ID: ENST00000608844
  CDS Start-End: 1-214
ctattatcttgaagaatttaaagaaaatgcttataaagacttggcatggaagcatggaaacattcacctctcagccccgtgcatctactcggaggtgatggaagccctagatctgcagcctggactctcgtttctgaacctgggcagtggcactgggtatctcagctccatggtgggcctcattctagatgctgcagcttttattcaagcttaatagcacttggtgcagagcactccagagtgaaacctcattggcttcccggcgcctgtggatgtgggtctctcatctgacggagttctttactgtgacccccgactgcctttcgcatggcctgagcggcatcctgggggagaatacagtagctactaagagatggtggctcataagtcacctacctgaaaagtgctgggtgattcggaagcagggcagacctaggagcggctctgccaggggggcctcgctgctctggtttcatgccgtgctccagtgctgagtcccaggtgccgtgttcctgacaccccccggcc

SEQ ID NO: 171982 - DNA, 572 bp, Homo sapiens
  Payload ID: 13788
  Gene Symbol: PCMTD2
  Gene Name: protein-L-isoaspartate (D-aspartate) O-methyltransferase domain containing 2
  ENST ID: ENST00000609764
  CDS Start-End: 168-572
gaacccgtcggccggccgagcctggagaaaatgtcttcatgaggtctggtggtctttttccctgacaatttgtatctggtgttttgtaaagcattaccattttatatgaagttaaagcagttactttgaaaaagttacatgggtattgcctaagtgtaatcttgaacatgggcggtgctgtgagtgctggtgaagacaatgatgagctgatagataatttgaaagaagcacagtatatccggactgagctggtagagcaggctttcagagctatcgatcgtgcagactattatcttgaagaatttaaagaaaatgcttataaagacttggcatggaagcatggaaacattcacctctcagccccgtgcatctactcggaggtgatggaagccctagatctgcagcctggactctcgtttctgaacctgggcagtggcactgggtatctcagctccatggtgggcctcattctaggtccttttggtgtgaaccatggggtggaacttcactcagatgtgatagagtatgcaaagcagaaactggacttcttcatcagaacaagtgatagtttt

SEQ ID NO: 171983 - DNA, 1321 bp, Homo sapiens
  Payload ID: 13788
  Gene Symbol: PCMTD2
  Gene Name: protein-L-isoaspartate (D-aspartate) O-methyltransferase domain containing 2
  ENST ID: ENST00000609372
  CDS Start-End: 147-782
gatgtttacggcggccgaggttggagcggcgctgctcggccgcggacacacgagggacgcgcccgaggagctgcaggtggcagcccaggcggtccgaacccgtcggccggccgagcctggagtattgcctaagtgtaatcttgaacatgggcggtgctgtgagtgctggtgaagacaatgatgagctgatagataatttgaaagaagcacagtatatccggactgagctggtagagcaggctttcagagctatcgatcgtgcagactattatcttgaagaatttaaagaaaatgcttataaagacttggcatggaagcatggaaacattcacctctcagccccgtgcatctactcggagccctgccattcagagtcaggaaaatcaagacttgtccagttaccaccagtggcagttcgcagcctccaggacttggctcgcatcgccatccggggcaccattaaaaagattattcatcaggaaactgtgagcaaaaacggaaacggactaaagaacacccccaggtttaaacgaaggagagttcgccgccgtcgaatggaaacgattgtctttttggacaaagaagtctttgccagtcggatttccaacccctcagatgacaacagctgtgaagacttggaagaggaacggagggaagaagaagagaagaccccgccggaaacaaagccagaccccccagtgaacttcctacgccagaaggtcctgagcctccctctgccagatcccctgaaatactacttgctttattacagagaaaaataagtctcctgtttgaaagggggaaataggaagagcagattgctgagtgtgaagttcgtgctgcctgtgtgctgttgaagggtcacctggaggcagacgttgtggggaagggaactgctgggctcatccacaccatggttttcttctagttcctgattgacctctaaaattctattcagttgtatgatttgtttacatagttccacaagaccttcattgcatagaagattgttttcccaaagtggagagaatcttcatagagaaaaagagaaggctgtttctttttcggctctgacgaaacactgaagtctgcgtaagagagactgtttgatgaccgtccctcatgcaacatgcacggtactcactaaaaatgaaaactgaagtggaaactaacctgtgttgcttataaagtgtgaaagcacaagcttataaatgtataaaatcttttctgggtgtgacgcacctgcgtccaagtttgaatttttatgatatgtaccacttaattactggcactgagtatcactgaatttcttagttttcta

SEQ ID NO: 171984 - DNA, 1534 bp, Homo sapiens
  Payload ID: 13788
  Gene Symbol: PCMTD2
  Gene Name: protein-L-isoaspartate (D-aspartate) O-methyltransferase domain containing 2
  ENST ID: ENST00000618274
  CDS Start-End: 292-1080
gttggagcggcgctgctcggccgcggacacacgagggacgcgcccgaggagctgcaggtggcagcccaggcggtccgaacccgtcggccggccgagcctggagtattgcctaagtgtaatcttgaacatgggcggtgctgtgagtgctggtgaagacaatgatgagctgatagataatttgaaagaagcacagtatatccggactgagctggtagagcaggctttcagagctatcgatcgtgcagactattatcttgaagaatttaaagaaaatgcttataaagacttggcatggaagcatggaaacattcacctctcagccccgtggaacttcactcagatgtgatagagtatgcaaagcagaaactggacttcttcatcagaacaagtgatagttttgacaagtttgacttctgtgaaccttcctttgttactgggaattgcctggagatttctccggattgttctcagtatgatcgtgtatactgtggggctggcgtgcagaaagagcatgaagagtacatgaagaatcttctcaaagtgggagggatccttgtcatgccactggaagagaagttgactaagataacacgcacaggtccttcagcttgggaaaccaaaaagattcttgctgtttcttttgctcctctgatccagccctgccattcagagtcaggaaaatcaagacttgtccagttaccaccagtggcagttcgcagcctccaggacttggctcgcatcgccatccggggcaccattaaaaagattattcatcaggaaactgtgagcaaaaacggaaacggactaaagaacacccccaggtttaaacgaaggagagttcgccgccgtcgaatggaaacgattgtctttttggacaaagaagtctttgccagtcggatttccaacccctcagatgacaacagctgtgaagacttggaagaggaacggagggaagaagaagagaagaccccgccggaaacaaagccagaccccccagtgaacttcctacgccagaaggtcctgagcctccctctgccagatcccctgaaatactacttgctttattacagagaaaaataagtctcctgtttgaaagggggaaataggaagagcagattgctgagtgtgaagttcgtgctgcctgtgtgctgttgaagggtcacctggaggcagacgttgtggggaagggaactgctgggctcatccacaccatggttttcttctagttcctgattgacctctaaaattctattcagttgtatgatttgtttacatagttccacaagaccttcattgcatagaagattgttttcccaaagtggagagaatcttcatagagaaaaagagaaggctgtttctttttcggctctgacgaaacactgaagtctgcgtaagagagactgtttgatgaccgtccctcatgcaacatgcacggtactcactaaaaatgaaaactgaagtggaaactaacctgtgttgcttataaagtgtgaaagcacaagcttataaatgtataaaatcttttctgggtgtg

SEQ ID NO: 171985 - DNA, 541 bp, Homo sapiens; identical to SEQ ID NO: 171980
  Payload ID: 13788
  Gene Symbol: PCMTD2
  Gene Name: protein-L-isoaspartate (D-aspartate) O-methyltransferase domain containing 2
  ENST ID: ENST00000629544
  CDS Start-End: 136-541

SEQ ID NO: 171986 - DNA, 2401 bp, Homo sapiens
  Payload ID: 13788
  Gene Symbol: PCMTD2
  Gene Name: protein-L-isoaspartate (D-aspartate) O-methyltransferase domain containing 2
  Uniprot ID: Q9NV79
  ENST ID: ENST00000631244
  CDS Start-End: 155-1159
cggcggcggatgtttacggcggccgaggttggagcggcgctgctcggccgcggacacacgagggacgcgcccgaggagctgcaggtggcagcccaggcggtccgaacccgtcggccggccgagcctggagtattgcctaagtgtaatcttgaacatgggcggtgctgtgagtgctggtgaagacaatgatgagctgatagataatttgaaagaagcacagtatatccggactgagctggtagagcaggctttcagagctatcgatcgtgcagactattatcttgaagaatttaaagaaaatgcttataaagacttggcatggaagcatggaaacattcacctctcagccccgtgcatctactcggaggtgatggaagccctagatctgcagcctggactctcgtttctgaacctgggcagtggcactgggtatctcagctccatggtgggcctcattctaggtccttttggtgtgaaccatggggtggaacttcactcagatgtgatagagtatgcaaagcagaaactggacttcttcatcagaacaagtgatagttttgacaagtttgacttctgtgaaccttcctttgttactgggaattgcctggagatttctccggattgttctcagtatgatcgtgtatactgtggggctggcgtgcagaaagagcatgaagagtacatgaagaatcttctcaaagtgggagggatccttgtcatgccactggaagagaagccctgccattcagagtcaggaaaatcaagacttgtccagttaccaccagtggcagttcgcagcctccaggacttggctcgcatcgccatccggggcaccattaaaaagattattcatcaggaaactgtgagcaaaaacggaaacggactaaagaacacccccaggtttaaacgaaggagagttcgccgccgtcgaatggaaacgattgtctttttggacaaagaagtctttgccagtcggatttccaacccctcagatgacaacagctgtgaagacttggaagaggaacggagggaagaagaagagaagaccccgccggaaacaaagccagaccccccagtgaacttcctacgccagaaggtcctgagcctccctctgccagatcccctgaaatactacttgctttattacagagaaaaataagtctcctgtttgaaagggggaaataggaagagcagattgctgagtgtgaagttcgtgctgcctgtgtgctgttgaagggtcacctggaggcagacgttgtggggaagggaactgctgggctcatccacaccatggttttcttctagttcctgattgacctctaaaattctattcagttgtatgatttgtttacatagttccacaagaccttcattgcatagaagattgttttcccaaagtggagagaatcttcatagagaaaaagagaaggctgtttctttttcggctctgacgaaacactgaagtctgcgtaagagagactgtttgatgaccgtccctcatgcaacatgcacggtactcactaaaaatgaaaactgaagtggaaactaacctgtgttgcttataaagtgtgaaagcacaagcttataaatgtataaaatcttttctgggtgtgacgcacctgcgtccaagtttgaatttttatgatatgtaccacttaattactggcactgagtatcactgaatttcttagttttctagtggggaaacattattgagaagccctcccttattttaagtaagttgattaaatcttatgtgagttgccagttgtaatttttcaaaggaaaaattttgatggggtggaggaatgaattgccagataatctttctggaattccgagagaattccaaagagggtttttttttttttttttaggacatcttttgatacctttaaaagaaccactgtcaagtaatccttaaaagaatatcttggaaaaggaaacagattttttcctgtgtgtaagcaataagtgaagttacatttgccctaaccctagggatgattctttacccagttttaaagcccatcatggtattctaaggtgttgacaccctccatcctcagagcaggtcgaaaatattaaatagactggggactctatgatgggcagcctgtgctttttgacttcagtttgctatttttctgtgatcacattagtactgattcatagattctatcttttataattctggagaaaaagatttgttagttttgtaatttttttgtaagaccaaatgtatgtattttagtagctccattgcatgagaagagtgtaactcacactgacttgtgatatcagccttctctgggccttgtgtgtggagagctttctatcttaccaagtggtagggctaaaagaacaacagcctttttggtagtcacatagcagaatgatc

SEQ ID NO: 171987 - DNA, 584 bp, Homo sapiens
  Payload ID: 13788
  Gene Symbol: PCMTD2
  Gene Name: protein-L-isoaspartate (D-aspartate) O-methyltransferase domain containing 2
  ENST ID: ENST00000628717
  CDS Start-End: 491-584
gactgtcattcaagaatgagtgaagttgaggtgcctataagcaactcagaaattgttgtggccacgcttgggggaaatagagccctacactcaggtgatgagaggagacctcagaggtgaccgatccagggccttgctccctgcgccaccccagctcgtacctccagtggaacttggctgggcttatcaagagctcctttcattcattgcaacttcatttgttagaaagcttctctgtgtatttagtaggcattgtctccaacatgtaccactggtctggcttttgttaggcccattaatagtgtacatgtgacagcctttcaagtataggtgctccccggcttacggtggggtcgcatcccagtaaacacatcgttaaacctgaagtcgaaccatccgaagtcggagaccatctgtatttgaaaaaagtccctttgcattgcttgtaagagttctggttttcaagtattgcctaagtgtaatcttgaacatgggcggtgctgtgagtgctggtgaagacaatgatgagctgatagataatttgaaagaagcacagtatatccggactgagctggtagagcagg

SEQ ID NO: 171988 - DNA, 572 bp, Homo sapiens; identical to SEQ ID NO: 171982
  Payload ID: 13788
  Gene Symbol: PCMTD2
  Gene Name: protein-L-isoaspartate (D-aspartate) O-methyltransferase domain containing 2
  ENST ID: ENST00000628846
  CDS Start-End: 168-572

SEQ ID NO: 171989 - DNA, 2455 bp, Homo sapiens
  Payload ID: 13788
  Gene Symbol: PCMTD2
  Gene Name: protein-L-isoaspartate (D-aspartate) O-methyltransferase domain containing 2
  Uniprot ID: Q9NV79
  ENST ID: ENST00000627415
  CDS Start-End: 128-1213
gttggagcggcgctgctcggccgcggacacacgagggacgcgcccgaggagctgcaggtggcagcccaggcggtccgaacccgtcggccggccgagcctggagtattgcctaagtgtaatcttgaacatgggcggtgctgtgagtgctggtgaagacaatgatgagctgatagataatttgaaagaagcacagtatatccggactgagctggtagagcaggctttcagagctatcgatcgtgcagactattatcttgaagaatttaaagaaaatgcttataaagacttggcatggaagcatggaaacattcacctctcagccccgtgcatctactcggaggtgatggaagccctagatctgcagcctggactctcgtttctgaacctgggcagtggcactgggtatctcagctccatggtgggcctcattctaggtccttttggtgtgaaccatggggtggaacttcactcagatgtgatagagtatgcaaagcagaaactggacttcttcatcagaacaagtgatagttttgacaagtttgacttctgtgaaccttcctttgttactgggaattgcctggagatttctccggattgttctcagtatgatcgtgtatactgtggggctggcgtgcagaaagagcatgaagagtacatgaagaatcttctcaaagtgggagggatccttgtcatgccactggaagagaagttgactaagataacacgcacaggtccttcagcttgggaaaccaaaaagattcttgctgtttcttttgctcctctgatccagccctgccattcagagtcaggaaaatcaagacttgtccagttaccaccagtggcagttcgcagcctccaggacttggctcgcatcgccatccggggcaccattaaaaagattattcatcaggaaactgtgagcaaaaacggaaacggactaaagaacacccccaggtttaaacgaaggagagttcgccgccgtcgaatggaaacgattgtctttttggacaaagaagtctttgccagtcggatttccaacccctcagatgacaacagctgtgaagacttggaagaggaacggagggaagaagaagagaagaccccgccggaaacaaagccagaccccccagtgaacttcctacgccagaaggtcctgagcctccctctgccagatcccctgaaatactacttgctttattacagagaaaaataagtctcctgtttgaaagggggaaataggaagagcagattgctgagtgtgaagttcgtgctgcctgtgtgctgttgaagggtcacctggaggcagacgttgtggggaagggaactgctgggctcatccacaccatggttttcttctagttcctgattgacctctaaaattctattcagttgtatgatttgtttacatagttccacaagaccttcattgcatagaagattgttttcccaaagtggagagaatcttcatagagaaaaagagaaggctgtttctttttcggctctgacgaaacactgaagtctgcgtaagagagactgtttgatgaccgtccctcatgcaacatgcacggtactcactaaaaatgaaaactgaagtggaaactaacctgtgttgcttataaagtgtgaaagcacaagcttataaatgtataaaatcttttctgggtgtgacgcacctgcgtccaagtttgaatttttatgatatgtaccacttaattactggcactgagtatcactgaatttcttagttttctagtggggaaacattattgagaagccctcccttattttaagtaagttgattaaatcttatgtgagttgccagttgtaatttttcaaaggaaaaattttgatggggtggaggaatgaattgccagataatctttctggaattccgagagaattccaaagagggtttttttttttttttttaggacatcttttgatacctttaaaagaaccactgtcaagtaatccttaaaagaatatcttggaaaaggaaacagattttttcctgtgtgtaagcaataagtgaagttacatttgccctaaccctagggatgattctttacccagttttaaagcccatcatggtattctaaggtgttgacaccctccatcctcagagcaggtcgaaaatattaaatagactggggactctatgatgggcagcctgtgctttttgacttcagtttgctatttttctgtgatcacattagtactgattcatagattctatcttttataattctggagaaaaagatttgttagttttgtaatttttttgtaagaccaaatgtatgtattttagtagctccattgcatgagaagagtgtaactcacactgacttgtgatatcagccttctctgggccttgtgtgtggagagctttctatcttaccaagtggtagggctaaaagaacaacagcctttttggtagtcacatagcagaatgatc

SEQ ID NO: 171990 - DNA, 476 bp, Homo sapiens; identical to SEQ ID NO: 171979
  Payload ID: 13788
  Gene Symbol: PCMTD2
  Gene Name: protein-L-isoaspartate (D-aspartate) O-methyltransferase domain containing 2
  ENST ID: ENST00000627852
  CDS Start-End: 194-476

SEQ ID NO: 171991 - DNA, 1321 bp, Homo sapiens; identical to SEQ ID NO: 171983
  Payload ID: 13788
  Gene Symbol: PCMTD2
  Gene Name: protein-L-isoaspartate (D-aspartate) O-methyltransferase domain containing 2
  ENST ID: ENST00000629502
  CDS Start-End: 147-782

SEQ ID NO: 171992 - DNA, 1540 bp, Homo sapiens
  Payload ID: 13789
  Gene Symbol:
  Gene Name: Protein-L-isoaspartate O-methyltransferase domain-containing protein 2  [Source:UniProtKB/Swiss-Prot
  Acc:Q9NV79]
  Uniprot ID: Q9NV79
  ENST ID: ENST00000615818
  CDS Start-End: 1-1086
atgggcggtgctgtgagtgctggtgaagacaatgatgagctgatagataatttgaaagaagcacagtatatccggactgagctggtagagcaggctttcagagctatcgatcgtgcagactattatcttgaagaatttaaagaaaatgcttataaagacttggcatggaagcatggaaacattcacctctcagccccgtgcatctactcggaggtgatggaagccctagatctgcagcctggactctcgtttctgaacctgggcagtggcactgggtatctcagctccatggtgggcctcattctaggtccttttggtgtgaaccatggggtggaacttcactcagatgtgatagagtatgcaaagcagaaactggacttcttcatcagaacaagtgatagttttgacaagtttgacttctgtgaaccttcctttgttactgggaattgcctggagatttctccggattgttctcagtatgatcgtgtatactgtggggctggcgtgcagaaagagcatgaagagtacatgaagaatcttctcaaagtgggagggatccttgtcatgccactggaagagaagttgactaagataacacgcacaggtccttcagcttgggaaaccaaaaagattcttgctgtttcttttgctcctctgatccagccctgccattcagagtcaggaaaatcaagacttgtccagttaccaccagtggcagttcgcagcctccaggacttggctcgcatcgccatccggggcaccattaaaaagattattcatcaggaaactgtgagcaaaaacggaaacggactaaagaacacccccaggtttaaacgaaggagagttcgccgccgtcgaatggaaacgattgtctttttggacaaagaagtctttgccagtcggatttccaacccctcagatgacaacagctgtgaagacttggaagaggaacggagggaagaagaagagaagaccccgccggaaacaaagccagaccccccagtgaacttcctacgccagaaggtcctgagcctccctctgccagatcccctgaaatactacttgctttattacagagaaaaataagtctcctgtttgaaagggggaaataggaagagcagattgctgagtgtgaagttcgtgctgcctgtgtgctgttgaagggtcacctggaggcagacgttgtggggaagggaactgctgggctcatccacaccatggttttcttctagttcctgattgacctctaaaattctattcagttgtatgatttgtttacatagttccacaagaccttcattgcatagaagattgttttcccaaagtggagagaatcttcatagagaaaaagagaaggctgtttctttttcggctctgacgaaacactgaagtctgcgtaagagagactgtttgatgaccgtccctcatgcaacatgcacggtactcactaaaaatgaaaactgaagtggaaactaacctgtgttgcttataaagtgtgaaagcacaagcttataaatgtataaaatcttttctgggtgtg

SEQ ID NO: 171993 - DNA, 5154 bp, Homo sapiens
  Payload ID: 13789
  Gene Symbol:
  Gene Name: Protein-L-isoaspartate O-methyltransferase domain-containing protein 2  [Source:UniProtKB/Swiss-Prot
  Acc:Q9NV79]
  ENST ID: ENST00000625658
  CDS Start-End: 1-2490
gaagaggaggaggaagaggaagaggaagaggaggaggaggaggcagctcctgatgtgatctttcaggaagacacctctcacacctctgcccagaaggcccctgagctccggggcccagaatcacccagtcccaagcctgagtactctgttattgtggaggtccgctcggatgatgacaaggacgaggacacccactcccggaagtcaacagtcactgacgagtcggagatgcaggacatgatgacccggggaaacctgggcctcctggagcaggccatcgccctgaaggctgaacaggtgcgcacagtctgcgagccgggctgcccgcctgccgagcagagccagctgggcctgggagagccagggaaggcagcaaagcccctggacactgtgcggaagagttactacagtaaagatccttcaagagctgagaagcgtgagatcaagtgtccaacaccaggctgtgatggcactggccacgttaccgggttgtaccctcaccaccgcagcctttctggctgtccccacaaggataggatccccccagagatcttagccatgcatgagaacgtgctgaagtgccccactcctggctgcacaggccagggtcacgtgaacagcaaccgcaacacgcacagaagtttgtctgggtgtcccattgctgccgccgaaaaattagccaaatcccatgagaagcagcagccgcagacaggagatccttccaagagtagctccaattccgatcggatcctcaggcccatgtgcttcgtgaagcagctcgaggtccctccatatgggagctaccggcccaacgtggcccccgccacacccagggccaacttggccaaggagctggagaagttctccaaggtcacctttgactacgcaagtttcgatgctcaggtttttggcaaacgcatgcttgccccaaagattcagaccagcgaaacctcacctaaagcctttcaatgctttgactactcgcaggacgccgaggctgcacacatggctgccactgccatcctgaacctctccacgcgctgctgggagatgcctgagaacctcagcacgaagccacaggacctccccagcaagtctgtggatatcgaggtagacgaaaatggaaccctggacttgagcatgcacaaacaccgcaaacgagaaaatgctttccccagcagcagcagctgcagcagcagccccggtgtgaagtctcccgacgcctcccagcgccacagcagcaccagcgcccccagcagctccatgacctctccccagtccagccaggcctcccgccaggacgagtgggaccggcccctggactacaccaagcctagccgcctgagagaggaggaacctgaggagtcagagccagcagcccattcttttgcttcttctgaagcagatgaccaggaagtgtcggaagagaattttgaggagcggaagtatccgggggaagtcaccctgaccaactttaagctgaagtttctctccaaggacataaagaaggagctgctcacctgtcccacccctggctgtgacggcagcggccacatcaccgggaactacgcctcccaccgcagcctctctggttgccctcttgctgacaagagcctcagaaacctcatggctgcccactctgctgacctcaagtgccccacgcccggctgtgacggctctggccacatcacagggaactacgcttcacaccggagcttgtccggctgccctcgtgcaaagaaaagtggagtcaaggtggcacccaccaaggacgacaaggaggaccccgagctgatgaagtgcccagttccaggctgtgtggggctcggtcacatcagcgggaaatacgcctctcacaggagcgcatccggctgcccactggccgcccgcaggcagaaggaagggtccctcaatggctcgtcattctcctggaagtccctgaagaatgaaggaccgacctgccccaccccgggctgtgacggctctggccacgccaatgggagtttcctcacccaccggagtttgtcaggctgtcccagagcaacctttgctggaaagaagggaaaactgtcaggggatgaggtcctcagtccaaagttcaagactagcgacgtgttggagaatgatgaggagatcaagcagctgaaccaggagatccgagacctgaacgagtccaactcggagatggaggctgccatggtgcagctgcagtcccagatctcctccatggagaagaacctgaagaacatcgaggaggagaacaagctcattgaggagcagaatgaagccctgtttctggagctgtccggcctgagccaggccctcatccaaagtctcgccaatatccgccttccgcacatggagccaatatgcgaacagaatttcgatgcctatgtgagcaccctcaccgacatgtactccaaccaggacccggagaacaaggacctcctggagagcatcaagcaggctgtgaggggcatccaggtctaggccgtgtggtacccagaagtgtcccagcccaccacaccgtttacctccctcgccctgccccgcaccgtggggatgcccaactcacagtgacttcccgtttggggcccggtgtggccgcgggcgggtttatccaaagggatggctggaaattggccgctcccacgaggctccctccaggcttggggccgtggtggccctatctgtgtgcataggggcactgaagaattacaaagtgatttatttttgttttctgaaagaaatctgaagagcagctcaaagtctccagtggaagctcatggacaaggttctcagtattgcctaagtgtaatcttgaacatgggcggtgctgtgagtgctggtgaagacaatgatgagctgatagataatttgaaagaagcacagtatatccggactgagctggtagagcaggctttcagagctatcgatcgtgcagactattatcttgaagaatttaaagaaaatgcttataaagacttggcatggaagcatggaaacattcacctctcagccccgtgcatctactcggaggtgatggaagccctagatctgcagcctggactctcgtttctgaacctgggcagtggcactgggtatctcagctccatggtgggcctcattctaggtccttttggtgtgaaccatggggtggaacttcactcagatgtgatagagtatgcaaagcagaaactggacttcttcatcagaacaagtgatagttttgacaagtttgacttctgtgaaccttcctttgttactgggaattgcctggagatttctccggattgttctcagtatgatcgtgtatactgtggggctggcgtgcagaaagagcatgaagagtacatgaagaatcttctcaaagtgggagggatccttgtcatgccactggaagagaagttgactaagataacacgcacaggtccttcagcttgggaaaccaaaaagattcttgctgtttcttttgctcctctgatccagccctgccattcagagtcaggaaaatcaagacttgtccagttaccaccagtggcagttcgcagcctccaggacttggctcgcatcgccatccggggcaccattaaaaagattattcatcaggaaactgtgagcaaaaacggaaacggactaaagaacacccccaggtttaaacgaaggagagttcgccgccgtcgaatggaaacgattgtctttttggacaaagaagtctttgccagtcggatttccaacccctcagatgacaacagctgtgaagacttggaagaggaacggagggaagaagaagagaagaccccgccggaaacaaagccagaccccccagtgaacttcctacgccagaaggtcctgagcctccctctgccagatcccctgaaatactacttgctttattacagagaaaaataagtctcctgtttgaaagggggaaataggaagagcagattgctgagtgtgaagttcgtgctgcctgtgtgctgttgaagggtcacctggaggcagacgttgtggggaagggaactgctgggctcatccacaccatggttttcttctagttcctgattgacctctaaaattctattcagttgtatgatttgtttacatagttccacaagaccttcattgcatagaagattgttttcccaaagtggagagaatcttcatagagaaaaagagaaggctgtttctttttcggctctgacgaaacactgaagtctgcgtaagagagactgtttgatgaccgtccctcatgcaacatgcacggtactcactaaaaatgaaaactgaagtggaaactaacctgtgttgcttataaagtgtgaaagcacaagcttataaatgtataaaatcttttctgggtgtgacgcacctgcgtccaagtttgaatttttatgatatgtaccacttaattactggcactgagtatcactgaatttcttagttttctagtggggaaacattattgagaagccctcccttattttaagtaagttgattaaatcttatgtgagttgccagttgtaatttttcaaaggaaaaattttgatggggtggaggaatgaattgccagataatctttctggaattccgagagaattccaaagagggtttttttttttttttttaggacatcttttgatacctttaaaagaaccactgtcaagtaatccttaaaagaatatcttggaaaaggaaacagattttttcctgtgtgtaagcaataagtgaagttacatttgccctaaccctagggatgattctttacccagttttaaagcccatcatggtattctaaggtgttgacaccctccatcctcagagcaggtcgaaaatattaaatagactggggactctatgatgggcagcctgtgctttttgacttcagtttgctatttttctgtgatcacattagtactgattcatagattctatcttttataattctggagaaaaagatttgttagttttgtaatttttttgtaagaccaaatgtatgtattttagtagctccattgcatgagaagagtgtaactcacactgacttgtgatatcagccttctctgggccttgtgtgtggagagctttctatcttaccaagtggtagggctaaaagaacaacagcctttttggtagtcacatagcagaatgatc

SEQ ID NO: 171994 - DNA, 1865 bp, Homo sapiens
  Payload ID: 13790
  Gene Symbol: POMK
  Gene Name: protein-O-mannose kinase
  Uniprot ID: Q9H5K3
  ENST ID: ENST00000331373
  CDS Start-End: 256-1308
gcgtgctggcccggggtggcaggagccgcagaggcttgggctgcagaaaaaggatcctgtttgctgtgtaatcctgagaatggactgcaagagaggaaaaactgggcgtctgcttgggaatctattgtggaaacccagggtgtttcccgaccagtccctgggcgccaactagagtatggactgaccaggtacctggatggagacctgagctggagaaggagatgcgcttgggaggaaattgcagaggccgtcaacatggaaaagcagccccagaacagcaggagaggcctcgccccccgagaggtgccgccagctgttgggctgctgctgatcatggccctgatgaatactctgctctacctctgcctcgaccacttcttcatcgctcctcgacaatccactgtggaccccacacactgtccctatggtcacttcaggataggacagatgaaaaactgctcaccttggctgtcctgcgaggagctgagaacagaagtgagacagctgaagcgtgttggggaaggagctgtaaagagagtctttctgtctgagtggaaggagcacaaagttgcactctcacagctcaccagcctggagatgaaagatgatttcctccatggactgcagatgctgaaatctctccaaggcacacatgttgtcacgctgcttggctattgtgaggatgacaacactatgcttactgaatatcaccctctaggttccttgagtaacctggaagaaacactaaacctttcaaagtaccaaaatgtgaacacgtggcagcacaggctggagctggccatggactatgtcagcatcattaattacctgcaccacagccctgtgggcacacgggtcatgtgcgactccaacgacctgccgaagacactgtcccagtatctgctaacaagcaacttcagcattttggcaaatgacttggacgccttacccctggtgaaccacagctccgggatgctggtgaagtgcggccacagggagctgcatggggatttcgtggctccagagcaactgtggccctatggagaggacgtgcctttccacgatgatctcatgccctcatatgatgagaagattgacatttggaagatcccagacatctccagtttccttctggggcacattgaagggagtgatatggtccgattccatttgtttgatattcacaaagcatgcaagagccagactccctcagaaagacccactgcccaggacgttctggagacctaccagaaggtcttggatacacttagagatgccatgatgtctcaggcaagagagatgctgtgaaaaccagtccagccaatgaaggtgggattgaagggctgaatggaagttacagcattctactctgatggtggagttttttgcctgagtttcgtgttttattgttttttttatggcttagccatgtggttcgttgtccacatccacatgtacgtttgtatgtagtccacattggttgttagatttttttttttttctttgagatgcggtcttgctctgttgctgaggctggagtgcagtgatgtgatcttggctcactgcagcctctgcctcccaggttcaagcaattctcccacctcagcctcctgagtagctgggattacaggcacaccaccacgcctggctaatttttgtatttttagtggaggtggggtttcaccatgttggccaggctggtcccgaactcctgacttcctcggcctcccaaagtgttgggattacaggcatgggccactatgcctggccagttgttagatttccatggatttgtagtttccaaagtttctcgttattgatttctacttttcttccattgtggtctgagaaggtacttgatatga

SEQ ID NO: 171995 - DNA, 564 bp, Homo sapiens
  Payload ID: 13790
  Gene Symbol: POMK
  Gene Name: protein-O-mannose kinase
  ENST ID: ENST00000518991
  CDS Start-End: 163-564
agtgcgtgctggcccggggtggcaggagccgcagaggcttgggctgcagaaaaaggatcctgtttgctgtgtaatcctgagaatggactgcaagagaggaaaaactgggcgtctgcttgggaatctattgtggaaacccaggaaattgcagaggccgtcaacatggaaaagcagccccagaacagcaggagaggcctcgccccccgagaggtgccgccagctgttgggctgctgctgatcatggccctgatgaatactctgctctacctctgcctcgaccacttcttcatcgctcctcgacaatccactgtggaccccacacactgtccctatggtcacttcaggataggacagatgaaaaactgctcaccttggctgtcctgcgaggagctgagaacagaagtgagacagctgaagcgtgttggggaaggagctgtaaagagagtctttctgtctgagtggaaggagcacaaagttgcactctcacagctcaccagcctggagatgaaagatgatttcctccatggactgcagatgctgaaatctctccaaggcacacatgtt

SEQ ID NO: 171996 - DNA, 1527 bp, Homo sapiens
  Payload ID: 13790
  Gene Symbol: POMK
  Gene Name: protein-O-mannose kinase
  Uniprot ID: Q9H5K3
  ENST ID: ENST00000614426
  CDS Start-End: 172-1224
agtaggcccagtgcgtgctggcccggggtggcaggagccgcagaggcttgggctgcagaaaaaggatcctgtttgctgtgtaatcctgagaatggactgcaagagaggaaaaactgggcgtctgcttgggaatctattgtggaaacccaggaaattgcagaggccgtcaacatggaaaagcagccccagaacagcaggagaggcctcgccccccgagaggtgccgccagctgttgggctgctgctgatcatggccctgatgaatactctgctctacctctgcctcgaccacttcttcatcgctcctcgacaatccactgtggaccccacacactgtccctatggtcacttcaggataggacagatgaaaaactgctcaccttggctgtcctgcgaggagctgagaacagaagtgagacagctgaagcgtgttggggaaggagctgtaaagagagtctttctgtctgagtggaaggagcacaaagttgcactctcacagctcaccagcctggagatgaaagatgatttcctccatggactgcagatgctgaaatctctccaaggcacacatgttgtcacgctgcttggctattgtgaggatgacaacactatgcttactgaatatcaccctctaggttccttgagtaacctggaagaaacactaaacctttcaaagtaccaaaatgtgaacacgtggcagcacaggctggagctggccatggactatgtcagcatcattaattacctgcaccacagccctgtgggcacacgggtcatgtgcgactccaacgacctgccgaagacactgtcccagtatctgctaacaagcaacttcagcattttggcaaatgacttggacgccttacccctggtgaaccacagctccgggatgctggtgaagtgcggccacagggagctgcatggggatttcgtggctccagagcaactgtggccctatggagaggacgtgcctttccacgatgatctcatgccctcatatgatgagaagattgacatttggaagatcccagacatctccagtttccttctggggcacattgaagggagtgatatggtccgattccatttgtttgatattcacaaagcatgcaagagccagactccctcagaaagacccactgcccaggacgttctggagacctaccagaaggtcttggatacacttagagatgccatgatgtctcaggcaagagagatgctgtgaaaaccagtccagccaatgaaggtgggattgaagggctgaatggaagttacagcattctactctgatggtggagttttttgcctgagtttcgtgttttattgttttttttatggcttagccatgtggttcgttgtccacatccacatgtacgtttgtatgtagtccacattggttgttagatttttttttttttctttgagatgcggtcttgctctgttgctgaggctggagtgcagtgatgtgatcttggctcactgcagcctctgcctcccaggttcaagcaattctcccacctcagcctcc

SEQ ID NO: 171997 - DNA, 2912 bp, Homo sapiens
  Payload ID: 13791
  Gene Symbol: POMT1
  Gene Name: protein-O-mannosyltransferase 1
  Uniprot ID: Q9Y6A1
  ENST ID: ENST00000341012
  CDS Start-End: 197-2212
gtctggccccgcaggctcggtgaatcgaacgttgagcagggcggtgggtggtgcggagtgccgagcggcctcacccccaaccgtcggcccagtcggacggttccgaggcgttgccgggagccgggcgcggctctgtgtggactcggagaaacgcggttttgacgaagtatattatgggcagtacatctctttttacatgaaacaaatcttcttcttggatgacagtgggccgccatttggccacatggtgctggccttgggaggttatttaggaggattcgatggcaattttttgtggaacagaattggagcagaatacagtagcaacgtgcctgtgtggtccctgcgcctgctgccagcactcgcgggggccttgtcggtccccatggcctaccagatagtgttggagctccacttttctcattgtgccgccatgggagctgctctgttgatgcttatcgagaatgctctcatcactcagtcaaggctaatgcttttggaatcagtgttaatatttttcaatctattggccgtgttgtcctacctgaagttcttcaactgccaaaagcacagccctttttctctgagctggtggttctggctaacactgacaggggtcgcttgttcctgtgcagtgggcatcaagtacatgggtgtgttcacgtacgtgctcgtgctgggtgttgcagctgtccatgcctggcacctgcttggagaccagactttgtccaatgtctgtgtgttctgtcacttgctcgcccgagcagtggctttgctggtcatcccggtcgtcctgtacttactgttcttctacgtccacttgattctagtcttccgctctgggccccacgaccaaatcatgtccagtgccttccaggccagcttagagggaggactagctcggatcactcagggtcagccactggaggtggcctttgggtcccaggtcactctgaggaacgtctttgggaaacctgtgccctgctggcttcattcccaccaggacacctaccccatgatatatgagaacggccgaggcagctcccaccagcaacaggtgacctgttaccccttcaaagatgtcaataactggtggattgtaaaggatcccaggaggcaccagctggtggtgagcagccctccgagacctgtgaggcacggggacatggtgcagctggtccacggcatgaccacccgctccctgaacacgcatgatgttgcagcccccctgagcccccattcacaggaggtctcctgctacattgactataacatctccatgcccgcccagaacctctggagactggaaattgtgaacagaggatctgacacagacgtctggaagaccatcctctcagaggtccgctttgtgcacgtgaacacttccgctgtcttaaagctgagcggggctcacctccctgactgggggtatcggcaactggagatcgtcggggagaagctgtcccggggctaccacgggagcacggtgtggaacgtggaggagcaccgatacggcgcgagccaggagcagagggagcgggaacgggagctgcactcacctgcgcaggtggacgtcagcaggaacctcagcttcatggcgagattctcggagctgcagtggaggatgctggcgctgagaagtgatgactcggaacacaagtacagctccagcccactggagtgggtcaccctggacaccaatattgcctactggctgcaccccaggaccagcgctcagatccacctacttggaaacatagtgatctgggtttcgggcagcctcgctctggccatctacgccctgctgtccttgtggtacctgctccgacggcgaagaaatgtccatgacctccctcaggatgcctggctgcgctgggtgctggctggggcgctgtgtgccggtggctgggcagtgaactacctcccgttcttcctgatggagaagacactcttcctctaccactacctgcccgcactcaccttccaaatccttctgctccctgtggtcctgcagcacatcagcgaccacctgtgcaggtcccagctccagaggagcatcttcagcgccctggtggtggcctggtactcctccgcgtgccacgtgtccaacacgctgcgcccactcacctacggggacaagtcactctcgccacatgaactcaaggcccttcgctggaaagacagctgggacatcttgatccgaaaacactagaacaagagtgtggcaaagaacacccgtgctggggtcgggatgaggttgaagggtcttggtcaatgtacgtaatgagcagggtgggccccacgctgggaggacacgggctgggctgagcagggcctctagtggaacacatgggggtctcattgaaaagctctctgatgagcacctccttttgtgcaaagttaattttttctcgacaataaagatattccgtgtctttacccctgaactaagacacagggagtatttcagaggccagcgtaggagtcattgacaacaaaaagccgagaacccagggccagcagtggagcctcagcagaccagggcctggtccttgctaactgctgcagggtggagtttgatctggcagacccgatcctccttcatgaacacccagcaacctgagcaagtcccggccctgccctcagcgagcccggcaggcgtcctgggacagctcagtgttggagggccacctgaaccacgagccagggctggggcttgcatgtcattgtctatgacagcgtcaagactggcccttggcaccgtgctgtgtggaaaccctcccctctgagactccactgagacgtggctgagtgaaatcttcctcgtcagtggtcaaggtgtgtcatccatacagctccatgcctttgtcttttttaaatgtaattaaaaaaggaaccaactggcgtttgta

SEQ ID NO: 171998 - DNA, 1741 bp, Homo sapiens
  Payload ID: 13791
  Gene Symbol: POMT1
  Gene Name: protein-O-mannosyltransferase 1
  ENST ID: ENST00000372220
  CDS Start-End: 1-1041
tggcgaggaggagggtgcacttccccagcgaccctcggagcagcccggggtgctgtgggcattgggaaggaaggccagtaccagccccttatagcttccctcacttggggacttgtccctttgtctcaggctcaagaaattgtgaacagaggatctgacacagacgtctggaagaccatcctctcagaggtccgctttgtgcacgtgaacacttccgctgtcttaaagctgagcggggctcacctccctgactgggggtatcggcaactggagatcgtcggggagaagctgtcccggggctaccacgggagcacggtgtggaacgtggaggagcaccgatacggcgcgagccaggagcagagggagcgggaacgggagctgcactcacctgcgcaggtggacgtcagcaggaacctcagcttcatggcgagattctcggagctgcagtggaggatgctggcgctgagaagtgatgactcggaacacaagtacagctccagcccactggagtgggtcaccctggacaccaatattgcctactggctgcaccccaggaccagcgctcagatccacctacttggaaacatagtgatctgggtttcgggcagcctcgctctggccatctacgccctgctgtccttgtggtacctgctccgacggcgaagaaatgtccatgacctccctcaggatgcctggctgcgctgggtgctggctggggcgctgtgtgccggtggctgggcagtgaactacctcccgttcttcctgatggagaagacactcttcctctaccactacctgcccgcactcaccttccaaatccttctgctccctgtggtcctgcagcacatcagcgaccacctgtgcaggtcccagctccagaggagcatcttcagcgccctggtggtggcctggtactcctccgcgtgccacgtgtccaacacgctgcgcccactcacctacggggacaagtcactctcgccacatgaactcaaggcccttcgctggaaagacagctgggacatcttgatccgaaaacactagaacaagagtgtggcaaagaacacccgtgctggggtcgggatgaggttgaagggtcttggtcaatgtacgtaatgagcagggtgggccccacgctgggaggacacgggctgggctgagcagggcctctagtggaacacatgggggtctcattgaaaagctctctgatgagcacctccttttgtgcaaagttaattttttctcgacaataaagatattccgtgtctttacccctgaactaagacacagggagtatttcagaggccagcgtaggagtcattgacaacaaaaagccgagaacccagggccagcagtggagcctcagcagaccagggcctggtccttgctaactgctgcagggtggagtttgatctggcagacccgatcctccttcatgaacacccagcaacctgagcaagtcccggccctgccctcagcgagcccggcaggcgtcctgggacagctcagtgttggagggccacctgaaccacgagccagggctggggcttgcatgtcattgtctatgacagcgtcaagactggcccttggcaccgtgctgtgtggaaaccctcccctctgagactccactgagacgtggctgagtgaaatcttcctcgtcagtggtcaaggtgtgtcatccatacagctccatgcctttgtcttttttaaatgtaattaaaaaaggaaccaactggcgtttgta

SEQ ID NO: 171999 - DNA, 3123 bp, Homo sapiens
  Payload ID: 13791
  Gene Symbol: POMT1
  Gene Name: protein-O-mannosyltransferase 1
  Uniprot ID: Q9Y6A1
  ENST ID: ENST00000372228
  CDS Start-End: 180-2423
cccgcaggctcggtgaatcgaacgttgagcagggcggtgggtggtgcggagtgccgagcggcctcacccccaaccgtcggcccagtcggacggttccgaggcgttgccgggagccgggcgcggctctgtgtggactcggagaaacgcggggcgtctgcctgagcccgcttttctacaagatgtggggatttttgaagcgccctgtagtggtgacggctgacatcaacttgagccttgtggccctgactgggatggggttactgagccggctgtggcgactcacctacccgcgggctgtggtttttgacgaagtatattatgggcagtacatctctttttacatgaaacaaatcttcttcttggatgacagtgggccgccatttggccacatggtgctggccttgggaggttatttaggaggattcgatggcaattttttgtggaacagaattggagcagaatacagtagcaacgtgcctgtgtggtccctgcgcctgctgccagcactcgcgggggccttgtcggtccccatggcctaccagatagtgttggagctccacttttctcattgtgccgccatgggagctgctctgttgatgcttatcgagaatgctctcatcactcagtcaaggctaatgcttttggaatcagtgttaatatttttcaatctattggccgtgttgtcctacctgaagttcttcaactgccaaaagcacagccctttttctctgagctggtggttctggctaacactgacaggggtcgcttgttcctgtgcagtgggcatcaagtacatgggtgtgttcacgtacgtgctcgtgctgggtgttgcagctgtccatgcctggcacctgcttggagaccagactttgtccaatgtaggtgctgatgtccagtgctgcatgaggccggcctgtatggggcagatgcagatgtcacagggggtctgtgtgttctgtcacttgctcgcccgagcagtggctttgctggtcatcccggtcgtcctgtacttactgttcttctacgtccacttgattctagtcttccgctctgggccccacgaccaaatcatgtccagtgccttccaggccagcttagagggaggactagctcggatcactcagggtcagccactggaggtggcctttgggtcccaggtcactctgaggaacgtctttgggaaacctgtgccctgctggcttcattcccaccaggacacctaccccatgatatatgagaacggccgaggcagctcccaccagcaacaggtgacctgttaccccttcaaagatgtcaataactggtggattgtaaaggatcccaggaggcaccagctggtggtgagcagccctccgagacctgtgaggcacggggacatggtgcagctggtccacggcatgaccacccgctccctgaacacgcatgatgttgcagcccccctgagcccccattcacaggaggtctcctgctacattgactataacatctccatgcccgcccagaacctctggagactggaaattgtgaacagaggatctgacacagacgtctggaagaccatcctctcagaggtccgctttgtgcacgtgaacacttccgctgtcttaaagctgagcggggctcacctccctgactgggggtatcggcaactggagatcgtcggggagaagctgtcccggggctaccacgggagcacggtgtggaacgtggaggagcaccgatacggcgcgagccaggagcagagggagcgggaacgggagctgcactcacctgcgcaggtggacgtcagcaggaacctcagcttcatggcgagattctcggagctgcagtggaggatgctggcgctgagaagtgatgactcggaacacaagtacagctccagcccactggagtgggtcaccctggacaccaatattgcctactggctgcaccccaggaccagcgctcagatccacctacttggaaacatagtgatctgggtttcgggcagcctcgctctggccatctacgccctgctgtccttgtggtacctgctccgacggcgaagaaatgtccatgacctccctcaggatgcctggctgcgctgggtgctggctggggcgctgtgtgccggtggctgggcagtgaactacctcccgttcttcctgatggagaagacactcttcctctaccactacctgcccgcactcaccttccaaatccttctgctccctgtggtcctgcagcacatcagcgaccacctgtgcaggtcccagctccagaggagcatcttcagcgccctggtggtggcctggtactcctccgcgtgccacgtgtccaacacgctgcgcccactcacctacggggacaagtcactctcgccacatgaactcaaggcccttcgctggaaagacagctgggacatcttgatccgaaaacactagaacaagagtgtggcaaagaacacccgtgctggggtcgggatgaggttgaagggtcttggtcaatgtacgtaatgagcagggtgggccccacgctgggaggacacgggctgggctgagcagggcctctagtggaacacatgggggtctcattgaaaagctctctgatgagcacctccttttgtgcaaagttaattttttctcgacaataaagatattccgtgtctttacccctgaactaagacacagggagtatttcagaggccagcgtaggagtcattgacaacaaaaagccgagaacccagggccagcagtggagcctcagcagaccagggcctggtccttgctaactgctgcagggtggagtttgatctggcagacccgatcctccttcatgaacacccagcaacctgagcaagtcccggccctgccctcagcgagcccggcaggcgtcctgggacagctcagtgttggagggccacctgaaccacgagccagggctggggcttgcatgtcattgtctatgacagcgtcaagactggcccttggcaccgtgctgtgtggaaaccctcccctctgagactccactgagacgtggctgagtgaaatcttcctcgtcagtggtcaaggtgtgtcatccatacagctccatgcctttgtcttttttaaatgtaattaaaaaaggaaccaactggcgtttgta

SEQ ID NO: 172000 - DNA, 2821 bp, Homo sapiens
  Payload ID: 13791
  Gene Symbol: POMT1
  Gene Name: protein-O-mannosyltransferase 1
  Uniprot ID: Q9Y6A1
  ENST ID: ENST00000404875
  CDS Start-End: 295-2121
acgcgcgctgctgcccgtctggccccgcaggctcggtgaatcgaacgttgagcagggcggtgggtggtgcggagtgccgagcggcctcacccccaaccgtcggcccagtcggacggttccgaggcgttgccgggagccgggcgcggctctgtgtggactcggagaaacgcgggttatttaggaggattcgatggcaattttttgtggaacagaattggagcagaatacagtagcaacgtgcctgtgtggtccctgcgcctgctgccagcactcgcgggggccttgtcggtccccatggcctaccagatagtgttggagctccacttttctcattgtgccgccatgggagctgctctgttgatgcttatcgagaatgctctcatcactcagtcaaggctaatgcttttggaatcagtgttaatatttttcaatctattggccgtgttgtcctacctgaagttcttcaactgccaaaagcacagccctttttctctgagctggtggttctggctaacactgacaggggtcgcttgttcctgtgcagtgggcatcaagtacatgggtgtgttcacgtacgtgctcgtgctgggtgttgcagctgtccatgcctggcacctgcttggagaccagactttgtccaatgtctgtgtgttctgtcacttgctcgcccgagcagtggctttgctggtcatcccggtcgtcctgtacttactgttcttctacgtccacttgattctagtcttccgctctgggccccacgaccaaatcatgtccagtgccttccaggccagcttagagggaggactagctcggatcactcagggtcagccactggaggtggcctttgggtcccaggtcactctgaggaacgtctttgggaaacctgtgccctgctggcttcattcccaccaggacacctaccccatgatatatgagaacggccgaggcagctcccaccagcaacaggtgacctgttaccccttcaaagatgtcaataactggtggattgtaaaggatcccaggaggcaccagctggtggtgagcagccctccgagacctgtgaggcacggggacatggtgcagctggtccacggcatgaccacccgctccctgaacacgcatgatgttgcagcccccctgagcccccattcacaggaggtctcctgctacattgactataacatctccatgcccgcccagaacctctggagactggaaattgtgaacagaggatctgacacagacgtctggaagaccatcctctcagaggtccgctttgtgcacgtgaacacttccgctgtcttaaagctgagcggggctcacctccctgactgggggtatcggcaactggagatcgtcggggagaagctgtcccggggctaccacgggagcacggtgtggaacgtggaggagcaccgatacggcgcgagccaggagcagagggagcgggaacgggagctgcactcacctgcgcaggtggacgtcagcaggaacctcagcttcatggcgagattctcggagctgcagtggaggatgctggcgctgagaagtgatgactcggaacacaagtacagctccagcccactggagtgggtcaccctggacaccaatattgcctactggctgcaccccaggaccagcgctcagatccacctacttggaaacatagtgatctgggtttcgggcagcctcgctctggccatctacgccctgctgtccttgtggtacctgctccgacggcgaagaaatgtccatgacctccctcaggatgcctggctgcgctgggtgctggctggggcgctgtgtgccggtggctgggcagtgaactacctcccgttcttcctgatggagaagacactcttcctctaccactacctgcccgcactcaccttccaaatccttctgctccctgtggtcctgcagcacatcagcgaccacctgtgcaggtcccagctccagaggagcatcttcagcgccctggtggtggcctggtactcctccgcgtgccacgtgtccaacacgctgcgcccactcacctacggggacaagtcactctcgccacatgaactcaaggcccttcgctggaaagacagctgggacatcttgatccgaaaacactagaacaagagtgtggcaaagaacacccgtgctggggtcgggatgaggttgaagggtcttggtcaatgtacgtaatgagcagggtgggccccacgctgggaggacacgggctgggctgagcagggcctctagtggaacacatgggggtctcattgaaaagctctctgatgagcacctccttttgtgcaaagttaattttttctcgacaataaagatattccgtgtctttacccctgaactaagacacagggagtatttcagaggccagcgtaggagtcattgacaacaaaaagccgagaacccagggccagcagtggagcctcagcagaccagggcctggtccttgctaactgctgcagggtggagtttgatctggcagacccgatcctccttcatgaacacccagcaacctgagcaagtcccggccctgccctcagcgagcccggcaggcgtcctgggacagctcagtgttggagggccacctgaaccacgagccagggctggggcttgcatgtcattgtctatgacagcgtcaagactggcccttggcaccgtgctgtgtggaaaccctcccctctgagactccactgagacgtggctgagtgaaatcttcctcgtcagtggtcaaggtgtgtcatccatacagctccatgcctttgtcttttttaaatgtaattaaaaaaggaaccaactggcgtttgta

SEQ ID NO: 172001 - DNA, 3038 bp, Homo sapiens
  Payload ID: 13791
  Gene Symbol: POMT1
  Gene Name: protein-O-mannosyltransferase 1
  Uniprot ID: Q9Y6A1
  ENST ID: ENST00000402686
  CDS Start-End: 161-2338
gaacgttgagcagggcggtgggtggtgcggagtgccgagcggcctcacccccaaccgtcggcccagtcggacggttccgaggcgttgccgggagccgggcgcggctctgtgtggactcggagaaacgcggggcgtctgcctgagcccgcttttctacaagatgtggggatttttgaagcgccctgtagtggtgacggctgacatcaacttgagccttgtggccctgactgggatggggttactgagccggctgtggcgactcacctacccgcgggctgtggtttttgacgaagtatattatgggcagtacatctctttttacatgaaacaaatcttcttcttggatgacagtgggccgccatttggccacatggtgctggccttgggaggttatttaggaggattcgatggcaattttttgtggaacagaattggagcagaatacagtagcaacgtgcctgtgtggtccctgcgcctgctgccagcactcgcgggggccttgtcggtccccatggcctaccagatagtgttggagctccacttttctcattgtgccgccatgggagctgctctgttgatgcttatcgagaatgctctcatcactcagtcaaggctaatgcttttggaatcagtgttaatatttttcaatctattggccgtgttgtcctacctgaagttcttcaactgccaaaagcacagccctttttctctgagctggtggttctggctaacactgacaggggtcgcttgttcctgtgcagtgggcatcaagtacatgggtgtgttcacgtacgtgctcgtgctgggtgttgcagctgtccatgcctggcacctgcttggagaccagactttgtccaatgtctgtgtgttctgtcacttgctcgcccgagcagtggctttgctggtcatcccggtcgtcctgtacttactgttcttctacgtccacttgattctagtcttccgctctgggccccacgaccaaatcatgtccagtgccttccaggccagcttagagggaggactagctcggatcactcagggtcagccactggaggtggcctttgggtcccaggtcactctgaggaacgtctttgggaaacctgtgccctgctggcttcattcccaccaggacacctaccccatgatatatgagaacggccgaggcagctcccaccagcaacaggtgacctgttaccccttcaaagatgtcaataactggtggattgtaaaggatcccaggaggcaccagctggtggtgagcagccctccgagacctgtgaggcacggggacatggtgcagctggtccacggcatgaccacccgctccctgaacacgcatgatgttgcagcccccctgagcccccattcacaggaggtctcctgctacattgactataacatctccatgcccgcccagaacctctggagactggaaattgtgaacagaggatctgacacagacgtctggaagaccatcctctcagaggtccgctttgtgcacgtgaacacttccgctgtcttaaagctgagcggggctcacctccctgactgggggtatcggcaactggagatcgtcggggagaagctgtcccggggctaccacgggagcacggtgtggaacgtggaggagcaccgatacggcgcgagccaggagcagagggagcgggaacgggagctgcactcacctgcgcaggtggacgtcagcaggaacctcagcttcatggcgagattctcggagctgcagtggaggatgctggcgctgagaagtgatgactcggaacacaagtacagctccagcccactggagtgggtcaccctggacaccaatattgcctactggctgcaccccaggaccagcgctcagatccacctacttggaaacatagtgatctgggtttcgggcagcctcgctctggccatctacgccctgctgtccttgtggtacctgctccgacggcgaagaaatgtccatgacctccctcaggatgcctggctgcgctgggtgctggctggggcgctgtgtgccggtggctgggcagtgaactacctcccgttcttcctgatggagaagacactcttcctctaccactacctgcccgcactcaccttccaaatccttctgctccctgtggtcctgcagcacatcagcgaccacctgtgcaggtcccagctccagaggagcatcttcagcgccctggtggtggcctggtactcctccgcgtgccacgtgtccaacacgctgcgcccactcacctacggggacaagtcactctcgccacatgaactcaaggcccttcgctggaaagacagctgggacatcttgatccgaaaacactagaacaagagtgtggcaaagaacacccgtgctggggtcgggatgaggttgaagggtcttggtcaatgtacgtaatgagcagggtgggccccacgctgggaggacacgggctgggctgagcagggcctctagtggaacacatgggggtctcattgaaaagctctctgatgagcacctccttttgtgcaaagttaattttttctcgacaataaagatattccgtgtctttacccctgaactaagacacagggagtatttcagaggccagcgtaggagtcattgacaacaaaaagccgagaacccagggccagcagtggagcctcagcagaccagggcctggtccttgctaactgctgcagggtggagtttgatctggcagacccgatcctccttcatgaacacccagcaacctgagcaagtcccggccctgccctcagcgagcccggcaggcgtcctgggacagctcagtgttggagggccacctgaaccacgagccagggctggggcttgcatgtcattgtctatgacagcgtcaagactggcccttggcaccgtgctgtgtggaaaccctcccctctgagactccactgagacgtggctgagtgaaatcttcctcgtcagtggtcaaggtgtgtcatccatacagctccatgcctttgtcttttttaaatgtaattaaaaaaggaaccaactggcgtttgta

SEQ ID NO: 172002 - DNA, 812 bp, Homo sapiens
  Payload ID: 13791
  Gene Symbol: POMT1
  Gene Name: protein-O-mannosyltransferase 1
  ENST ID: ENST00000418774
  CDS Start-End: 386-812
cggtgggtggtgcggagtgccgagcggcctcacccccaaccgtcggcccagtcggacggttccgaggcgttgccgggagccgggcgcggctctgtgtggactcggagaaacgcgggtacatttggggacaccggggacgagagcccagcccggacttgggggagtccgtcagtgccggacgcgggtccctggcttgcggacgggctggggccgggggcgtccccgtctttccggagctgggggcggggttcgggcccgggcagatgcggcgttcgggcggccgagccccgaagtaagaactccgtggcgcgtgcagccctagggaggaagggcgtgctgcgggtgcagtctcaggggcgtctgcctgagcccgcttttctacaagatgtggggatttttgaagcgccctgtagtggtgacggctgacatcaacttgagccttgtggccctgactgggatggggttactgagccggctgtggcgactcacctacccgcgggctgtggtttttgacgaagtatattatgggcagtacatctctttttacatgaaacaaatcttcttcttggatgacagtgggccgccatttggccacatggtgctggccttgggaggttatttaggaggattcgatggcaattttttgtggaacagaattggagcagaatacagtagcaacgtgcctgtgtggtccctgcgcctgctgccagcactcgcgggggccttgtcggtccccatggcctaccagatagtgttggagctccacttttctcattgtgccgccatgggagctgctctgttgatgcttatcg

SEQ ID NO: 172003 - DNA, 1168 bp, Homo sapiens
  Payload ID: 13791
  Gene Symbol: POMT1
  Gene Name: protein-O-mannosyltransferase 1
  ENST ID: ENST00000441334
  CDS Start-End: 279-1168
gtctggccccgcaggctcggtgaatcgaacgttgagcagggcggtgggtggtgcggagtgccgagcggcctcacccccaaccgtcggcccagtcggacggttccgaggcgttgccgggagccgggcgcggctctgtgtggactcggagaaacgcgggttatttaggaggattcgatggcaattttttgtggaacagaattggagcagaatacagtagcaacgtgcctgtgtggtccctgcgcctgctgccagcactcgcgggggccttgtcggtccccatggcctaccagatagtgttggagctccacttttctcattgtgccgccatgggagctgctctgttgatgcttatcgagaatgctctcatcactcagtcaaggctaatgcttttggaatcagtgttaatatttttcaatctattggccgtgttgtcctacctgaagttcttcaactgccaaaagcacagccctttttctctgagctggtggttctggctaacactgacaggggtcgcttgttcctgtgcagtgggcatcaagtacatgggtgtgttcacgtacgtgctcgtgctgggtgttgcagctgtccatgcctggcacctgcttggagaccagactttgtccaatgtaggtgctgatgtccagtgctgcatgaggccggcctgtatggggcagatgcagatgtcacagggggtctgtgtgttctgtcacttgctcgcccgagcagtggctttgctggtcatcccggtcgtcctgtacttactgttcttctacgtccacttgattctagtcttccgctctgggccccacgaccaaatcatgtccagtgccttccaggccagcttagagggaggactagctcggatcactcagggtcagccactggaggtggcctttgggtcccaggtcactctgaggaacgtctttgggaaacctgtgccctgctggcttcattcccaccaggacacctaccccatgatatatgagaacggccgaggcagctcccaccagcaacaggtgacctgttaccccttcaaagatgtcaataactggtggattgtaaaggatcccaggaggcaccagctggtggtgagcagccctccgagacctgtgaggcacggggacatggtgcagctggtccacggcatgaccacccgctccctgaacac

SEQ ID NO: 172004 - DNA, 691 bp, Homo sapiens
  Payload ID: 13791
  Gene Symbol: POMT1
  Gene Name: protein-O-mannosyltransferase 1
  ENST ID: ENST00000430619
  CDS Start-End: 188-691
gtcggacggttccgaggcgttgccgggagccgggcgcggctctgtgtggactcggagaaacgcgggttatttaggaggattcgatggcaattttttgtggaacagaattggagcagaatacagtagcaacgtgcctgtgtggtccctgcgcctgctgccagcactcgcgggggccttgtcggtccccatggcctaccagatagtgttggagctccacttttctcattgtgccgccatgggagctgctctgttgatgcttatcgagaatgctctcatcactcagtcaaggctaatgcttttggaatcagtgttaatatttttcaatctattggccgtgttgtcctacctgaagttcttcaactgccaaaagcacagccctttttctctgagctggtggttctggctaacactgacaggggtcgcttgttcctgtgcagtgggcatcaagtacatgggtgtgttcacgtacgtgctcgtgctgggtgttgcagctgtccatgcctggcacctgcttggagaccagactttgtccaatgtctgtgtgttctgtcacttgctcgcccgagcagtggctttgctggtcatcccggtcgtcctgtacttactgttcttctacgtccacttgattctagtcttccgctctgggccccacgaccaaatcatgtccagtgccttccaggccagcttagag

SEQ ID NO: 172005 - DNA, 791 bp, Homo sapiens
  Payload ID: 13791
  Gene Symbol: POMT1
  Gene Name: protein-O-mannosyltransferase 1
  ENST ID: ENST00000448212
  CDS Start-End: 137-791
ccgagcggcctcacccccaaccgtcggcccagtcggacggttccgaggcgttgccgggagccgggcgcggctctgtgtggactcggagaaacgcggttttgacgaagtatattatgggcagtacatctctttttacatgaaacaaatcttcttcttggatgacagtgggccgccatttggccacatggtgctggccttgggaggttatttaggaggattcgatggcaattttttgtggaacagaattggagcagaatacagtagcaacgtgcctgtgtggtccctgcgcctgctgccagcactcgcgggggccttgtcggtccccatggcctaccagatagtgttggagctccacttttctcattgtgccgccatgggagctgctctgttgatgcttatcgagaatgctctcatcactcagtcaaggctaatgcttttggaatcagtgttaatatttttcaatctattggccgtgttgtcctacctgaagttcttcaactgccaaaagcacagccctttttctctgagctggtggttctggctaacactgacaggggtcgcttgttcctgtgcagtgggcatcaagtacatgggtgtgttcacgtacgtgctcgtgctgggtgttgcagctgtccatgcctggcacctgcttggagaccagactttgtccaatgtaggtgctgatgtccagtgctgcatgaggccggcctgtatggggcagatgcagatgtcacagggggtctgtgtgttctgtcacttgctcgcccgagcagtggctttgctggtcatcc

SEQ ID NO: 172006 - DNA, 3320 bp, Homo sapiens
  Payload ID: 13791
  Gene Symbol: POMT1
  Gene Name: protein-O-mannosyltransferase 1
  Uniprot ID: Q9Y6A1
  ENST ID: ENST00000423007
  CDS Start-End: 443-2620
acgcgcgctgctgcccgtctggccccgcaggctcggtgaatcgaacgttgagcagggcggtgggtggtgcggagtgccgagcggcctcacccccaaccgtcggcccagtcggacggttccgaggcgttgccgggagccgggcgcggctctgtgtggactcggagaaacgcgggtacatttggggacaccggggacgagagcccagcccggacttgggggagtccgtcagtgccggacgcgggtccctggcttgcggacgggctggggccgggggcgtccccgtctttccggagctgggggcggggttcgggcccgggcagatgcggcgttcgggcggccgagccccgaagtaagaactccgtggcgcgtgcagccctagggaggaagggcgtgctgcgggtgcagtctcaggggcgtctgcctgagcccgcttttctacaagatgtggggatttttgaagcgccctgtagtggtgacggctgacatcaacttgagccttgtggccctgactgggatggggttactgagccggctgtggcgactcacctacccgcgggctgtggtttttgacgaagtatattatgggcagtacatctctttttacatgaaacaaatcttcttcttggatgacagtgggccgccatttggccacatggtgctggccttgggaggttatttaggaggattcgatggcaattttttgtggaacagaattggagcagaatacagtagcaacgtgcctgtgtggtccctgcgcctgctgccagcactcgcgggggccttgtcggtccccatggcctaccagatagtgttggagctccacttttctcattgtgccgccatgggagctgctctgttgatgcttatcgagaatgctctcatcactcagtcaaggctaatgcttttggaatcagtgttaatatttttcaatctattggccgtgttgtcctacctgaagttcttcaactgccaaaagcacagccctttttctctgagctggtggttctggctaacactgacaggggtcgcttgttcctgtgcagtgggcatcaagtacatgggtgtgttcacgtacgtgctcgtgctgggtgttgcagctgtccatgcctggcacctgcttggagaccagactttgtccaatgtctgtgtgttctgtcacttgctcgcccgagcagtggctttgctggtcatcccggtcgtcctgtacttactgttcttctacgtccacttgattctagtcttccgctctgggccccacgaccaaatcatgtccagtgccttccaggccagcttagagggaggactagctcggatcactcagggtcagccactggaggtggcctttgggtcccaggtcactctgaggaacgtctttgggaaacctgtgccctgctggcttcattcccaccaggacacctaccccatgatatatgagaacggccgaggcagctcccaccagcaacaggtgacctgttaccccttcaaagatgtcaataactggtggattgtaaaggatcccaggaggcaccagctggtggtgagcagccctccgagacctgtgaggcacggggacatggtgcagctggtccacggcatgaccacccgctccctgaacacgcatgatgttgcagcccccctgagcccccattcacaggaggtctcctgctacattgactataacatctccatgcccgcccagaacctctggagactggaaattgtgaacagaggatctgacacagacgtctggaagaccatcctctcagaggtccgctttgtgcacgtgaacacttccgctgtcttaaagctgagcggggctcacctccctgactgggggtatcggcaactggagatcgtcggggagaagctgtcccggggctaccacgggagcacggtgtggaacgtggaggagcaccgatacggcgcgagccaggagcagagggagcgggaacgggagctgcactcacctgcgcaggtggacgtcagcaggaacctcagcttcatggcgagattctcggagctgcagtggaggatgctggcgctgagaagtgatgactcggaacacaagtacagctccagcccactggagtgggtcaccctggacaccaatattgcctactggctgcaccccaggaccagcgctcagatccacctacttggaaacatagtgatctgggtttcgggcagcctcgctctggccatctacgccctgctgtccttgtggtacctgctccgacggcgaagaaatgtccatgacctccctcaggatgcctggctgcgctgggtgctggctggggcgctgtgtgccggtggctgggcagtgaactacctcccgttcttcctgatggagaagacactcttcctctaccactacctgcccgcactcaccttccaaatccttctgctccctgtggtcctgcagcacatcagcgaccacctgtgcaggtcccagctccagaggagcatcttcagcgccctggtggtggcctggtactcctccgcgtgccacgtgtccaacacgctgcgcccactcacctacggggacaagtcactctcgccacatgaactcaaggcccttcgctggaaagacagctgggacatcttgatccgaaaacactagaacaagagtgtggcaaagaacacccgtgctggggtcgggatgaggttgaagggtcttggtcaatgtacgtaatgagcagggtgggccccacgctgggaggacacgggctgggctgagcagggcctctagtggaacacatgggggtctcattgaaaagctctctgatgagcacctccttttgtgcaaagttaattttttctcgacaataaagatattccgtgtctttacccctgaactaagacacagggagtatttcagaggccagcgtaggagtcattgacaacaaaaagccgagaacccagggccagcagtggagcctcagcagaccagggcctggtccttgctaactgctgcagggtggagtttgatctggcagacccgatcctccttcatgaacacccagcaacctgagcaagtcccggccctgccctcagcgagcccggcaggcgtcctgggacagctcagtgttggagggccacctgaaccacgagccagggctggggcttgcatgtcattgtctatgacagcgtcaagactggcccttggcaccgtgctgtgtggaaaccctcccctctgagactccactgagacgtggctgagtgaaatcttcctcgtcagtggtcaaggtgtgtcatccatacagctccatgcctttgtcttttttaaatgtaattaaaaaaggaaccaactggcgtttgta

SEQ ID NO: 172007 - DNA, 847 bp, Homo sapiens
  Payload ID: 13791
  Gene Symbol: POMT1
  Gene Name: protein-O-mannosyltransferase 1
  ENST ID: ENST00000415075
  CDS Start-End: 378-847
cggagtgccgagcggcctcacccccaaccgtcggcccagtcggacggttccgaggcgttgccgggagccgggcgcggctctgtgtggactcggagaaacgcggggcgtctgcctgagcccgcttttctacaagatgtggggatttttgaagcgccctgtagtggtgacggctgacatcaacttgagccttgtggccctgactgggatggggttactgagccggctgtggcgactcacctacccgcgggctgtggtgttatttaggaggattcgatggcaattttttgtggaacagaattggagcagaatacagtagcaacgtgcctgtgtggtccctgcgcctgctgccagcactcgcgggggccttgtcggtccccatggcctaccagatagtgttggagctccacttttctcattgtgccgccatgggagctgctctgttgatgcttatcgagaatgctctcatcactcagtcaaggctaatgcttttggaatcagtgttaatatttttcaatctattggccgtgttgtcctacctgaagttcttcaactgccaaaagcacagtcttccgctctgggccccacgaccaaatcatgtccagtgccttccaggccagcttagagggaggactagctcggatcactcagggtcagccactggaggtggcctttgggtcccaggtcactctgaggaacgtctttgggaaacctgtgccctgctggcttcattcccaccaggacacctaccccatgatgtaagatatgagaacggccgaggcagctcccaccagcaacaggtgacctgttaccccttcaaagatgtcaataactggtggattgtaaagga

SEQ ID NO: 172008 - DNA, 4876 bp, Homo sapiens
  Payload ID: 13792
  Gene Symbol: POMT2
  Gene Name: protein-O-mannosyltransferase 2
  Uniprot ID: Q9UKY4
  ENST ID: ENST00000261534
  CDS Start-End: 204-2456
tgcgcctcctgccgcctcctagcggcccgggccgcgaccacgctgcccgccccgccccgagcccggggccccgcgctccgctgcagtgaagggcgttgcatttcccggggtaccccgagctgccctcttgtgactccttggcggggcggctggtcagacaaagtgtgcctccgggccggagggcgacccagaggagggggaagatgccgccggccacgggcggaggcctggcagagtccgagctgcgtccccggaggggccgctgtggcccccaggctgctagggccgcaggccgggacgtggccgctgaggctgtggcgcgaagccccaaacggcctgcttggggctcacggcgcttcgaggcggtcggctggtgggccctgctggccttggtgacgctgctgtccttcgccacccgcttccaccgcttggacgagccgccgcacatctgttgggatgagactcactttggaaaaatgggaagttactatatcaaccgtacatttttctttgatgtgcacccgcccctgggaaagatgctgataggtcttgctggctacctgagtggatatgatggtacctttttgttccagaagcctggggataaatatgagcatcacagctacatgggaatgagaggattctgtgcattccttggctcctggctggtcccctttgcctacctcactgtactggatctgtccaagtccctctcggcagcactgctcacagctgccctcctcacctttgacacgggatgcctcactctgtcccagtacatcctccttgaccccatcctgatgttcttcatcatggctgccatgctgagcatggtcaagtacaactcttgcgccgacaggcccttctctgccccctggtggttctggctcagcctgactggcgttagtcttgctggtgctttaggggtcaagtttgttggcctctttatcatccttcaagtggggctgaacaccattgcagacctttggtacctgttcggagacctcagtctttcattggtgactgtgggaaaacacctgactgctcgtgtcctgtgcctcatagtgctgcccctggctctctatacagccacctttgctgttcacttcatggtgctgagtaaaagtggccctggtgacggtttcttcagttctgccttccaggcccggctttcagggaacaacctgcacaatgcttccatccctgaacacctggcctacggctctgtgatcactgtgaagaacctccggatggccatcggctatctgcactcccacaggcacctctaccccgagggcattggtgcccgtcagcagcaggtcaccacctatttgcacaaggactacaacaacctgtggattatcaagaaacataacacaaactcagatcccctagacccttccttcccagtggagtttgtaagacatggagacattattcgactagaacacaaagaaacttcccggaacttgcacagtcactatcatgaggcccccatgacccggaagcactatcaggtcaccggctatggcataaatggaacaggggactcaaatgatttctggcggattgaggtcgtaaacaggaaatttggaaaccggatcaaagtgctgagaagtcgaattcgcttcatccatttggtcacaggttgtgtcctgggctcctcgggaaaggttctgcccaagtggggctgggagcagttggaagttacttgcaccccatacctgaaagaaaccctcaactccatctggaatgtggaggaccatatcaatcccaagttgccaaacatcagcctggatgtgctacagcccagttttcctgagatcttgctggaatcccacatggtcatgatccgggggaacagtggcctcaaacccaaggacaatgagttcacgtccaaaccctggcactggcctatcaactatcagggcctacgcttctcaggggtcaatgacacagatttccgagtctatctgcttggcaacccggtggtttggtggctgaatctgttgagcatcgccctctacctcctctcagggagcatcattgctgtagccatgcagagaggggcacggctgccagcggaggttgcagggttgtcccaggtcctgcttcgaggaggcggccaggtcctgctcggctggacactccattacttcccgtttttcctgatgggccgggtcctctacttccaccactacttcccagccatgctcttctcaagcatgttgacaggcattctgtgggacaccctcctgcggctctgtgcctggggcttggcctcatggcccctggcgaggggcatacatgtggcgggaatcctgagcctgctcctgggaactgcctacagcttctacctcttccaccctctggcttacgggatggttggtcccctggcccaggacccccaaagtccaatggcaggactaaggtggctggactcatgggacttttgaggccactgcaaagattccagcctgggtccaggaacttcccaggagagccagctgggaagcagtactggaccatccggccatgaggaagctgcctaaggagcccgaagaattctgctgctcaccaggacccagctctgggagtgcagctggaatggaacccagcattggagagagccgggagagagccgcagctccgtccacagcaccacggagaggacagcgcctcttgggctgctccctcgtgcacagcgcaggggaggatgggtgccagagggtgggagtgggtgcgcgtgtgtgtatgtgagggcatgttgtccatatccctgtggaatacagaccgtgtaactggacagctgagtgtcataaactctaaaatagtccaggctatagtaatattttctggtatttttttctgttggatttctttggttttggtttgtaagatccatcaaaaattctcagacctctgagagggccttgagggcagagaatactgacctcaccttgggatgtcaccaaaggcagagcagatgggactgtcaaagttgtgctgccctccctcccacaaacaaatgaatccagcgtggaggaaggcgcgccgccccgagctggagggcctggctcccaccatgccccccagtggctgcaggtagctggacttcctgcctgtgacgcacagagagcagcggactccggagcgtcagcctgccttagcccttggttcctcgttttttgggattgtcacactgtgacactcgggaggaacgatgtcctatcctgggctgctcagtgttcccaggccctgtgtgccagaggccaggtctctccaagtgcatctagcctggcctggagggcaaggcagatgcattctcctggctgctgggagagcccatgggaaccttgcttagcgcccaaggtagatgagagacagggcagggaatctgcgtggtgctgggatgtggggactctggcctctccagactaatgttcctgtcacctgctgagctttcccagtgtcacttctgcagtcctcctctgctcacccctccctcactccgtgggcaattccctttctctctgtcactgcttcagcagtgaagacccatggcacctagaaatgcatgccagcttcctgcgtctaccactctgcagctcaaacaagaagctcagagctgccccttccacttcctccccaaaagggatgaagaaaaccctgtggtagaaccaaaccacccaaggccagcccttaagcctgcctccaccttcctggtgcatgacaaaatatttcttttgtctcagaggactttgatgcttcaatatttaatgatgaatccgccacactccattttccctcctctgaagctcccaacaactctgacagggtcagatctctttaaagcatcttcaggaggcggttgccacggagactggatattggtcccagggacaggctgtgctacctactgggtggtggggagggaagcttctggccatgcttgggcattcagaccaaccatcattaatgttaatagaggaaatgcagcaacgtcaaaagcaaggcaggttggttaattagatctggggcccgatgacctccctttcccactgctacagcccttttgacttcccccagcaggaagcgctgtctgtgcggctgagtctgggccacttgcttaattgcatttctggcagggaaggagaggagggatggagaagctctgctcgctgcttccacctcaccgtgtgtcctcccctcccctcccttcctctcctccccacaggcggaattgctttcttctgagccgggtgggctctcctgcagggagaatgcaggggtctgtgcttggctcttagcaaagcaggtggcccacagtgacctccaggaggtggctgattttcctttgtgccttcttatttctcagtaggaacttggaagggaagagctctgaaggagccagaggggcagccaccttgcatgagggtgaggaaggagaagcccagccagcctctacccatccctccctcccaattaggctgcactggggccgaacgcttccctgggctcccactgccttctaaggagccaaggagaattccctgcccactttctgttcctccatgcccaaactggcagatgcttctctgggagcaaggccacatgggctgatgcagctttgagtgctcaggttctgttttctggaagttgctggagaagggctgtcagggtgcttctatgaatatgggcttcagctgtagcacttggcagaaacgtgatgtgtcccacaaactgctggtggaggaagaagatgttcgtcagccaattcaacctccagccagcttcttgagcctatttggtttaaaaaaaaaaagtcttctaatcagaagccactgattttataataaataacacttgttttgaa

SEQ ID NO: 172009 - DNA, 948 bp, Homo sapiens
  Payload ID: 13792
  Gene Symbol: POMT2
  Gene Name: protein-O-mannosyltransferase 2
  Uniprot ID: Q9UKY4
  ENST ID: ENST00000556326
  CDS Start-End: 180-428
gcccgggccgcgaccacgctgcccgccccgccccgagcccggggccccgcgctccgctgcagtgaagggcgttgcatttcccggggtaccccgagctgccctcttgtgactccttggcggggcggctggtcagacaaagtgtgcctccgggccggagggcgacccagaggagggggaagatgccgccggccacgggcggaggcctggcagagtccgagctgcgtccccggaggggccgctgtggcccccaggctgctagggccgcaggccgggacgtggccgctgaggctgtggcgcgaagccccaaacggcctgcttggggctcacggcgcttcgaggcggtcggctggtgggccctgctggccttggtgacgctgctgtccttcgccacccgcttccaccgcttggacgagccgccgcacatctgatgctgataggtcttgctggctacctgagtggatatgatggtacctttttgttccagaagcctggggataaatatgagcatcacagctacatgggaatgagaggattctgtgcattccttggctcctggctggtcccctttgcctacctcactgtactggatctgtccaagtccctctcggcagcactgctcacagctgccctcctcacctttgacacgggatgcctcactctgtcccagtacatcctccttgaccccatcctgatgttcttcatcatggctgccatgctgagcatggtcaagtacaactcttgcgccgacaggcccttctctgccccctggtggttctggctcagcctgactggcgttagtcttgctggtgctttaggggtcaagtttgttggcctctttatcatccttcaagtggggctgaacaccattgcagacctttggtacctgttcggagacctcagtctttcattggtgactgtgggaaaacacctgactgctcgtgtcctgtg

SEQ ID NO: 172010 - DNA, 355 bp, Homo sapiens
  Payload ID: 13792
  Gene Symbol: POMT2
  Gene Name: protein-O-mannosyltransferase 2
  ENST ID: ENST00000557289
  CDS Start-End: 1-159
gatctgtccaagtccctctcggcagcactgctcacagctgccctcctcacctttggtgactgtgggaaaacacctgactgctcgtgtcctgtgcctcatagtgctgcccctggctctctatacagccacctttgctgttcacttcatggtgctgagtaaaagtggccctggtgacggtttcttcagttctgccttccaggcccggctttcagggaacaacctgcacaatgcttccatccctgaacacctggcctacggctctgtgatcactgtgaagaacctccggatggccatcggctatctgcactcccacaggcacctctaccccgagggcattggtgcccgtcagcagcag

SEQ ID NO: 172011 - DNA, 580 bp, Homo sapiens
  Payload ID: 13792
  Gene Symbol: POMT2
  Gene Name: protein-O-mannosyltransferase 2
  ENST ID: ENST00000556171
  CDS Start-End: 1-580
tgctacagcccagttttcctgagatcttgctggaatcccacatggtcatgatccgggggaacagtggcctcaaacccaaggacaatgagttcacgtccaaaccctggcactggcctatcaactatcagggcctacgcttctcaggggtcaatgacacagatttccgagtctatctgcttggcaacccggtggtttggtggctgaatctgttgagcatcgccctctacctcctctcagggagcatcattgctgtagccatgcagagaggggcacggctgccagcggaggttgcaggtcaggtcctctgggctctccctcccctgacctggcggcagcagggcacctgcacccctggggagggccggctgcctgctgatgggccatcctttgcgtttaccaccccacaccttcccttatcctttgcttttgaaaggaaaccaaggaaccatgagattaagaaacttgccccaggacatacagctaggttgtcccaggtcctgcttcgaggaggcggccaggtcctgctcggctggacactccattacttcccgtttttcctgatgggccgggtcctctactt

SEQ ID NO: 172012 - DNA, 575 bp, Homo sapiens
  Payload ID: 13792
  Gene Symbol: POMT2
  Gene Name: protein-O-mannosyltransferase 2
  ENST ID: ENST00000555710
  CDS Start-End: 1-228
cgcttctcaggggtcaatgacacagatttccgagtctatctgcttggcaacccggtggtttggtggctgaatctgttgagcatcgccctctacctcctctcagggagcatcattgctgtagccatgcagagaggggcacggctgccagcggaggttgcaggtcacacagcaaggaaggggcagagctggaccagagcctggaatctctgcccgctccttgtcttctgactgggctgtgctgcttgggcccagggttgtcccaggtcctgcttcgaggaggcggccaggtcctgctcggctggacactccattacttcccgtttttcctgatgggccgggtcctctacttccaccactacttcccagccatgctcttctcaagcatgttgacaggcattctgtgggacaccctcctgcggctctgtgcctggggcttggcctcatggcccctggcgaggggcatacatgtggcgggaatcctgagcctgctcctgggaactgcctacagcttctacctcttccaccctctggcttacgggatggttggtcccctggcccaggacccccaaagtcca

SEQ ID NO: 172013 - DNA, 693 bp, Homo sapiens
  Payload ID: 13792
  Gene Symbol: POMT2
  Gene Name: protein-O-mannosyltransferase 2
  ENST ID: ENST00000556394
  CDS Start-End: 1-308
tgttgagcatcgccctctacctcctctcagggagcatcattgctgtagccatgcagagaggggcacggctgccagcggaggttgcaggcattctgtgggacaccctcctgcggctctgtgcctggggcttggcctcatggcccctggcgaggggcatacatgtggcgggaatcctgagcctgctcctgggaactgcctacagcttctacctcttccaccctctggcttacgggatggttggtcccctggcccaggacccccaaagtccaatggcaggactaaggtggctggactcatgggacttttgaggccactgcaaagattccagcctgggtccaggaacttcccaggagagccagctgggaagcagtactggaccatccggccatgaggaagctgcctaaggagcccgaagaattctgctgctcaccaggacccagctctgggagtgcagctggaatggaacccagcattggagagagccgggagagagccgcagctccgtccacagcaccacggagaggacagcgcctcttgggctgctccctcgtgcacagcgcaggggaggatgggtgccagagggtgggagtgggtgcgcgtgtgtgtatgtgagggcatgttgtccatatccctgtggaatacagaccgtgtaactggacagctgagtgtcataaactctaaaatagtccaggc

SEQ ID NO: 172014 - DNA, 565 bp, Homo sapiens
  Payload ID: 13792
  Gene Symbol: POMT2
  Gene Name: protein-O-mannosyltransferase 2
  ENST ID: ENST00000554948
  CDS Start-End: 155-565
taggaggagggccacggtggaggggaacttgagaaggcagtacgcagacctcctctttgtcctggagggagacactgcctcttctctcaaagttgcttgctgcaaacacaaccatgagaaatggcccagttgggatgagactcactttggaaaaatgggaagttactatatcaaccgtacatttttctttgatgtgcacccgcccctgggaaagatgctgataggtcttgctggctacctgagtggatatgatggtacctttttgttccagaagcctggggataaatatgagcatcacagctacatgggaatgagaggattctgtgcattccttggctcctggctggtcccctttgcctacctcactgtactggatctgtccaagtccctctcggcagcactgctcacagctgccctcctcacctttgacacgggatgcctcactctgtcccagtacatcctccttgaccccatcctgatgttcttcatcatggctgccatgctgagcatggtcaagtacaactcttgcgccgacaggcccttctctgccccctggtggttctgg

SEQ ID NO: 172015 - DNA, 658 bp, Homo sapiens
  Payload ID: 13792
  Gene Symbol: POMT2
  Gene Name: protein-O-mannosyltransferase 2
  ENST ID: ENST00000602717
  CDS Start-End: 1-658
gtggtttggtggctgaatctgttgagcatcgccctctacctcctctcagggagcatcattgctgtagccatgcagagaggggcacggctgccagcggaggttgcagggttgtcccaggtcctgcttcgaggaggcggccaggtcctgctcggctggacactccattacttcccgtttttcctgatgggccgggtcctctacttccaccactacttcccagccatgctcttctcaagcatgttgacaggcattctgtgggacaccctcctgcggctctgtgcctggggcttggcctcatggcccctggcgaggggcatacatgtggcgggaatcctgagcctgctcctgggaactgcctacaggagcccgaagaattctgctgctcaccaggacccagctctgggagtgcagctggaatggaacccagcattggagagagccgggagagagccgcagctccgtccacagcaccacggagaggacagcgcctcttgggctgctccctcgtgcacagcgcaggggaggatgggtgccagagggtgggagtgggtgcgcgtgtgtgtatgtgagggcatgttgtccatatccctgtggaatacagaccgtgtaactggacagctgagtgtcataaactctaaaatagtccaggctatagtaa

SEQ ID NO: 172016 - DNA, 1424 bp, Homo sapiens
  Payload ID: 13793
  Gene Symbol: PRG2
  Gene Name: proteoglycan 2, bone marrow (natural killer cell activator, eosinophil granule major basic protein)
  Uniprot ID: P13727
  ENST ID: ENST00000311862
  CDS Start-End: 75-743
aggaagcaaagaaggacctgggctttgggaagatctaaagacccaggaaggtctctgggtgggataaagccaagatgaaactccccttacttctggctcttctatttggggcagtttctgctcttcatctaaggtctgagacttccacctttgagacccctttgggtgctaagacgctgcctgaggatgaggagacaccagagcaggagatggaggagaccccttgcagggagctggaggaagaggaggagtggggctctggaagtgaagatgcctccaagaaagatggggctgttgagtctatctcagtgccagatatggtggacaaaaaccttacgtgtcctgaggaagaggacacagtaaaagtggtgggcatccctgggtgccagacctgccgctacctcctggtgagaagtcttcagacgtttagtcaagcttggtttacttgccggaggtgctacaggggcaacctggtttccatccacaacttcaatattaattatcgaatccagtgttctgtcagcgcgctcaaccagggtcaagtctggattggaggcaggatcacaggctcgggtcgctgcagacgctttcagtgggttgacggcagccgctggaactttgcatactgggctgctcaccagccctggtcccgcggtggtcactgcgtggccctgtgtacccgaggaggccactggcgtcgagcccactgcctcagaagacttcctttcatctgttcctactgagctggtcccagccagcagttcagagctgccctctcctgggcagctgcctcccctcctctgcttgccatccctccctccacctccctgcaataaaatgggttttactgaaatggatttattttctcctctgatcgcggatccactctgcttagccctcattgaaacttcttccttatcatctctccccacaccacaactttcatagaagtgtcagaagctactactccttgaggaggaggatggagggtggagttgggtctatggagccttttggagatggaggaatgggctcagctagttctcttcatagaacacctgattactgggcacctgcatagtgctgccaggacctttcaaggttgtaggtagactcccaatggcccagtttgcatctctgtaaccaaaggccttttctctctctctctccaaccccagaactgtggttggttttatatgtaaggaagttaacatgtccctgggaacagtccacaacattcaggaatgaatgtataagtaccgcaatccccggcccctcaagtggaataaatctaacatgtattgggcaccatttcccagtggcctgctgtggtagttggccttattccatgcatttttatgggctgccttcccttcctcaactgcattctctgctccttcctactctctgcaactcccaaataa

SEQ ID NO: 172017 - DNA, 1367 bp, Homo sapiens
  Payload ID: 13793
  Gene Symbol: PRG2
  Gene Name: proteoglycan 2, bone marrow (natural killer cell activator, eosinophil granule major basic protein)
  Uniprot ID: P13727
  ENST ID: ENST00000525955
  CDS Start-End: 167-835
gctttgggaagatctaaagacccaggaaggtctctgggtgggtgagtgctttctctgctgtggtggagctggtgacagtttattctcccaggaggtccctggctgtggctgacagtttctggagggctggcaggcgtctacctgtggctttcaggataaagccaagatgaaactccccttacttctggctcttctatttggggcagtttctgctcttcatctaaggtctgagacttccacctttgagacccctttgggtgctaagacgctgcctgaggatgaggagacaccagagcaggagatggaggagaccccttgcagggagctggaggaagaggaggagtggggctctggaagtgaagatgcctccaagaaagatggggctgttgagtctatctcagtgccagatatggtggacaaaaaccttacgtgtcctgaggaagaggacacagtaaaagtggtgggcatccctgggtgccagacctgccgctacctcctggtgagaagtcttcagacgtttagtcaagcttggtttacttgccggaggtgctacaggggcaacctggtttccatccacaacttcaatattaattatcgaatccagtgttctgtcagcgcgctcaaccagggtcaagtctggattggaggcaggatcacaggctcgggtcgctgcagacgctttcagtgggttgacggcagccgctggaactttgcatactgggctgctcaccagccctggtcccgcggtggtcactgcgtggccctgtgtacccgaggaggccactggcgtcgagcccactgcctcagaagacttcctttcatctgttcctactgagctggtcccagccagcagttcagagctgccctctcctgggcagctgcctcccctcctctgcttgccatccctccctccacctccctgcaataaaatgggttttactgaaatggatttattttctcctctgatcgcggatccactctgcttagccctcattgaaacttcttccttatcatctctccccacaccacaactttcatagaagtgtcagaagctactactccttgaggaggaggatggagggtggagttgggtctatggagccttttggagatggaggaatgggctcagctagttctcttcatagaacacctgattactgggcacctgcatagtgctgccaggacctttcaaggttgtaggtagactcccaatggcccagtttgcatctctgtaaccaaaggccttttctctctctctctccaaccccagaactgtggttggttttatatgtaaggaagttaacatgtccctgggaacagtccacaacattcaggaatgaatgtataagtaccgcaatccccggccc

SEQ ID NO: 172018 - DNA, 1350 bp, Homo sapiens
  Payload ID: 13793
  Gene Symbol: PRG2
  Gene Name: proteoglycan 2, bone marrow (natural killer cell activator, eosinophil granule major basic protein)
  Uniprot ID: P13727
  ENST ID: ENST00000533605
  CDS Start-End: 55-690
ggctttgggaagatctaaagacccaggaaggtctctgggtgggataaagccaagatgaaactccccttacttctggctcttctatttggggcagtttctgctcttcatctaaggtctgagacttccacctttgagacccctttgggtgctaagacgctgcctgaggatgaggagacaccagagcaggagatggaggagaccccttgcagggagctggaggaagaggaggagtggggctctggaagtgaagatgcctccaagaaagatggggctgttgagtctatctcagtgccagatatggtggacaaaaaccttacgtgtcctgaggaagaggacacagtaaaagtggtgggcatccctgggtgccagacctgccgctacctcctgtttacttgccggaggtgctacaggggcaacctggtttccatccacaacttcaatattaattatcgaatccagtgttctgtcagcgcgctcaaccagggtcaagtctggattggaggcaggatcacaggctcgggtcgctgcagacgctttcagtgggttgacggcagccgctggaactttgcatactgggctgctcaccagccctggtcccgcggtggtcactgcgtggccctgtgtacccgaggaggccactggcgtcgagcccactgcctcagaagacttcctttcatctgttcctactgagctggtcccagccagcagttcagagctgccctctcctgggcagctgcctcccctcctctgcttgccatccctccctccacctccctgcaataaaatgggttttactgaaatggatttattttctcctctgatcgcggatccactctgcttagccctcattgaaacttcttccttatcatctctccccacaccacaactttcatagaagtgtcagaagctactactccttgaggaggaggatggagggtggagttgggtctatggagccttttggagatggaggaatgggctcagctagttctcttcatagaacacctgattactgggcacctgcatagtgctgccaggacctttcaaggttgtaggtagactcccaatggcccagtttgcatctctgtaaccaaaggccttttctctctctctctccaaccccagaactgtggttggttttatatgtaaggaagttaacatgtccctgggaacagtccacaacattcaggaatgaatgtataagtaccgcaatccccggcccctcaagtggaataaatctaacatgtattgggcaccatttcccagtggcctgctgtggtagttggccttattccatgcatttttatgggctgccttcccttcctcaactgcattctctgctccttccta

SEQ ID NO: 172019 - DNA, 869 bp, Homo sapiens
  Payload ID: 13794
  Gene Symbol: PRG3
  Gene Name: proteoglycan 3
  Uniprot ID: Q9Y2Y8
  ENST ID: ENST00000287143
  CDS Start-End: 111-788
agaggcactgagagtggaggtctcagactcttggaaggggctatactagacacacaaagacagccccaagaaggacggtggagtagtgtcctcgctaaaagacagtagatatgcaatgcctcttgctcctgccctttctcctgctgggaacagtttctgctcttcatctggagaatgatgccccccatctggagagcctagagacacaggcagacctaggccaggatctggatagttcaaaggagcaggagagagacttggctctgacggaggaggtgattcaggcagagggagaggaggtcaaggcttctgcctgtcaagacaactttgaggatgaggaagccatggagtcggacccagctgccttagacaaggacttccagtgccccagggaagaagacattgttgaagtgcagggaagtccaaggtgcaagatctgccgctacctattggtgcggactcctaaaacttttgcagaagctcagaatgtctgcagcagatgctacggaggcaaccttgtctctatccatgacttcaacttcaactatcgcattcagtgctgcactagcacagtcaaccaagcccaggtctggattggaggcaacctcaggggctggttcctgtggaagcggttttgctggactgatgggagccactggaattttgcttactggtccccagggcaacctgggaatgggcaaggctcctgtgtggccctatgcaccaaaggaggttattggcgacgagctcaatgcgacaagcaactgcccttcgtctgctccttctaagccagcggcacggagaccctgccagcagctccctcccgtcccccaacctctcctgctcataaatccagacttcccacagca

SEQ ID NO: 172020 - DNA, 2606 bp, Homo sapiens
  Payload ID: 13795
  Gene Symbol: PRG4
  Gene Name: proteoglycan 4
  ENST ID: ENST00000367482
  CDS Start-End: 46-2606
atctatcctttacggcaagggtacctacggtacctgaaaacaacgatggcatggaaaacacttcccatttacctgttgttgctgctgtctgttttcgtgattcagcaagtttcatctcaagagctttcctgtaaaggccgctgctttgagtccttcgagagagggagggagtgtgactgcgacgcccaatgtaagaagtatgacaagtgctgtcccgattatgagagtttctgtgcagaagtaaaagataacaagaagaacagaactaaaaagaaacctacccccaaaccaccagttgtagatgaagctggaagtggattggacaatggtgacttcaaggtcacaactcctgacacgtctaccacccaacacaataaagtcagcacatctcccaagatcacaacagcaaaaccaataaatcccagacccagtcttccacctaattctgatacatctaaagagacgtctttgacagtgaataaagagacaacagttgaaactaaagaaactactacaacaaataaacagacttcaactgatggaaaagagaagactacttccgctaaagagacacaaagtatagagaaaacatctgctaaagatttagcacccacatctaaagtgctggctaaacctacacccaaagctgaaactacaaccaaaggccctgctctcaccactcccaaggagcccacgcccaccactcccaaggagcctgcatctaccacacccaaagagcccacacctaccaccatcaagtctgcacccaccacccccaaggagcctgcacccaccaccaccaagtctgcacccaccactcccaaggagcctgcacccaccaccaccaaggagcctgcacccaccactcccaaggagcctgcacccaccaccaccaaggagcctgcacccaccaccaccaagtctgcacccaccactcccaaggagcctgcacccaccacccccaagaagcctgccccaactacccccaaggagcctgcacccaccactcccaaggagcctacacccaccactcccaaggagcctgcacccaccaccaaggagcctgcacccaccactcccaaagagcctgcacccactgcccccaagaagcctgccccaactacccccaaggagcctgcacccaccactcccaaggagcctgcacccaccaccaccaaggagccttcacccaccactcccaaggagcctgcacccaccaccaccaagtctgcacccaccactaccaaggagcctgcacccaccactaccaagtctgcacccaccactcccaaggagccttcacccaccaccaccaaggagcctgcacccaccactcccaaggagcctgcacccaccacccccaagaagcctgccccaactacccccaaggagcctgcacccaccactcccaaggaacctgcacccaccaccaccaagaagcctgcacccaccactcccaaagagcctgccccaactacccccaaggagactgcacccaccacccccaagaagctcacgcccaccacccccgagaagctcgcacccaccacccctgagaagcccgcacccaccacccctgaggagctcgcacccaccacccctgaggagcccacacccaccacccctgaggagcctgctcccaccactcccaaggcagcggctcccaacacccctaaggagcctgctccaactacccctaaggagcctgctccaactacccctaaggagcctgctccaactacccctaaggagactgctccaactacccctaaagggactgctccaactaccctcaaggaacctgcacccactactcccaagaagcctgcccccaaggagcttgcacccaccaccaccaaggagcccacatccaccacctctgacaagcccgctccaactacccctaaggggactgctccaactacccctaaggagcctgctccaactacccctaaggagcctgctccaactacccctaaggggactgctccaactaccctcaaggaacctgcacccactactcccaagaagcctgcccccaaggagcttgcacccaccaccaccaaggggcccacatccaccacctctgacaagcctgctccaactacacctaaggagactgctccaactacccccaaggagcctgcacccactacccccaagaagcctgctccaactactcctgagacacctcctccaaccacttcagaggtctctactccaactaccaccaaggagcctaccactatccacaaaagccctgatgaatcaactcctgagctttctgcagaacccacaccaaaagctcttgaaaacagtcccaaggaacctggtgtacctacaactaagactcctgcagcgactaaacctgaaatgactacaacagctaaagacaagacaacagaaagagacttacgtactacacctgaaactacaactgctgcacctaagatgacaaaagagacagcaactacaacagaaaaaactaccgaatccaaaataacagctacaaccacacaagtaacatctaccacaactcaagataccacaccattcaaaattactactcttaaaacaactactcttgcacccaaagtaactacaac

SEQ ID NO: 172021 - DNA, 4921 bp, Homo sapiens
  Payload ID: 13795
  Gene Symbol: PRG4
  Gene Name: proteoglycan 4
  Uniprot ID: Q92954
  ENST ID: ENST00000367483
  CDS Start-End: 46-4137
atctatcctttacggcaagggtacctacggtacctgaaaacaacgatggcatggaaaacacttcccatttacctgttgttgctgctgtctgttttcgtgattcagcaagtttcatctcaagagctttcctgtaaaggccgctgctttgagtccttcgagagagggagggagtgtgactgcgacgcccaatgtaagaagtatgacaagtgctgtcccgattatgagagtttctgtgcagaagtgcataatcccacatcaccaccatcttcaaagaaagcacctccaccttcaggagcatctcaaaccatcaaatcaacaaccaaacgttcacccaaaccaccaaacaagaagaagactaagaaagttatagaatcagaggaaataacagaagaacattctgtttctgaaaatcaagagtcctcctcctcctcctcctcttcctcttcttcttcaacaattcggaaaatcaagtcttccaaaaattcagctgctaatagagaattacagaagaaactcaaagtaaaagataacaagaagaacagaactaaaaagaaacctacccccaaaccaccagttgtagatgaagctggaagtggattggacaatggtgacttcaaggtcacaactcctgacacgtctaccacccaacacaataaagtcagcacatctcccaagatcacaacagcaaaaccaataaatcccagacccagtcttccacctaattctgatacatctaaagagacgtctttgacagtgaataaagagacaacagttgaaactaaagaaactactacaacaaataaacagacttcaactgatggaaaagagaagactacttccgctaaagagacacaaagtatagagaaaacatctgctaaagatttagcacccacatctaaagtgctggctaaacctacacccaaagctgaaactacaaccaaaggccctgctctcaccactcccaaggagcccacgcccaccactcccaaggagcctgcatctaccacacccaaagagcccacacctaccaccatcaagtctgcacccaccacccccaaggagcctgcacccaccaccaccaagtctgcacccaccactcccaaggagcctgcacccaccaccaccaaggagcctgcacccaccactcccaaggagcctgcacccaccaccaccaaggagcctgcacccaccaccaccaagtctgcacccaccactcccaaggagcctgcacccaccacccccaagaagcctgccccaactacccccaaggagcctgcacccaccactcccaaggagcctacacccaccactcccaaggagcctgcacccaccaccaaggagcctgcacccaccactcccaaagagcctgcacccactgcccccaagaagcctgccccaactacccccaaggagcctgcacccaccactcccaaggagcctgcacccaccaccaccaaggagccttcacccaccactcccaaggagcctgcacccaccaccaccaagtctgcacccaccactaccaaggagcctgcacccaccactaccaagtctgcacccaccactcccaaggagccttcacccaccaccaccaaggagcctgcacccaccactcccaaggagcctgcacccaccacccccaagaagcctgccccaactacccccaaggagcctgcacccaccactcccaaggaacctgcacccaccaccaccaagaagcctgcacccaccactcccaaagagcctgccccaactacccccaaggagactgcacccaccacccccaagaagctcacgcccaccacccccgagaagctcgcacccaccacccctgagaagcccgcacccaccacccctgaggagctcgcacccaccacccctgaggagcccacacccaccacccctgaggagcctgctcccaccactcccaaggcagcggctcccaacacccctaaggagcctgctccaactacccctaaggagcctgctccaactacccctaaggagcctgctccaactacccctaaggagactgctccaactacccctaaagggactgctccaactaccctcaaggaacctgcacccactactcccaagaagcctgcccccaaggagcttgcacccaccaccaccaaggagcccacatccaccacctctgacaagcccgctccaactacccctaaggggactgctccaactacccctaaggagcctgctccaactacccctaaggagcctgctccaactacccctaaggggactgctccaactaccctcaaggaacctgcacccactactcccaagaagcctgcccccaaggagcttgcacccaccaccaccaaggggcccacatccaccacctctgacaagcctgctccaactacacctaaggagactgctccaactacccccaaggagcctgcacccactacccccaagaagcctgctccaactactcctgagacacctcctccaaccacttcagaggtctctactccaactaccaccaaggagcctaccactatccacaaaagccctgatgaatcaactcctgagctttctgcagaacccacaccaaaagctcttgaaaacagtcccaaggaacctggtgtacctacaactaagactcctgcagcgactaaacctgaaatgactacaacagctaaagacaagacaacagaaagagacttacgtactacacctgaaactacaactgctgcacctaagatgacaaaagagacagcaactacaacagaaaaaactaccgaatccaaaataacagctacaaccacacaagtaacatctaccacaactcaagataccacaccattcaaaattactactcttaaaacaactactcttgcacccaaagtaactacaacaaaaaagacaattactaccactgagattatgaacaaacctgaagaaacagctaaaccaaaagacagagctactaattctaaagcgacaactcctaaacctcaaaagccaaccaaagcacccaaaaaacccacttctaccaaaaagccaaaaacaatgcctagagtgagaaaaccaaagacgacaccaactccccgcaagatgacatcaacaatgccagaattgaaccctacctcaagaatagcagaagccatgctccaaaccaccaccagacctaaccaaactccaaactccaaactagttgaagtaaatccaaagagtgaagatgcaggtggtgctgaaggagaaacacctcatatgcttctcaggccccatgtgttcatgcctgaagttactcccgacatggattacttaccgagagtacccaatcaaggcattatcatcaatcccatgctttccgatgagaccaatatatgcaatggtaagccagtagatggactgactactttgcgcaatgggacattagttgcattccgaggtcattatttctggatgctaagtccattcagtccaccatctccagctcgcagaattactgaagtttggggtattccttcccccattgatactgtttttactaggtgcaactgtgaaggaaaaactttcttctttaaggattctcagtactggcgttttaccaatgatataaaagatgcagggtaccccaaaccaattttcaaaggatttggaggactaactggacaaatagtggcagcgctttcaacagctaaatataagaactggcctgaatctgtgtattttttcaagagaggtggcagcattcagcagtatatttataaacaggaacctgtacagaagtgccctggaagaaggcctgctctaaattatccagtgtatggagaaacgacacaggttaggagacgtcgctttgaacgtgctataggaccttctcaaacacacaccatcagaattcaatattcacctgccagactggcttatcaagacaaaggtgtccttcataatgaagttaaagtgagtatactgtggagaggacttccaaatgtggttacctcagctatatcactgcccaacatcagaaaacctgacggctatgattactatgccttttctaaagatcaatactataacattgatgtgcctagtagaacagcaagagcaattactactcgttctgggcagaccttatccaaagtctggtacaactgtccttagactgatgagcaaaggaggagtcaactaatgaagaaatgaataataaattttgacactgaaaaacattttattaataaagaatattgacatgagtataccagtttatatataaaaatgtttttaaacttgacaatcattacactaaaacagatttgataatcttattcacagttgttattgtttacagaccatttaattaatatttcctctgtttattcctcctctccctcccattgcatggctcacacctgtaaaagaaaaaagaatcaaattgaatatatcttttaagaattcaaaactagtgtattcacttaccctagttcattataaaaaatatctaggcattgtggatataaaactgttgggtattctacaacttcaatggaaattattacaagcagattaatccctctttttgtgacacaagtacaatctaaaagttatattggaaaacatggaaatattaaaattttacacttttactagctaaaacataatcacaaagctttatcgtgttgtataaaaaaattaacaatataatggcaataggtagagatacaacaaatgaatataacactataacacttcatattttccaaatcttaatttggatttaaggaagaaatcaataaatataaaatataagcacatatttattatatatctaaggtatacaaatctgtctacatgaagtttacagattggtaaatatcacctgctcaacatgtaattatttaataaaactttggaacattaaaaaaataaattggaggcttaaggatta

SEQ ID NO: 172022 - DNA, 4765 bp, Homo sapiens
  Payload ID: 13795
  Gene Symbol: PRG4
  Gene Name: proteoglycan 4
  Uniprot ID: Q92954
  ENST ID: ENST00000367485
  CDS Start-End: 46-3981
atctatcctttacggcaagggtacctacggtacctgaaaacaacgatggcatggaaaacacttcccatttacctgttgttgctgctgtctgttttcgtgattcagcaagtttcatctcaagatttatcaagctgtgcagggagatgtggggaagggtattctagagatgccacctgcaactgtgattataactgtcaacactacatggagtgctgccctgatttcaagagagtctgcactgcggagctttcctgtaaaggccgctgctttgagtccttcgagagagggagggagtgtgactgcgacgcccaatgtaagaagtatgacaagtgctgtcccgattatgagagtttctgtgcagaagtaaaagataacaagaagaacagaactaaaaagaaacctacccccaaaccaccagttgtagatgaagctggaagtggattggacaatggtgacttcaaggtcacaactcctgacacgtctaccacccaacacaataaagtcagcacatctcccaagatcacaacagcaaaaccaataaatcccagacccagtcttccacctaattctgatacatctaaagagacgtctttgacagtgaataaagagacaacagttgaaactaaagaaactactacaacaaataaacagacttcaactgatggaaaagagaagactacttccgctaaagagacacaaagtatagagaaaacatctgctaaagatttagcacccacatctaaagtgctggctaaacctacacccaaagctgaaactacaaccaaaggccctgctctcaccactcccaaggagcccacgcccaccactcccaaggagcctgcatctaccacacccaaagagcccacacctaccaccatcaagtctgcacccaccacccccaaggagcctgcacccaccaccaccaagtctgcacccaccactcccaaggagcctgcacccaccaccaccaaggagcctgcacccaccactcccaaggagcctgcacccaccaccaccaaggagcctgcacccaccaccaccaagtctgcacccaccactcccaaggagcctgcacccaccacccccaagaagcctgccccaactacccccaaggagcctgcacccaccactcccaaggagcctacacccaccactcccaaggagcctgcacccaccaccaaggagcctgcacccaccactcccaaagagcctgcacccactgcccccaagaagcctgccccaactacccccaaggagcctgcacccaccactcccaaggagcctgcacccaccaccaccaaggagccttcacccaccactcccaaggagcctgcacccaccaccaccaagtctgcacccaccactaccaaggagcctgcacccaccactaccaagtctgcacccaccactcccaaggagccttcacccaccaccaccaaggagcctgcacccaccactcccaaggagcctgcacccaccacccccaagaagcctgccccaactacccccaaggagcctgcacccaccactcccaaggaacctgcacccaccaccaccaagaagcctgcacccaccactcccaaagagcctgccccaactacccccaaggagactgcacccaccacccccaagaagctcacgcccaccacccccgagaagctcgcacccaccacccctgagaagcccgcacccaccacccctgaggagctcgcacccaccacccctgaggagcccacacccaccacccctgaggagcctgctcccaccactcccaaggcagcggctcccaacacccctaaggagcctgctccaactacccctaaggagcctgctccaactacccctaaggagcctgctccaactacccctaaggagactgctccaactacccctaaagggactgctccaactaccctcaaggaacctgcacccactactcccaagaagcctgcccccaaggagcttgcacccaccaccaccaaggagcccacatccaccacctctgacaagcccgctccaactacccctaaggggactgctccaactacccctaaggagcctgctccaactacccctaaggagcctgctccaactacccctaaggggactgctccaactaccctcaaggaacctgcacccactactcccaagaagcctgcccccaaggagcttgcacccaccaccaccaaggggcccacatccaccacctctgacaagcctgctccaactacacctaaggagactgctccaactacccccaaggagcctgcacccactacccccaagaagcctgctccaactactcctgagacacctcctccaaccacttcagaggtctctactccaactaccaccaaggagcctaccactatccacaaaagccctgatgaatcaactcctgagctttctgcagaacccacaccaaaagctcttgaaaacagtcccaaggaacctggtgtacctacaactaagactcctgcagcgactaaacctgaaatgactacaacagctaaagacaagacaacagaaagagacttacgtactacacctgaaactacaactgctgcacctaagatgacaaaagagacagcaactacaacagaaaaaactaccgaatccaaaataacagctacaaccacacaagtaacatctaccacaactcaagataccacaccattcaaaattactactcttaaaacaactactcttgcacccaaagtaactacaacaaaaaagacaattactaccactgagattatgaacaaacctgaagaaacagctaaaccaaaagacagagctactaattctaaagcgacaactcctaaacctcaaaagccaaccaaagcacccaaaaaacccacttctaccaaaaagccaaaaacaatgcctagagtgagaaaaccaaagacgacaccaactccccgcaagatgacatcaacaatgccagaattgaaccctacctcaagaatagcagaagccatgctccaaaccaccaccagacctaaccaaactccaaactccaaactagttgaagtaaatccaaagagtgaagatgcaggtggtgctgaaggagaaacacctcatatgcttctcaggccccatgtgttcatgcctgaagttactcccgacatggattacttaccgagagtacccaatcaaggcattatcatcaatcccatgctttccgatgagaccaatatatgcaatggtaagccagtagatggactgactactttgcgcaatgggacattagttgcattccgaggtcattatttctggatgctaagtccattcagtccaccatctccagctcgcagaattactgaagtttggggtattccttcccccattgatactgtttttactaggtgcaactgtgaaggaaaaactttcttctttaaggattctcagtactggcgttttaccaatgatataaaagatgcagggtaccccaaaccaattttcaaaggatttggaggactaactggacaaatagtggcagcgctttcaacagctaaatataagaactggcctgaatctgtgtattttttcaagagaggtggcagcattcagcagtatatttataaacaggaacctgtacagaagtgccctggaagaaggcctgctctaaattatccagtgtatggagaaacgacacaggttaggagacgtcgctttgaacgtgctataggaccttctcaaacacacaccatcagaattcaatattcacctgccagactggcttatcaagacaaaggtgtccttcataatgaagttaaagtgagtatactgtggagaggacttccaaatgtggttacctcagctatatcactgcccaacatcagaaaacctgacggctatgattactatgccttttctaaagatcaatactataacattgatgtgcctagtagaacagcaagagcaattactactcgttctgggcagaccttatccaaagtctggtacaactgtccttagactgatgagcaaaggaggagtcaactaatgaagaaatgaataataaattttgacactgaaaaacattttattaataaagaatattgacatgagtataccagtttatatataaaaatgtttttaaacttgacaatcattacactaaaacagatttgataatcttattcacagttgttattgtttacagaccatttaattaatatttcctctgtttattcctcctctccctcccattgcatggctcacacctgtaaaagaaaaaagaatcaaattgaatatatcttttaagaattcaaaactagtgtattcacttaccctagttcattataaaaaatatctaggcattgtggatataaaactgttgggtattctacaacttcaatggaaattattacaagcagattaatccctctttttgtgacacaagtacaatctaaaagttatattggaaaacatggaaatattaaaattttacacttttactagctaaaacataatcacaaagctttatcgtgttgtataaaaaaattaacaatataatggcaataggtagagatacaacaaatgaatataacactataacacttcatattttccaaatcttaatttggatttaaggaagaaatcaataaatataaaatataagcacatatttattatatatctaaggtatacaaatctgtctacatgaagtttacagattggtaaatatcacctgctcaacatgtaattatttaataaaactttggaacattaaaaaaataaattggaggcttaaggatta

SEQ ID NO: 172023 - DNA, 5044 bp, Homo sapiens
  Payload ID: 13795
  Gene Symbol: PRG4
  Gene Name: proteoglycan 4
  Uniprot ID: Q92954
  ENST ID: ENST00000445192
  CDS Start-End: 46-4260
atctatcctttacggcaagggtacctacggtacctgaaaacaacgatggcatggaaaacacttcccatttacctgttgttgctgctgtctgttttcgtgattcagcaagtttcatctcaagatttatcaagctgtgcagggagatgtggggaagggtattctagagatgccacctgcaactgtgattataactgtcaacactacatggagtgctgccctgatttcaagagagtctgcactgcggagctttcctgtaaaggccgctgctttgagtccttcgagagagggagggagtgtgactgcgacgcccaatgtaagaagtatgacaagtgctgtcccgattatgagagtttctgtgcagaagtgcataatcccacatcaccaccatcttcaaagaaagcacctccaccttcaggagcatctcaaaccatcaaatcaacaaccaaacgttcacccaaaccaccaaacaagaagaagactaagaaagttatagaatcagaggaaataacagaagaacattctgtttctgaaaatcaagagtcctcctcctcctcctcctcttcctcttcttcttcaacaattcggaaaatcaagtcttccaaaaattcagctgctaatagagaattacagaagaaactcaaagtaaaagataacaagaagaacagaactaaaaagaaacctacccccaaaccaccagttgtagatgaagctggaagtggattggacaatggtgacttcaaggtcacaactcctgacacgtctaccacccaacacaataaagtcagcacatctcccaagatcacaacagcaaaaccaataaatcccagacccagtcttccacctaattctgatacatctaaagagacgtctttgacagtgaataaagagacaacagttgaaactaaagaaactactacaacaaataaacagacttcaactgatggaaaagagaagactacttccgctaaagagacacaaagtatagagaaaacatctgctaaagatttagcacccacatctaaagtgctggctaaacctacacccaaagctgaaactacaaccaaaggccctgctctcaccactcccaaggagcccacgcccaccactcccaaggagcctgcatctaccacacccaaagagcccacacctaccaccatcaagtctgcacccaccacccccaaggagcctgcacccaccaccaccaagtctgcacccaccactcccaaggagcctgcacccaccaccaccaaggagcctgcacccaccactcccaaggagcctgcacccaccaccaccaaggagcctgcacccaccaccaccaagtctgcacccaccactcccaaggagcctgcacccaccacccccaagaagcctgccccaactacccccaaggagcctgcacccaccactcccaaggagcctacacccaccactcccaaggagcctgcacccaccaccaaggagcctgcacccaccactcccaaagagcctgcacccactgcccccaagaagcctgccccaactacccccaaggagcctgcacccaccactcccaaggagcctgcacccaccaccaccaaggagccttcacccaccactcccaaggagcctgcacccaccaccaccaagtctgcacccaccactaccaaggagcctgcacccaccactaccaagtctgcacccaccactcccaaggagccttcacccaccaccaccaaggagcctgcacccaccactcccaaggagcctgcacccaccacccccaagaagcctgccccaactacccccaaggagcctgcacccaccactcccaaggaacctgcacccaccaccaccaagaagcctgcacccaccactcccaaagagcctgccccaactacccccaaggagactgcacccaccacccccaagaagctcacgcccaccacccccgagaagctcgcacccaccacccctgagaagcccgcacccaccacccctgaggagctcgcacccaccacccctgaggagcccacacccaccacccctgaggagcctgctcccaccactcccaaggcagcggctcccaacacccctaaggagcctgctccaactacccctaaggagcctgctccaactacccctaaggagcctgctccaactacccctaaggagactgctccaactacccctaaagggactgctccaactaccctcaaggaacctgcacccactactcccaagaagcctgcccccaaggagcttgcacccaccaccaccaaggagcccacatccaccacctctgacaagcccgctccaactacccctaaggggactgctccaactacccctaaggagcctgctccaactacccctaaggagcctgctccaactacccctaaggggactgctccaactaccctcaaggaacctgcacccactactcccaagaagcctgcccccaaggagcttgcacccaccaccaccaaggggcccacatccaccacctctgacaagcctgctccaactacacctaaggagactgctccaactacccccaaggagcctgcacccactacccccaagaagcctgctccaactactcctgagacacctcctccaaccacttcagaggtctctactccaactaccaccaaggagcctaccactatccacaaaagccctgatgaatcaactcctgagctttctgcagaacccacaccaaaagctcttgaaaacagtcccaaggaacctggtgtacctacaactaagactcctgcagcgactaaacctgaaatgactacaacagctaaagacaagacaacagaaagagacttacgtactacacctgaaactacaactgctgcacctaagatgacaaaagagacagcaactacaacagaaaaaactaccgaatccaaaataacagctacaaccacacaagtaacatctaccacaactcaagataccacaccattcaaaattactactcttaaaacaactactcttgcacccaaagtaactacaacaaaaaagacaattactaccactgagattatgaacaaacctgaagaaacagctaaaccaaaagacagagctactaattctaaagcgacaactcctaaacctcaaaagccaaccaaagcacccaaaaaacccacttctaccaaaaagccaaaaacaatgcctagagtgagaaaaccaaagacgacaccaactccccgcaagatgacatcaacaatgccagaattgaaccctacctcaagaatagcagaagccatgctccaaaccaccaccagacctaaccaaactccaaactccaaactagttgaagtaaatccaaagagtgaagatgcaggtggtgctgaaggagaaacacctcatatgcttctcaggccccatgtgttcatgcctgaagttactcccgacatggattacttaccgagagtacccaatcaaggcattatcatcaatcccatgctttccgatgagaccaatatatgcaatggtaagccagtagatggactgactactttgcgcaatgggacattagttgcattccgaggtcattatttctggatgctaagtccattcagtccaccatctccagctcgcagaattactgaagtttggggtattccttcccccattgatactgtttttactaggtgcaactgtgaaggaaaaactttcttctttaaggattctcagtactggcgttttaccaatgatataaaagatgcagggtaccccaaaccaattttcaaaggatttggaggactaactggacaaatagtggcagcgctttcaacagctaaatataagaactggcctgaatctgtgtattttttcaagagaggtggcagcattcagcagtatatttataaacaggaacctgtacagaagtgccctggaagaaggcctgctctaaattatccagtgtatggagaaacgacacaggttaggagacgtcgctttgaacgtgctataggaccttctcaaacacacaccatcagaattcaatattcacctgccagactggcttatcaagacaaaggtgtccttcataatgaagttaaagtgagtatactgtggagaggacttccaaatgtggttacctcagctatatcactgcccaacatcagaaaacctgacggctatgattactatgccttttctaaagatcaatactataacattgatgtgcctagtagaacagcaagagcaattactactcgttctgggcagaccttatccaaagtctggtacaactgtccttagactgatgagcaaaggaggagtcaactaatgaagaaatgaataataaattttgacactgaaaaacattttattaataaagaatattgacatgagtataccagtttatatataaaaatgtttttaaacttgacaatcattacactaaaacagatttgataatcttattcacagttgttattgtttacagaccatttaattaatatttcctctgtttattcctcctctccctcccattgcatggctcacacctgtaaaagaaaaaagaatcaaattgaatatatcttttaagaattcaaaactagtgtattcacttaccctagttcattataaaaaatatctaggcattgtggatataaaactgttgggtattctacaacttcaatggaaattattacaagcagattaatccctctttttgtgacacaagtacaatctaaaagttatattggaaaacatggaaatattaaaattttacacttttactagctaaaacataatcacaaagctttatcgtgttgtataaaaaaattaacaatataatggcaataggtagagatacaacaaatgaatataacactataacacttcatattttccaaatcttaatttggatttaaggaagaaatcaataaatataaaatataagcacatatttattatatatctaaggtatacaaatctgtctacatgaagtttacagattggtaaatatcacctgctcaacatgtaattatttaataaaactttggaacattaaaaaaataaattggaggcttaaggatta

SEQ ID NO: 172024 - DNA, 531 bp, Homo sapiens
  Payload ID: 13795
  Gene Symbol: PRG4
  Gene Name: proteoglycan 4
  ENST ID: ENST00000533951
  CDS Start-End: 46-531
atctatcctttacggcaagggtacctacggtacctgaaaacaacgatggcatggaaaacacttcccatttacctgttgttgctgctgtctgttttcgtgattcagcaagtttcatctcaagagctttcctgtaaaggccgctgctttgagtccttcgagagagggagggagtgtgactgcgacgcccaatgtaagaagtatgacaagtgctgtcccgattatgagagtttctgtgcagaagaacattctgtttctgaaaatcaagagtcctcctcctcctcctcctcttcctcttcttcttcaacaattcggaaaatcaagtcttccaaaaattcagctgctaatagagaattacagaagaaactcaaagtaaaagataacaagaagaacagaactaaaaagaaacctacccccaaaccaccagttgtagatgaagctggaagtggattggacaatggtgacttcaaggtcacaactcctgacacgtctaccacccaacacaataaagtcagcacatctcccaagatcaca

SEQ ID NO: 172025 - DNA, 4915 bp, Homo sapiens
  Payload ID: 13795
  Gene Symbol: PRG4
  Gene Name: proteoglycan 4
  ENST ID: ENST00000635041
  CDS Start-End: 46-4131
atctatcctttacggcaagggtacctacggtacctgaaaacaacgatggcatggaaaacacttcccatttacctgttgttgctgctgtctgttttcgtgattcagcaagtttcatctcaagatttatcaagctgtgcagggagatgtggggaagggtattctagagatgccacctgcaactgtgattataactgtcaacactacatggagtgctgccctgatttcaagagagtctgcactgcggagctttcctgtaaaggccgctgctttgagtccttcgagagagggagggagtgtgactgcgacgcccaatgtaagaagtatgacaagtgctgtcccgattatgagagtttctgtgcagaagtgcataatcccacatcaccaccatcttcaaagaaagcacctccaccttcaggagcatctcaaaccatcaaatcaacaaccaaacgttcacccaaaccaccaaacaagaagaagactaagaaagttatagaatcagaggaaataacagaagtaaaagataacaagaagaacagaactaaaaagaaacctacccccaaaccaccagttgtagatgaagctggaagtggattggacaatggtgacttcaaggtcacaactcctgacacgtctaccacccaacacaataaagtcagcacatctcccaagatcacaacagcaaaaccaataaatcccagacccagtcttccacctaattctgatacatctaaagagacgtctttgacagtgaataaagagacaacagttgaaactaaagaaactactacaacaaataaacagacttcaactgatggaaaagagaagactacttccgctaaagagacacaaagtatagagaaaacatctgctaaagatttagcacccacatctaaagtgctggctaaacctacacccaaagctgaaactacaaccaaaggccctgctctcaccactcccaaggagcccacgcccaccactcccaaggagcctgcatctaccacacccaaagagcccacacctaccaccatcaagtctgcacccaccacccccaaggagcctgcacccaccaccaccaagtctgcacccaccactcccaaggagcctgcacccaccaccaccaaggagcctgcacccaccactcccaaggagcctgcacccaccaccaccaaggagcctgcacccaccaccaccaagtctgcacccaccactcccaaggagcctgcacccaccacccccaagaagcctgccccaactacccccaaggagcctgcacccaccactcccaaggagcctacacccaccactcccaaggagcctgcacccaccaccaaggagcctgcacccaccactcccaaagagcctgcacccactgcccccaagaagcctgccccaactacccccaaggagcctgcacccaccactcccaaggagcctgcacccaccaccaccaaggagccttcacccaccactcccaaggagcctgcacccaccaccaccaagtctgcacccaccactaccaaggagcctgcacccaccactaccaagtctgcacccaccactcccaaggagccttcacccaccaccaccaaggagcctgcacccaccactcccaaggagcctgcacccaccacccccaagaagcctgccccaactacccccaaggagcctgcacccaccactcccaaggaacctgcacccaccaccaccaagaagcctgcacccaccactcccaaagagcctgccccaactacccccaaggagactgcacccaccacccccaagaagctcacgcccaccacccccgagaagctcgcacccaccacccctgagaagcccgcacccaccacccctgaggagctcgcacccaccacccctgaggagcccacacccaccacccctgaggagcctgctcccaccactcccaaggcagcggctcccaacacccctaaggagcctgctccaactacccctaaggagcctgctccaactacccctaaggagcctgctccaactacccctaaggagactgctccaactacccctaaagggactgctccaactaccctcaaggaacctgcacccactactcccaagaagcctgcccccaaggagcttgcacccaccaccaccaaggagcccacatccaccacctctgacaagcccgctccaactacccctaaggggactgctccaactacccctaaggagcctgctccaactacccctaaggagcctgctccaactacccctaaggggactgctccaactaccctcaaggaacctgcacccactactcccaagaagcctgcccccaaggagcttgcacccaccaccaccaaggggcccacatccaccacctctgacaagcctgctccaactacacctaaggagactgctccaactacccccaaggagcctgcacccactacccccaagaagcctgctccaactactcctgagacacctcctccaaccacttcagaggtctctactccaactaccaccaaggagcctaccactatccacaaaagccctgatgaatcaactcctgagctttctgcagaacccacaccaaaagctcttgaaaacagtcccaaggaacctggtgtacctacaactaagactcctgcagcgactaaacctgaaatgactacaacagctaaagacaagacaacagaaagagacttacgtactacacctgaaactacaactgctgcacctaagatgacaaaagagacagcaactacaacagaaaaaactaccgaatccaaaataacagctacaaccacacaagtaacatctaccacaactcaagataccacaccattcaaaattactactcttaaaacaactactcttgcacccaaagtaactacaacaaaaaagacaattactaccactgagattatgaacaaacctgaagaaacagctaaaccaaaagacagagctactaattctaaagcgacaactcctaaacctcaaaagccaaccaaagcacccaaaaaacccacttctaccaaaaagccaaaaacaatgcctagagtgagaaaaccaaagacgacaccaactccccgcaagatgacatcaacaatgccagaattgaaccctacctcaagaatagcagaagccatgctccaaaccaccaccagacctaaccaaactccaaactccaaactagttgaagtaaatccaaagagtgaagatgcaggtggtgctgaaggagaaacacctcatatgcttctcaggccccatgtgttcatgcctgaagttactcccgacatggattacttaccgagagtacccaatcaaggcattatcatcaatcccatgctttccgatgagaccaatatatgcaatggtaagccagtagatggactgactactttgcgcaatgggacattagttgcattccgaggtcattatttctggatgctaagtccattcagtccaccatctccagctcgcagaattactgaagtttggggtattccttcccccattgatactgtttttactaggtgcaactgtgaaggaaaaactttcttctttaaggattctcagtactggcgttttaccaatgatataaaagatgcagggtaccccaaaccaattttcaaaggatttggaggactaactggacaaatagtggcagcgctttcaacagctaaatataagaactggcctgaatctgtgtattttttcaagagaggtggcagcattcagcagtatatttataaacaggaacctgtacagaagtgccctggaagaaggcctgctctaaattatccagtgtatggagaaacgacacaggttaggagacgtcgctttgaacgtgctataggaccttctcaaacacacaccatcagaattcaatattcacctgccagactggcttatcaagacaaaggtgtccttcataatgaagttaaagtgagtatactgtggagaggacttccaaatgtggttacctcagctatatcactgcccaacatcagaaaacctgacggctatgattactatgccttttctaaagatcaatactataacattgatgtgcctagtagaacagcaagagcaattactactcgttctgggcagaccttatccaaagtctggtacaactgtccttagactgatgagcaaaggaggagtcaactaatgaagaaatgaataataaattttgacactgaaaaacattttattaataaagaatattgacatgagtataccagtttatatataaaaatgtttttaaacttgacaatcattacactaaaacagatttgataatcttattcacagttgttattgtttacagaccatttaattaatatttcctctgtttattcctcctctccctcccattgcatggctcacacctgtaaaagaaaaaagaatcaaattgaatatatcttttaagaattcaaaactagtgtattcacttaccctagttcattataaaaaatatctaggcattgtggatataaaactgttgggtattctacaacttcaatggaaattattacaagcagattaatccctctttttgtgacacaagtacaatctaaaagttatattggaaaacatggaaatattaaaattttacacttttactagctaaaacataatcacaaagctttatcgtgttgtataaaaaaattaacaatataatggcaataggtagagatacaacaaatgaatataacactataacacttcatattttccaaatcttaatttggatttaaggaagaaatcaataaatataaaatataagcacatatttattatatatctaaggtatacaaatctgtctacatgaagtttacagattggtaaatatcacctgctcaacatgtaattatttaataaaactttggaacattaaaaaaataaattggaggcttaaggatta

SEQ ID NO: 172026 - DNA, 608 bp, Homo sapiens
  Payload ID: 13796
  Gene Symbol: PLP1
  Gene Name: proteolipid protein 1
  ENST ID: ENST00000443502
  CDS Start-End: 274-608
agatgtctctgcagcaaagcgaaattccaggcaagccttagggaaaaaaggaaaaacaaagaaaatgaaacaattggcagtgaaaggcagaaagagaagatggagcccttagagaagggagtatccctgagagaagaggacaaagatactcagagagaaaaagtaaaagaccgaagaaggaggctggagagaccaggatccttccagctgaacaaagtcagccacaaagcagactagccagccggctacaattggagtcagagtcccaaagacatgggcttgttagagtgctgtgcaagatgtctggtaggggccccctttgcttccctggtggccactggattgtgtttctttggggtggcactgttctgtggctgtggacatgaagccctcactggcacagaaaagctaattgagacctatttctccaaaaactaccaagactatgagtatctcatcaatgtgatccatgccttccagtatgtcatctatggaactgcctctttcttcttcctttatggggccctcctgctggctgagggcttctacaccaccggcgcagtcaggcagatctttggcgactacaagaccaccatctgcggcaaggg

SEQ ID NO: 172027 - DNA, 587 bp, Homo sapiens
  Payload ID: 13796
  Gene Symbol: PLP1
  Gene Name: proteolipid protein 1
  ENST ID: ENST00000433491
  CDS Start-End: 286-587
acttcatggcttctcacgcttgtgctgcatatcccacaccaattagacccaaggatcagttggaagtttccaggacatcttcattttatttccaccctcaatccacatttccagatgtctctgcagcaaagcgaaattccaggagaagaggacaaagatactcagagagaaaaagtaaaagaccgaagaaggaggctggagagaccaggatccttccagctgaacaaagtcagccacaaagcagactagccagccggctacaattggagtcagagtcccaaagacatgggcttgttagagtgctgtgcaagatgtctggtaggggccccctttgcttccctggtggccactggattgtgtttctttggggtggcactgttctgtggctgtggacatgaagccctcactggcacagaaaagctaattgagacctatttctccaaaaactaccaagactatgagtatctcatcaatgtgatccatgccttccagtatgtcatctatggaactgcctctttcttcttcctttatggggccctcctgctggctgagggcttctacaccaccggcgcagtcaggcagatctt

SEQ ID NO: 172028 - DNA, 786 bp, Homo sapiens
  Payload ID: 13796
  Gene Symbol: PLP1
  Gene Name: proteolipid protein 1
  ENST ID: ENST00000434483
  CDS Start-End: 419-786
agtcttctatgccagggctaggaaagctgccttccaaaatttggtctgggaagacattatcctgggaatgagaagcaaagcctcagctctagaagcccaaataatagcagatgacccaggctttcactggcacccagtacaggcagcaggctgcaccaagaaggctggcagtgcctcttgaggaatcccttggcagtgcaggagcctagctggactcaagaatattttgccaagggcacccagcagaaccaatggaagcagaatcacagaaataggagaagaggacaaagatactcagagagaaaaagtaaaagaccgaagaaggaggctggagagaccaggatccttccagctgaacaaagtcagccacaaagcagactagccagccggctacaattggagtcagagtcccaaagacatgggcttgttagagtgctgtgcaagatgtctggtaggggccccctttgcttccctggtggccactggattgtgtttctttggggtggcactgttctgtggctgtggacatgaagccctcactggcacagaaaagctaattgagacctatttctccaaaaactaccaagactatgagtatctcatcaatgtgatccatgccttccagtatgtcatctatggaactgcctctttcttcttcctttatggggccctcctgctggctgagggcttctacaccaccggcgcagtcaggcagatctttggcgactacaagaccaccatctgcggcaagggcctgagcgcaacggtaacagggggccagaaggg

SEQ ID NO: 172029 - DNA, 580 bp, Homo sapiens
  Payload ID: 13796
  Gene Symbol: PLP1
  Gene Name: proteolipid protein 1
  ENST ID: ENST00000455268
  CDS Start-End: 172-580
aatcttgcctttctcccaccccaggaaggagaagaggacaaagatactcagagagaaaaagtaaaagaccgaagaaggaggctggagagaccaggatccttccagctgaacaaagtcagccacaaagcagactagccagccggctacaattggagtcagagtcccaaagacatgggcttgttagagtgctgtgcaagatgtctggtaggggccccctttgcttccctggtggccactggattgtgtttctttggggtggcactgttctgtggctgtggacatgaagccctcactggcacagaaaagctaattgagacctatttctccaaaaactaccaagactatgagtatctcatcaatgtgatccatgccttccagtatgtcatctatggaactgcctctttcttcttcctttatggggccctcctgctggctgagggcttctacaccaccggcgcagtcaggcagatctttggcgactacaagaccaccatctgcggcaagggcctgagcgcaacggtaacagggggccagaaggggaggggttccagaggccaacatcaagctcattctttggagc

SEQ ID NO: 172030 - DNA, 588 bp, Homo sapiens
  Payload ID: 13796
  Gene Symbol: PLP1
  Gene Name: proteolipid protein 1
  ENST ID: ENST00000422393
  CDS Start-End: 207-588
aaggcaaaatcacaggaaaagttccaggagaccataccttccttctccggagtcttccaacaggagaagaggacaaagatactcagagagaaaaagtaaaagaccgaagaaggaggctggagagaccaggatccttccagctgaacaaagtcagccacaaagcagactagccagccggctacaattggagtcagagtcccaaagacatgggcttgttagagtgctgtgcaagatgtctggtaggggccccctttgcttccctggtggccactggattgtgtttctttggggtggcactgttctgtggctgtggacatgaagccctcactggcacagaaaagctaattgagacctatttctccaaaaactaccaagactatgagtatctcatcaatgtgatccatgccttccagtatgtcatctatggaactgcctctttcttcttcctttatggggccctcctgctggctgagggcttctacaccaccggcgcagtcaggcagatctttggcgactacaagaccaccatctgcggcaagggcctgagcgcaacggtaacagggggccagaaggggaggggttccagag

SEQ ID NO: 172031 - DNA, 2896 bp, Homo sapiens
  Payload ID: 13796
  Gene Symbol: PLP1
  Gene Name: proteolipid protein 1
  Uniprot ID: P60201
  ENST ID: ENST00000619236
  CDS Start-End: 147-875
caggagaagaggacaaagatactcagagagaaaaagtaaaagaccgaagaaggaggctggagagaccaggatccttccagctgaacaaagtcagccacaaagcagactagccagccggctacaattggagtcagagtcccaaagacatgggcttgttagagtgctgtgcaagatgtctggtaggggccccctttgcttccctggtggccactggattgtgtttctttggggtggcactgttctgtggctgtggacatgaagccctcactggcacagaaaagctaattgagacctatttctccaaaaactaccaagactatgagtatctcatcaatgtgatccatgccttccagtatgtcatctatggaactgcctctttcttcttcctttatggggccctcctgctggctgagggcttctacaccaccggcgcagtcaggcagatctttggcgactacaagaccaccatctgcggcaagggcctgagcgcaacgtttgtgggcatcacctatgccctgaccgttgtgtggctcctggtgtttgcctgctctgctgtgcctgtgtacatttacttcaacacctggaccacctgccagtctattgccttccccagcaagacctctgccagtataggcagtctctgtgctgatgccagaatgtatggtgttctcccatggaatgctttccctggcaaggtttgtggctccaaccttctgtccatctgcaaaacagctgagttccaaatgaccttccacctgtttattgctgcatttgtgggggctgcagctacactggtttccctgctcaccttcatgattgctgccacttacaactttgccgtccttaaactcatgggccgaggcaccaagttctgatcccccgtagaaatccccctttctctaatagcgaggctctaaccacacagcctacaatgctgcgtctcccatcttaactctttgcctttgccaccaactggccctcttcttacttgatgagtgtaacaagaaaggagagtcttgcagtgattaaggtctctctttggactctcccctcttatgtacctcttttagtcattttgcttcatagctggttcctgctagaaatgggaaatgcctaagaagatgacttcccaactgcaagtcacaaaggaatggaggctctaattgaattttcaagcatctcctgaggatcagaaagtaatttcttctcaaagggtacttccactgatggaaacaaagtggaaggaaagatgctcaggtacagagaaggaatgtctttggtcctcttgccatctataggggccaaatatattctctttggtgtacaaaatggaattcattctggtctctctattaccactgaagatagaagaaaaaagaatgtcagaaaaacaataagagcgtttgcccaaatctgcctattgcagctgggagaagggggtcaaagcaaggatctttcacccacagaaagagagcactgaccccgatggcgatggactactgaagccctaactcagccaaccttacttacagcataagggagcgtagaatctgtgtagacgaagggggcatctggccttacacctcgttagggaagagaaacagggtgttgtcagcatcttctcactcccttctccttgataacagctaccatgacaaccctgtggtttccaaggagctgagaatagaaggaaactagcttacatgagaacagactggcctgaggagcagcagttgctggtggctaatggtgtaacctgagatggccctctggtagacacaggatagataactctttggatagcatgtctttttttctgttaattagttgtgtactctggcctctgtcatatcttcacaatggtgctcatttcatggggtattatccattcagtcatcgtaggtgatttgaaggtcttgatttgttttagaatgatgcacatttcatgtattccagtttgtttattacttatttggggttgcatcagaaatgtctggagaataattctttgattatgactgttttttaaactaggaaaattggacattaagcatcacaaatgatattaaaaattggctagttgaatctattgggattttctacaagtattctgcctttgcagaaacagatttggtgaatttgaatctcaatttgagtaatctgatcgttctttctagctaatggaaaatgattttacttagcaatgttatcttggtgtgttaagagttaggtttaacataaaggttattttctcctgatatagatcacataacagaatgcaccagtcatcagctattcagttggtaagcttccaggaaaaaggacaggcagaaagagtttgagacctgaatagctcccagatttcagtcttttcctgtttttgttaactttgggttaaaaaaaaaaaaagtctgattggttttaattgaaggaaagatttgtactacagttcttttgttgtaaagagttgtgttgttcttttcccccaaagtggtttcagcaatatttaaggagatgtaagagctttacaaaaagacacttgatacttgttttcaaaccagtatacaagataagcttccaggctgcatagaaggaggagagggaaaatgttttgtaagaaaccaatcaagataaaggacagtgaagtaatccgtaccttgtgttttgttttgatttaataacataacaaataaccaacccttccctgaaaacctcacatgcatacatacacatatatacacacacaaagagagttaatcaactgaaagtgtttccttcatttctgatatagaattgcaattttaacacacataaaggataaacttttagaaacttatcttacaaagtgtattttataaaattaaagaaaataaaattaagaatgttctcaatcaaa

SEQ ID NO: 172032 - DNA, 624 bp, Homo sapiens
  Payload ID: 13796
  Gene Symbol: PLP1
  Gene Name: proteolipid protein 1
  ENST ID: ENST00000494475
  CDS Start-End: 215-624
gggctctggaggacctgggaagataccctatgaggtctgtagggagccctcaggaaaggtctgctgacgaggagaagaggacaaagatactcagagagaaaaagtaaaagaccgaagaaggaggctggagagaccaggatccttccagctgaacaaagtcagccacaaagcagactagccagccggctacaattggagtcagagtcccaaagacatgggcttgttagagtgctgtgcaagatgtctggtaggggccccctttgcttccctggtggccactggattgtgtttctttggggtggcactgttctgtggctgtggacatgaagccctcactggcacagaaaagctaattgagacctatttctccaaaaactaccaagactatgagtatctcatcaatgtgatccatgccttccagtatgtcatctatggaactgcctctttcttcttcctttatggggccctcctgctggctgagggcttctacaccaccggcgcagtcaggcagatctttggcgactacaagaccaccatctgcggcaagggcctgagcgcaacggtaacagggggccagaaggggaggggttccagaggccaacatcaagctcattctttggagcg

SEQ ID NO: 172033 - DNA, 3132 bp, Homo sapiens
  Payload ID: 13796
  Gene Symbol: PLP1
  Gene Name: proteolipid protein 1
  Uniprot ID: P60201
  ENST ID: ENST00000612423
  CDS Start-End: 281-1114
atggcttctcacgcttgtgctgcatatcccacaccaattagacccaaggatcagttggaagtttccaggacatcttcattttatttccaccctcaatccacatttccagatgtctctgcagcaaagcgaaattccaggagaagaggacaaagatactcagagagaaaaagtaaaagaccgaagaaggaggctggagagaccaggatccttccagctgaacaaagtcagccacaaagcagactagccagccggctacaattggagtcagagtcccaaagacatgggcttgttagagtgctgtgcaagatgtctggtaggggccccctttgcttccctggtggccactggattgtgtttctttggggtggcactgttctgtggctgtggacatgaagccctcactggcacagaaaagctaattgagacctatttctccaaaaactaccaagactatgagtatctcatcaatgtgatccatgccttccagtatgtcatctatggaactgcctctttcttcttcctttatggggccctcctgctggctgagggcttctacaccaccggcgcagtcaggcagatctttggcgactacaagaccaccatctgcggcaagggcctgagcgcaacggtaacagggggccagaaggggaggggttccagaggccaacatcaagctcattctttggagcgggtgtgtcattgtttgggaaaatggctaggacatcccgacaagtttgtgggcatcacctatgccctgaccgttgtgtggctcctggtgtttgcctgctctgctgtgcctgtgtacatttacttcaacacctggaccacctgccagtctattgccttccccagcaagacctctgccagtataggcagtctctgtgctgatgccagaatgtatggtgttctcccatggaatgctttccctggcaaggtttgtggctccaaccttctgtccatctgcaaaacagctgagttccaaatgaccttccacctgtttattgctgcatttgtgggggctgcagctacactggtttccctgctcaccttcatgattgctgccacttacaactttgccgtccttaaactcatgggccgaggcaccaagttctgatcccccgtagaaatccccctttctctaatagcgaggctctaaccacacagcctacaatgctgcgtctcccatcttaactctttgcctttgccaccaactggccctcttcttacttgatgagtgtaacaagaaaggagagtcttgcagtgattaaggtctctctttggactctcccctcttatgtacctcttttagtcattttgcttcatagctggttcctgctagaaatgggaaatgcctaagaagatgacttcccaactgcaagtcacaaaggaatggaggctctaattgaattttcaagcatctcctgaggatcagaaagtaatttcttctcaaagggtacttccactgatggaaacaaagtggaaggaaagatgctcaggtacagagaaggaatgtctttggtcctcttgccatctataggggccaaatatattctctttggtgtacaaaatggaattcattctggtctctctattaccactgaagatagaagaaaaaagaatgtcagaaaaacaataagagcgtttgcccaaatctgcctattgcagctgggagaagggggtcaaagcaaggatctttcacccacagaaagagagcactgaccccgatggcgatggactactgaagccctaactcagccaaccttacttacagcataagggagcgtagaatctgtgtagacgaagggggcatctggccttacacctcgttagggaagagaaacagggtgttgtcagcatcttctcactcccttctccttgataacagctaccatgacaaccctgtggtttccaaggagctgagaatagaaggaaactagcttacatgagaacagactggcctgaggagcagcagttgctggtggctaatggtgtaacctgagatggccctctggtagacacaggatagataactctttggatagcatgtctttttttctgttaattagttgtgtactctggcctctgtcatatcttcacaatggtgctcatttcatggggtattatccattcagtcatcgtaggtgatttgaaggtcttgatttgttttagaatgatgcacatttcatgtattccagtttgtttattacttatttggggttgcatcagaaatgtctggagaataattctttgattatgactgttttttaaactaggaaaattggacattaagcatcacaaatgatattaaaaattggctagttgaatctattgggattttctacaagtattctgcctttgcagaaacagatttggtgaatttgaatctcaatttgagtaatctgatcgttctttctagctaatggaaaatgattttacttagcaatgttatcttggtgtgttaagagttaggtttaacataaaggttattttctcctgatatagatcacataacagaatgcaccagtcatcagctattcagttggtaagcttccaggaaaaaggacaggcagaaagagtttgagacctgaatagctcccagatttcagtcttttcctgtttttgttaactttgggttaaaaaaaaaaaaagtctgattggttttaattgaaggaaagatttgtactacagttcttttgttgtaaagagttgtgttgttcttttcccccaaagtggtttcagcaatatttaaggagatgtaagagctttacaaaaagacacttgatacttgttttcaaaccagtatacaagataagcttccaggctgcatagaaggaggagagggaaaatgttttgtaagaaaccaatcaagataaaggacagtgaagtaatccgtaccttgtgttttgttttgatttaataacataacaaataaccaacccttccctgaaaacctcacatgcatacatacacatatatacacacacaaagagagttaatcaactgaaagtgtttccttcatttctgatatagaattgcaattttaacacacataaaggataaacttttagaaacttatcttacaaagtgtattttataaaattaaagaaaataaaattaagaatgttctcaatc

SEQ ID NO: 172034 - DNA, 3001 bp, Homo sapiens
  Payload ID: 13796
  Gene Symbol: PLP1
  Gene Name: proteolipid protein 1
  Uniprot ID: P60201
  ENST ID: ENST00000621218
  CDS Start-End: 147-980
caggagaagaggacaaagatactcagagagaaaaagtaaaagaccgaagaaggaggctggagagaccaggatccttccagctgaacaaagtcagccacaaagcagactagccagccggctacaattggagtcagagtcccaaagacatgggcttgttagagtgctgtgcaagatgtctggtaggggccccctttgcttccctggtggccactggattgtgtttctttggggtggcactgttctgtggctgtggacatgaagccctcactggcacagaaaagctaattgagacctatttctccaaaaactaccaagactatgagtatctcatcaatgtgatccatgccttccagtatgtcatctatggaactgcctctttcttcttcctttatggggccctcctgctggctgagggcttctacaccaccggcgcagtcaggcagatctttggcgactacaagaccaccatctgcggcaagggcctgagcgcaacggtaacagggggccagaaggggaggggttccagaggccaacatcaagctcattctttggagcgggtgtgtcattgtttgggaaaatggctaggacatcccgacaagtttgtgggcatcacctatgccctgaccgttgtgtggctcctggtgtttgcctgctctgctgtgcctgtgtacatttacttcaacacctggaccacctgccagtctattgccttccccagcaagacctctgccagtataggcagtctctgtgctgatgccagaatgtatggtgttctcccatggaatgctttccctggcaaggtttgtggctccaaccttctgtccatctgcaaaacagctgagttccaaatgaccttccacctgtttattgctgcatttgtgggggctgcagctacactggtttccctgctcaccttcatgattgctgccacttacaactttgccgtccttaaactcatgggccgaggcaccaagttctgatcccccgtagaaatccccctttctctaatagcgaggctctaaccacacagcctacaatgctgcgtctcccatcttaactctttgcctttgccaccaactggccctcttcttacttgatgagtgtaacaagaaaggagagtcttgcagtgattaaggtctctctttggactctcccctcttatgtacctcttttagtcattttgcttcatagctggttcctgctagaaatgggaaatgcctaagaagatgacttcccaactgcaagtcacaaaggaatggaggctctaattgaattttcaagcatctcctgaggatcagaaagtaatttcttctcaaagggtacttccactgatggaaacaaagtggaaggaaagatgctcaggtacagagaaggaatgtctttggtcctcttgccatctataggggccaaatatattctctttggtgtacaaaatggaattcattctggtctctctattaccactgaagatagaagaaaaaagaatgtcagaaaaacaataagagcgtttgcccaaatctgcctattgcagctgggagaagggggtcaaagcaaggatctttcacccacagaaagagagcactgaccccgatggcgatggactactgaagccctaactcagccaaccttacttacagcataagggagcgtagaatctgtgtagacgaagggggcatctggccttacacctcgttagggaagagaaacagggtgttgtcagcatcttctcactcccttctccttgataacagctaccatgacaaccctgtggtttccaaggagctgagaatagaaggaaactagcttacatgagaacagactggcctgaggagcagcagttgctggtggctaatggtgtaacctgagatggccctctggtagacacaggatagataactctttggatagcatgtctttttttctgttaattagttgtgtactctggcctctgtcatatcttcacaatggtgctcatttcatggggtattatccattcagtcatcgtaggtgatttgaaggtcttgatttgttttagaatgatgcacatttcatgtattccagtttgtttattacttatttggggttgcatcagaaatgtctggagaataattctttgattatgactgttttttaaactaggaaaattggacattaagcatcacaaatgatattaaaaattggctagttgaatctattgggattttctacaagtattctgcctttgcagaaacagatttggtgaatttgaatctcaatttgagtaatctgatcgttctttctagctaatggaaaatgattttacttagcaatgttatcttggtgtgttaagagttaggtttaacataaaggttattttctcctgatatagatcacataacagaatgcaccagtcatcagctattcagttggtaagcttccaggaaaaaggacaggcagaaagagtttgagacctgaatagctcccagatttcagtcttttcctgtttttgttaactttgggttaaaaaaaaaaaaagtctgattggttttaattgaaggaaagatttgtactacagttcttttgttgtaaagagttgtgttgttcttttcccccaaagtggtttcagcaatatttaaggagatgtaagagctttacaaaaagacacttgatacttgttttcaaaccagtatacaagataagcttccaggctgcatagaaggaggagagggaaaatgttttgtaagaaaccaatcaagataaaggacagtgaagtaatccgtaccttgtgttttgttttgatttaataacataacaaataaccaacccttccctgaaaacctcacatgcatacatacacatatatacacacacaaagagagttaatcaactgaaagtgtttccttcatttctgatatagaattgcaattttaacacacataaaggataaacttttagaaacttatcttacaaagtgtattttataaaattaaagaaaataaaattaagaatgttctcaatcaaa

SEQ ID NO: 172035 - DNA, 620 bp, Homo sapiens
  Payload ID: 13797
  Gene Symbol: PLP2
  Gene Name: proteolipid protein 2 (colonic epithelium-enriched)
  Uniprot ID: Q04941
  ENST ID: ENST00000376322
  CDS Start-End: 76-513
ctgggtgtacagcgtcctcgaaaccacgagcaagtgagcagatcctccgaggcaccagggactccagcccatgccatggcggattctgagcgcctctcggctcctggctgctgggccgcctgcaccaacttctcgcgcactcgaaagggaatcctcctgtttgctgagattatattatgcctggtgatcctgatctgcttcagtgcctccacaccaggctactcctccctgtcggtgattgagatgatccttgctgctattttctttgttgtctacatgtgtgacctgcacaccaagataccattcatcaactggccctggagtgatttcttccgaaccctcatagcggcaatcctctacctgatcacctccattgttgtccttgttgagagaggaaaccactccaaaatcgtcgcaggggtaaaggccatgggagcagctctgaagcacagagcgaagggtttgaggagccagggaccatttctgcctttgcttctggcagaaatcgtgtgacccacagcaagtcacacttgtcctcagacatggaggaaagtctggcccaggacttggttttgcctcccaaggtcttcatttgctgtgaagggaagtcccttgtcaga

SEQ ID NO: 172036 - DNA, 1079 bp, Homo sapiens
  Payload ID: 13797
  Gene Symbol: PLP2
  Gene Name: proteolipid protein 2 (colonic epithelium-enriched)
  Uniprot ID: Q04941
  ENST ID: ENST00000376327
  CDS Start-End: 76-534
ctgggtgtacagcgtcctcgaaaccacgagcaagtgagcagatcctccgaggcaccagggactccagcccatgccatggcggattctgagcgcctctcggctcctggctgctgggccgcctgcaccaacttctcgcgcactcgaaagggaatcctcctgtttgctgagattatattatgcctggtgatcctgatctgcttcagtgcctccacaccaggctactcctccctgtcggtgattgagatgatccttgctgctattttctttgttgtctacatgtgtgacctgcacaccaagataccattcatcaactggccctggagtgatttcttccgaaccctcatagcggcaatcctctacctgatcacctccattgttgtccttgttgagagaggaaaccactccaaaatcgtcgcaggggtactgggcctaatcgctacgtgcctctttggctatgatgcctatgtcaccttccccgttcggcagccaagacatacagcagcccccactgaccccgcagatggcccggtgtaggcgaacttccctcatttctctctgcaatctgcaaataactcctccattgaaataactcctccccaccccaacaacaacattcccagcagaccaactcccaccccctctttgaggtaaaagtgcctttattgggagacttttgtcttccagcctgccaatcaaccctcctgggtgtggccaccatatgtgtgtgcctaggtcctccttctgcacgatccaataggagacaccagttctgactgaaccatgcccccacctaagtcacaaaatgagggaagtggggagttagatttcagagtccaggccctaggttgggacccactccaaataatctcctcggtgtgggtggtggttctatagagggataaatgaataataaacattgttaaaatatacgataatgaataaagtaatcctttcatcaaatgtgggtaaatttcaagcatcaggagggggaaatggagtggaaacagctggggcaaggaggcaaagaagccaggcctgttttacaacaaatattaaattacttcaataatacaaacgag

SEQ ID NO: 172037 - DNA, 1212 bp, Homo sapiens
  Payload ID: 13798
  Gene Symbol: PTMA
  Gene Name: prothymosin, alpha
  Uniprot ID: P06454
  ENST ID: ENST00000341369
  CDS Start-End: 192-527
cgcgtgagtcccccactggctgctctgaaaagccatctttgcattgttcctcatccgcctccttgctcgccgcagccgcctccgccgcgcgcctcctccgccgccgcggactccggcagctttatcgccagagtccctgaactctcgctttctttttaatcccctgcatcggatcaccggcgtgccccaccatgtcagacgcagccgtagacaccagctccgaaatcaccaccaaggacttaaaggagaagaaggaagttgtggaagaggcagaaaatggaagagacgcccctgctaacgggaatgctgagaatgaggaaaatggggagcaggaggctgacaatgaggtagacgaagaagaggaagaaggtggggaggaagaggaggaggaagaagaaggtgatggtgaggaagaggatggagatgaagatgaggaagctgagtcagctacgggcaagcgggcagctgaagatgatgaggatgacgatgtcgataccaagaagcagaagaccgacgaggatgactagacagcaaaaaaggaaaagttaaactaaaaaaaaaaaggccgccgtgacctattcaccctccacttcccgtctcagaatctaaacgtggtcaccttcgagtagagaggcccgcccgcccaccgtgggcagtgccacccgcagatgacacgcgctctccaccacccaacccaaaccatgagaatttgcaacaggggaggaaaaaagaaccaaaacttccaaggccctgctttttttcttaaaagtactttaaaaaggaaatttgtttgtattttttatttacattttatatttttgtacatattgttagggtcagccatttttaatgatctcggatgaccaaaccagccttcggagcgttctctgtcctacttctgactttacttgtggtgtgaccatgttcattataatctcaaaggagaaaaaaaaccttgtaaaaaaagcaaaaatgacaacagaaaaacaatcttattccgagcattccagtaacttttttgtgtatgtacttagctgtactataagtagttggtttgtatgagatggttaaaaaggccaaagataaaaggtttctttttttttccttttttgtctatgaagttgctgtttattttttttggcctgtttgatgtatgtgtgaaacaatgttgtccaacaataaacaggaattttattttgctgagttgttcta

SEQ ID NO: 172038 - DNA, 933 bp, Homo sapiens
  Payload ID: 13798
  Gene Symbol: PTMA
  Gene Name: prothymosin, alpha
  ENST ID: ENST00000409683
  CDS Start-End: 172-495
tgctctgaaaagccatctttgcattgttcctcatccgcctccttgctcgccgcagccgcctccgccgcgcgcctcctccgccgccgcggactccggcagctttatcgccagagtccctgaactctcgctttctttttaatcccctgcatcggatcaccggcgtgccccaccatgtcagacgcagccgtagacaccagctccgaaatcaccaccaaggacttaaaggagaagaaggaagttgtggaagaggcagaaaatggaagagacgcccctgctaacgggaatgctaatgaggaaaatggggagcaggaggctgacaatgaggtagacgaagaagaggaagaaggtggggaggaagaggaggaggaagaagaaggtgatgaggatggagatgaagatgaggaagctgagtcagctacgggcaagcgggcagctgaagatgatgaggatgacgatgtcgataccaagaagcagaagaccgacgaggatgactagacagcaaaaaaggaaaagttaaactaaaaaaaaaaaggccgccgtgacctattcaccctccacttcccgtctcagaatctaaacgtggtcaccttcgagtagagaggcccgcccgcccaccgtgggcagtgccacccgcagatgacacgcgctctccaccacccaacccaaaccatgagaatttgcaacaggggaggaaaaaagaaccaaaacttccaaggccctgctttttttcttaaaagtactttaaaaaggaaatttgtttgtattttttatttacattttatatttttgtacatattgttagggtcagccatttttaatgatctcggatgaccaaaccagccttcggagcgttctctgtcctacttctgactttacttgtggtgtgaccatgttcattataatctcaaaggagaaaaaaaaccttgtaaaaaa

SEQ ID NO: 172039 - DNA, 735 bp, Homo sapiens
  Payload ID: 13798
  Gene Symbol: PTMA
  Gene Name: prothymosin, alpha
  ENST ID: ENST00000409321
  CDS Start-End: 83-478
gggaccgctatgccgtgcggggcccgcgggctgtcccactcgagggctggagccggcatcgcgcatcgagtccgcttgatacatgaatccgtgtgtgcttgggacggtgcccgcttgtcgactgacttggccgacggacgccggacctgatgacgcagccgtagacaccagctccgaaatcaccaccaaggacttaaaggagaagaaggaagttgtggaagaggcagaaaatggaagagacgcccctgctaacgggaatgctaatgaggaaaatggggagcaggaggctgacaatgaggtagacgaagaagaggaagaaggtggggaggaagaggaggaggaagaagaaggtgatggtgaggaagaggatggagatgaagatgaggaagctgagtcagctacgggcaagcgggcagctgaagatgatgaggatgacgatgtcgataccaagaagcagaagaccgacgaggatgactagacagcaaaaaaggaaaagttaaactaaaaaaaaaaaggccgccgtgacctattcaccctccacttcccgtctcagaatctaaacgtggtcaccttcgagtagagaggcccgcccgcccaccgtgggcagtgccacccgcagatgacacgcgctctccaccacccaacccaaaccatgagaatttgcaacaggggaggaaaaaagaaccaaaacttccaaggccctgctttttttcttaaaagtactttaaaaaggaa

SEQ ID NO: 172040 - DNA, 1221 bp, Homo sapiens
  Payload ID: 13798
  Gene Symbol: PTMA
  Gene Name: prothymosin, alpha
  Uniprot ID: P06454
  ENST ID: ENST00000409115
  CDS Start-End: 199-531
ctggcgccgcgtgagtcccccactggctgctctgaaaagccatctttgcattgttcctcatccgcctccttgctcgccgcagccgcctccgccgcgcgcctcctccgccgccgcggactccggcagctttatcgccagagtccctgaactctcgctttctttttaatcccctgcatcggatcaccggcgtgccccaccatgtcagacgcagccgtagacaccagctccgaaatcaccaccaaggacttaaaggagaagaaggaagttgtggaagaggcagaaaatggaagagacgcccctgctaacgggaatgctaatgaggaaaatggggagcaggaggctgacaatgaggtagacgaagaagaggaagaaggtggggaggaagaggaggaggaagaagaaggtgatggtgaggaagaggatggagatgaagatgaggaagctgagtcagctacgggcaagcgggcagctgaagatgatgaggatgacgatgtcgataccaagaagcagaagaccgacgaggatgactagacagcaaaaaaggaaaagttaaactaaaaaaaaaaaggccgccgtgacctattcaccctccacttcccgtctcagaatctaaacgtggtcaccttcgagtagagaggcccgcccgcccaccgtgggcagtgccacccgcagatgacacgcgctctccaccacccaacccaaaccatgagaatttgcaacaggggaggaaaaaagaaccaaaacttccaaggccctgctttttttcttaaaagtactttaaaaaggaaatttgtttgtattttttatttacattttatatttttgtacatattgttagggtcagccatttttaatgatctcggatgaccaaaccagccttcggagcgttctctgtcctacttctgactttacttgtggtgtgaccatgttcattataatctcaaaggagaaaaaaaaccttgtaaaaaaagcaaaaatgacaacagaaaaacaatcttattccgagcattccagtaacttttttgtgtatgtacttagctgtactataagtagttggtttgtatgagatggttaaaaaggccaaagataaaaggtttctttttttttccttttttgtctatgaagttgctgtttattttttttggcctgtttgatgtatgtgtgaaacaatgttgtccaacaataaacaggaattttattttgctgagttgttctaacaaa

SEQ ID NO: 172041 - DNA, 814 bp, Homo sapiens
  Payload ID: 13798
  Gene Symbol: PTMA
  Gene Name: prothymosin, alpha
  ENST ID: ENST00000410064
  CDS Start-End: 399-809
agactgactggctctttcttaatatttcggccctcgtccgcgcccgtcgtgcccctgcagggattggcgcgagtcaccttggcgtctccttaacccttgtgtccctggcgtcatctctgactctcccaggggcgacttcttggcagagcggagctcggggcccggatctccacaggggctctcagtgaccccttctggactcagtccgggaatgagtttgtggggtgagaacaccgtccccagtgcggggcctggctgttcgattttctccgaagcaccaaaaggtgacttcccgcgagggcgatgagtagtagcccgagaggcgcatccccgacagtctcggacctacgcagcccggtggactttggggcgacctcccgtgggacttggcccgccgaatgcagacattcgggcctgccggggtggcggcagtggggcgtcgagtcgagagcccggccgaccgacgcgcgacccgcgcgcgtgccactgcaagctctgcctgccggccgggagtctccaaggacttaaaggagaagaaggaagttgtggaagaggcagaaaatggaagagacgcccctgctaacgggaatgctaatgaggaaaatggggagcaggaggctgacaatgaggtagacgaagaagaggaagaaggtggggaggaagaggaggaggaagaagaaggtgatggtgaggaagaggatggagatgaagatgaggaagctgagtcagctacgggcaagcgggcagctgaagatgatgaggatgacgatgtcgataccaagaagcagaagaccgacgaggatgactagacagc

SEQ ID NO: 172042 - DNA, 222 bp, Homo sapiens
  Payload ID: 13798
  Gene Symbol: PTMA
  Gene Name: prothymosin, alpha
  ENST ID: ENST00000440384
  CDS Start-End: 1-222
ggggcgggccggactgagagggccgacaggtggcccggagccgctcgccggacagcggccgaggggttcccgcaggcccggacgccggacctctgttggtattggtggccgtgtcgtgtggaaaaagttaccgggcgcccggggccgcgctgccttttggatcccgggcggagtcccacccccgaggacttaaaggagaagaaggaagttgtggaagaggca

SEQ ID NO: 172043 - DNA, 1108 bp, Homo sapiens
  Payload ID: 13798
  Gene Symbol: PTMA
  Gene Name: prothymosin, alpha
  ENST ID: ENST00000448874
  CDS Start-End: 137-268
gtcgcgacggcagtgaccgctcgggacagaccctaactagaaacctagaatgaggggaccgctatgccgtgcggggcccgcgggctgtcccactcgagggctggagccggcatcgcgcatcgagtccgcttgatacatgaatccgtgtgtgcttgggacggtgcccgcttgtcgactgacttggccgacggacgccggacctgatggacttaaaggagaagaaggaagttgtggaagaggcagaaaatggaagagacgcccctgctaacgggaatgctaatgaggaaaatggggagcaggaggctgacaatgaggtagacgaagaagaggaagaaggtggggaggaagaggaggaggaagaagaaggtgatggtgaggaagaggatggagatgaagatgaggaagctgagtcagctacgggcaagcgggcagctgaagatgatgaggatgacgatgtcgataccaagaagcagaagaccgacgaggatgactagacagcaaaaaaggaaaagttaaactaaaaaaaaaaaggccgccgtgacctattcaccctccacttcccgtctcagaatctaaacgtggtcaccttcgagtagagaggcccgcccgcccaccgtgggcagtgccacccgcagatgacacgcgctctccaccacccaacccaaaccatgagaatttgcaacaggggaggaaaaaagaaccaaaacttccaaggccctgctttttttcttaaaagtactttaaaaaggaaatttgtttgtattttttatttacattttatatttttgtacatattgttagggtcagccatttttaatgatctcggatgaccaaaccagccttcggagcgttctctgtcctacttctgactttacttgtggtgtgaccatgttcattataatctcaaaggagaaaaaaaaccttgtaaaaaaagcaaaaatgacaacagaaaaacaatcttattccgagcattccagtaacttttttgtgtatgtacttagctgtactataagtagttggtttgtatgagatggttaaaaaggccaaagataaaaggtttctttttttttccttttttgtctatgaagttgctgtttattttttttgg

SEQ ID NO: 172044 - DNA, 863 bp, Homo sapiens
  Payload ID: 13798
  Gene Symbol: PTMA
  Gene Name: prothymosin, alpha
  ENST ID: ENST00000412128
  CDS Start-End: 1-446
gctccccggggcttcggccgccagggggcgagagcgggcggagccggggtccgcggagcggagcggggcgggccggactgagagggccgacaggtggcccggagccgctcgccggacagcggccgaggggttcccgcaggcccggacgccggacctctgacttaaaggagaagaaggaagttgtggaagaggcagaaaatggaagagacgcccctgctaacgggaatgctaatgaggaaaatggggagcaggaggctgacaatgaggtagacgaagaagaggaagaaggtggggaggaagaggaggaggaagaagaaggtgatggtgaggaagaggatggagatgaagatgaggaagctgagtcagctacgggcaagcgggcagctgaagatgatgaggatgacgatgtcgataccaagaagcagaagaccgacgaggatgactagacagcaaaaaaggaaaagttaaactaaaaaaaaaaaggccgccgtgacctattcaccctccacttcccgtctcagaatctaaacgtggtcaccttcgagtagagaggcccgcccgcccaccgtgggcagtgccacccgcagatgacacgcgctctccaccacccaacccaaaccatgagaatttgcaacaggggaggaaaaaagaaccaaaacttccaaggccctgctttttttcttaaaagtactttaaaaaggaaatttgtttgtattttttatttacattttatatttttgtacatattgttagggtcagccatttttaatgatctcggatgaccaaaccagccttcggagcgttctctgtcctacttctgactttacttgtggtgtgaccatgttcattataatctcaaagga

SEQ ID NO: 172045 - DNA, 1096 bp, Homo sapiens
  Payload ID: 13798
  Gene Symbol: PTMA
  Gene Name: prothymosin, alpha
  ENST ID: ENST00000612829
  CDS Start-End: 1-408
atgcagacattcgggcctgccggggtggcggcagtggggcgtcgagtcgagagcccggccgaccgacgcgcgacccgcgcgcgtgcctgcaagctctgcctgccggccgggagtctccaaggacttaaaggagaagaaggaagtgtggaagaggcagaaaatggaagagacgcccctgctaacgggaatgctaatgaggaaaatggggagcaggaggctgacaatgaggtagacgaagaagaggaagaaggtggggaggaagaggaggaggaagaagaaggtgatggtgaggaagaggatggagatgaagatgaggaagctgagtcagctacgggcaagcgggcagctgaagatgatgaggatgacgatgtcgataccaagaagcagaagaccgacgaggatgactagacagcaaaaaaggaaaagttaaactaaaaaaaaaaaggccgccgtgacctattcaccctccacttcccgtctcagaatctaaacgtggtcaccttcgagtagagaggcccgcccgcccaccgtgggcagtgccacccgcagatgacacgcgctctccaccacccaacccaaaccatgagaatttgcaacaggggaggaaaaaagaaccaaaacttccaaggccctgctttttttcttaaaagtactttaaaaaggaaatttgtttgtattttttatttacattttatatttttgtacatattgttagggtcagccatttttaatgatctcggatgaccaaaccagccttcggagcgttctctgtcctacttctgactttacttgtggtgtgaccatgttcattataatctcaaaggagaaaaaaaaccttgtaaaaaaagcaaaaatgacaacagaaaaacaatcttattccgagcattccagtaacttttttgtgtatgtacttagctgtactataagtagttggtttgtatgagatggttaaaaaggccaaagataaaaggtttctttttttttccttttttgtctatgaagttgctgtttattttttttggcctgtttgatgtatgtgtgaaacaatgttgtccaacaataaacaggaattttattttgctgagttgttctaaca

SEQ ID NO: 172046 - DNA, 4793 bp, Homo sapiens
  Payload ID: 13799
  Gene Symbol: PCDH1
  Gene Name: protocadherin 1
  Uniprot ID: Q08174
  ENST ID: ENST00000287008
  CDS Start-End: 149-3862
acacactcggggagcgggagcgcggcgcggacgcaaagccgccgggctgctgcgcccagagccagccggagccggagccggagcccgaactgcagctccagccccagccgtgcggagccgcagcccaggccggggccggcggcggctcatggacagcggggcgggcggccggcgctgcccggaggcggccctcctgattctggggcctcccaggatggagcacctgaggcacagcccaggccctggggggcaacggctactgctgccctccatgctgctagcactgctgctcctgctggctccatccccaggccacgccactcgggtagtgtacaaggtgccggaggaacagccacccaacaccctcattgggagcctcgcagccgactatggttttccagatgtggggcacctgtacaagctagaggtgggtgccccgtaccttcgcgtggatggcaagacaggtgacattttcaccaccgagacctccatcgaccgtgaggggctccgtgaatgccagaaccagctccctggtgatccctgcatcctggagtttgaggtatctatcacagacctcgtgcagaatggcagcccccggctgctagagggccagatagaagtacaagacatcaatgacaacacacccaacttcgcctcaccagtcatcactctggccatccctgagaacaccaacatcggctcactcttccccatcccgctggcttcagaccgtgatgctggtcccaacggtgtggcatcctatgagctgcaggctgggcctgaggcccaggagctatttgggctgcaggtggcagaggaccaggaggagaagcaaccacagctcattgtgatgggcaacctggaccgtgagcgctgggactcctatgacctcaccatcaaggtgcaggatggcggcagccccccacgcgccagcagtgccctgctgcgtgtcaccgtgcttgacaccaatgacaacgcccccaagtttgagcggccctcctatgaggccgaactatctgagaatagccccataggccactcggtcatccaggtgaaggccaatgactcagaccaaggtgccaatgcagaaatcgaatacacattccaccaggcgcccgaagttgtgaggcgtcttcttcgactggacaggaacactggacttatcactgttcagggcccggtggaccgtgaggacctaagcaccctgcgcttctcagtgcttgctaaggaccgaggcaccaaccccaagagtgcccgtgcccaggtggttgtgaccgtgaaggacatgaatgacaatgcccccaccattgagatccggggcatagggctagtgactcatcaagatgggatggctaacatctcagaggatgtggcagaggagacagctgtggccctggtgcaggtgtctgaccgagatgagggagagaatgcagctgtcacctgtgtggtggcaggtgatgtgcccttccagctgcgccaggccagtgagacaggcagtgacagcaagaagaagtatttcctgcagactaccaccccgctagactacgagaaggtcaaagactacaccattgagattgtggctgtggactctggcaaccccccactctccagcactaactccctcaaggtgcaggtggtggacgtcaatgacaacgcacctgtcttcactcagagtgtcactgaggtcgccttcccggaaaacaacaagcctggtgaagtgattgctgagatcactgccagtgatgctgactctggctctaatgctgagctggtttactctctggagcctgagccggctgctaagggcctcttcaccatctcacccgagactggagagatccaggtgaagacatctctggatcgggaacagcgggagagctatgagttgaaggtggtggcagctgaccggggcagtcctagcctccagggcacagccactgtccttgtcaatgtgctggactgcaatgacaatgaccccaaatttatgctgagtggctacaacttctcagtgatggagaacatgccagcactgagtccagtgggcatggtgactgtcattgatggagacaagggggagaatgcccaggtgcagctctcagtggagcaggacaacggtgactttgttatccagaatggcacaggcaccatcctatccagcctgagctttgatcgagagcaacaaagcacctacaccttccagctgaaggcagtggatggtggcgtcccacctcgctcagcttacgttggtgtcaccatcaatgtgctggacgagaatgacaacgcaccctatatcactgccccttctaacacctctcacaagctgctgaccccccagacacgtcttggtgagacggtcagccaggtggcagccgaggactttgactctggtgtcaatgctgagctgatctacagcattgcaggtggcaacccttatggactcttccagattgggtcacattcaggtgccatcaccctggagaaggagattgagcggcgccaccatgggctacaccgcctggtggtgaaggtcagtgaccgcggcaagcccccacgctatggcacagccttggtccatctttatgtcaatgagactctggccaaccgcacgctgctggagaccctcctgggccacagcctggacacgccgctggatattgacattgctggggatccagaatatgagcgctccaagcagcgtggcaacattctctttggtgtggtggctggtgtggtggccgtggccttgctcatcgccctggcggttcttgtgcgctactgcagacagcgggaggccaaaagtggttaccaggctggtaagaaggagaccaaggacctgtatgcccccaagcccagtggcaaggcctccaagggaaacaaaagcaaaggcaagaagagcaagtccccaaagcccgtgaagccagtggaggacgaggatgaggccgggctgcagaagtccctcaagttcaacctgatgagcgatgcccctggggacagtccccgcatccacctgcccctcaactacccaccaggcagccctgacctgggccgccactatcgctctaactccccactgccttccatccagctgcagccccagtcaccctcagcctccaagaagcaccaggtggtacaggacctgccacctgcaaacacattcgtgggcaccggggacaccacgtccacgggctctgagcagtactccgactacagctaccgcaccaacccccccaaataccccagcaagcagttacctcaccgccgcgtcaccttctcggccaccagccaggcccaggagctgcaggacccatcccagcacagttactatgacagtggcctggaggagtctgagacgccgtccagcaagtcatcctcagggcctcgactcggtcccctggccctgcctgaggatcactatgagcgcaccacccctgatggcagcataggagagatggagcaccccgagaatgaccttcgccctttgcctgatgtcgccatgacaggcacatgtacccgggagtgcagtgagtttggccactctgacacatgctggatgcctggccagtcatctcccagccgccggaccaagagcagcgccctcaaactctccaccttcgtgccttaccaggaccgaggagggcaggagcctgcgggcgccggcagccccagccccccggaagaccggaacaccaaaacggcccccgtgcgcctcctgccctcctacagtgccttctcccacagtagccatgattcctgcaaggactcggccaccttggaggaaatccccctgacccagacctcggacttcccacccgcagccacaccggcatctgcccagacggccaagcgcgagatctacctgtgagccccctactggccggccggcccccctcccccagccgccggccagctcccaaatggcccattccagggcctcactctccaccccttcagcgtggacttcctggccagggccccaagtgggggtatcactgacctcatgaccacgctggcccttctcccatgcagggtccaggtcctctcccctcatttccatctcccagcccccaggggccccttcccctttatggggcttcccccatctgatgcccaagagggctcctctgcaatgactgggctccttcccttgacttccagggagcaccccctcgatttgggcagatggtggagtcaagggtgggcagcgtacttctaactcattgtttccctcatggccgaccagggcggggatagcatgcccaattttagccctgaagcagggctgaactggggagcccctttccctgggagctcccagaggaaactcttgaccaccagtggctccctgaagggcttttgttaccaaaggtggggtagggacgggggtgggagtggagcggaggccttgttttcccgtgctgctcctggactggcccacctgcctgccacatgcccacgcctagtcccatctgggcccccattccctgctggtcatgcagtgtctgtatataaggaccttggaatgacgtccccatttctgcctgatttgcaacttttcttgttgatgtcgtgttgtcttgggggacccctctggggggggacctgccctgtgccccctcctccctgccgcagtgccccccaacccaggcctctattgttccatgttgtaaatacccctggggccatggtgggatgggggtgcaggccagggaaacaacgggtgggtgggggtggggacgggggtaacatttgcctatcagcagagctgggcttttatttaatttttcttaaaaata

SEQ ID NO: 172047 - DNA, 3827 bp, Homo sapiens
  Payload ID: 13799
  Gene Symbol: PCDH1
  Gene Name: protocadherin 1
  Uniprot ID: Q08174
  ENST ID: ENST00000394536
  CDS Start-End: 149-3331
acacactcggggagcgggagcgcggcgcggacgcaaagccgccgggctgctgcgcccagagccagccggagccggagccggagcccgaactgcagctccagccccagccgtgcggagccgcagcccaggccggggccggcggcggctcatggacagcggggcgggcggccggcgctgcccggaggcggccctcctgattctggggcctcccaggatggagcacctgaggcacagcccaggccctggggggcaacggctactgctgccctccatgctgctagcactgctgctcctgctggctccatccccaggccacgccactcgggtagtgtacaaggtgccggaggaacagccacccaacaccctcattgggagcctcgcagccgactatggttttccagatgtggggcacctgtacaagctagaggtgggtgccccgtaccttcgcgtggatggcaagacaggtgacattttcaccaccgagacctccatcgaccgtgaggggctccgtgaatgccagaaccagctccctggtgatccctgcatcctggagtttgaggtatctatcacagacctcgtgcagaatggcagcccccggctgctagagggccagatagaagtacaagacatcaatgacaacacacccaacttcgcctcaccagtcatcactctggccatccctgagaacaccaacatcggctcactcttccccatcccgctggcttcagaccgtgatgctggtcccaacggtgtggcatcctatgagctgcaggctgggcctgaggcccaggagctatttgggctgcaggtggcagaggaccaggaggagaagcaaccacagctcattgtgatgggcaacctggaccgtgagcgctgggactcctatgacctcaccatcaaggtgcaggatggcggcagccccccacgcgccagcagtgccctgctgcgtgtcaccgtgcttgacaccaatgacaacgcccccaagtttgagcggccctcctatgaggccgaactatctgagaatagccccataggccactcggtcatccaggtgaaggccaatgactcagaccaaggtgccaatgcagaaatcgaatacacattccaccaggcgcccgaagttgtgaggcgtcttcttcgactggacaggaacactggacttatcactgttcagggcccggtggaccgtgaggacctaagcaccctgcgcttctcagtgcttgctaaggaccgaggcaccaaccccaagagtgcccgtgcccaggtggttgtgaccgtgaaggacatgaatgacaatgcccccaccattgagatccggggcatagggctagtgactcatcaagatgggatggctaacatctcagaggatgtggcagaggagacagctgtggccctggtgcaggtgtctgaccgagatgagggagagaatgcagctgtcacctgtgtggtggcaggtgatgtgcccttccagctgcgccaggccagtgagacaggcagtgacagcaagaagaagtatttcctgcagactaccaccccgctagactacgagaaggtcaaagactacaccattgagattgtggctgtggactctggcaaccccccactctccagcactaactccctcaaggtgcaggtggtggacgtcaatgacaacgcacctgtcttcactcagagtgtcactgaggtcgccttcccggaaaacaacaagcctggtgaagtgattgctgagatcactgccagtgatgctgactctggctctaatgctgagctggtttactctctggagcctgagccggctgctaagggcctcttcaccatctcacccgagactggagagatccaggtgaagacatctctggatcgggaacagcgggagagctatgagttgaaggtggtggcagctgaccggggcagtcctagcctccagggcacagccactgtccttgtcaatgtgctggactgcaatgacaatgaccccaaatttatgctgagtggctacaacttctcagtgatggagaacatgccagcactgagtccagtgggcatggtgactgtcattgatggagacaagggggagaatgcccaggtgcagctctcagtggagcaggacaacggtgactttgttatccagaatggcacaggcaccatcctatccagcctgagctttgatcgagagcaacaaagcacctacaccttccagctgaaggcagtggatggtggcgtcccacctcgctcagcttacgttggtgtcaccatcaatgtgctggacgagaatgacaacgcaccctatatcactgccccttctaacacctctcacaagctgctgaccccccagacacgtcttggtgagacggtcagccaggtggcagccgaggactttgactctggtgtcaatgctgagctgatctacagcattgcaggtggcaacccttatggactcttccagattgggtcacattcaggtgccatcaccctggagaaggagattgagcggcgccaccatgggctacaccgcctggtggtgaaggtcagtgaccgcggcaagcccccacgctatggcacagccttggtccatctttatgtcaatgagactctggccaaccgcacgctgctggagaccctcctgggccacagcctggacacgccgctggatattgacattgctggggatccagaatatgagcgctccaagcagcgtggcaacattctctttggtgtggtggctggtgtggtggccgtggccttgctcatcgccctggcggttcttgtgcgctactgcagacagcgggaggccaaaagtggttaccaggctggtaagaaggagaccaaggacctgtatgcccccaagcccagtggcaaggcctccaagggaaacaaaagcaaaggcaagaagagcaagtccccaaagcccgtgaagccagtggaggacgaggatgaggccgggctgcagaagtccctcaagttcaacctgatgagcgatgcccctggggacagtccccgcatccacctgcccctcaactacccaccaggcagccctgacctgggccgccactatcgctctaactccccactgccttccatccagctgcagccccagtcaccctcagcctccaagaagcaccaggtggtacaggacctgccacctgcaaacacattcgtgggcaccggggacaccacgtccacgggctctgagcagtactccgactacagctaccgcaccaacccccccaaataccccagcaagcaggtaggccagccctttcagctcagcacaccccagcccctaccccacccctaccacggagccatctggaccgaggtgtgggagtgatggagcaggtttactgtgcctgcccgtgttgggggccagcctgagccagcagtgggaggtggggccttagtgcctcaccgggcacacggattaggctgagtgaagattaagggagggtgtgctctgtggtctcctccctgccctctccccactggggagagacctgtgatttgccaagtccctggaccctggaccagctactgggccttatgggttgggggtggtaggcaggtgagcgtaagtggggagggaaatgggtaagaagtctactccaaacctaggtctctatgtcagaccagacctaggtgcttctctaggagggaaacagggagacctggggtcctgtggataactgagtggggagtctgccaggggagggcaccttcccattgtgccttctgtgtgtattgtgcattaacctcttcctcaccactaggcttctggggctgggtcccacatgcccttgaccctgacaataaagttctctatttttgga

SEQ ID NO: 172048 - DNA, 825 bp, Homo sapiens
  Payload ID: 13799
  Gene Symbol: PCDH1
  Gene Name: protocadherin 1
  ENST ID: ENST00000505937
  CDS Start-End: 1-380
ctggtcccaacggtgtggcatcctatgagctgcaggctgggcctgaggcccaggagctatttgggctgcaggtggcagaggaccaggaggagaagcaaccacagctcattgtgatgggcaacctggaccgtgagcgctgggactcctatgacctcaccatcaaggtgcaggatggcggcagccccccacgcgccagcagtgccctgctgcgtgtcaccgtgcttgacaccaatgacaacgcccccaagtttgagcggccctcctatgaggccgaactatctgagaatagccccataggccactcggtcatccagagcctggtggactgggacctggaaaagagactgagaaagaaaagggagacagacagtcggggatagcaaataataatagcctaggtgccaggcaccgttctaaacacatgatgtgtattatatcatttaatccttacagtacaaggtgaaggccaatgactcagaccaaggtgccaatgcagaaatcgaatacacattccaccaggcgcccgaagttgtgaggcgtcttcttcgactggacaggaacactggacttatcactgttcagggcccggtggaccgtgaggacctaagcaccctgcgcttctcagtgcttgctaaggaccgaggcaccaaccccaagagtgcccgtgcccaggtggttgtgaccgtgaaggacatgaatgacaatgcccccaccattgagatccggggcatagggctagtgactcatcaagatgggatggctaacatctcagaggatgtggcagaggagacagctgtggccctggtgcaggtgtctgaccgagat

SEQ ID NO: 172049 - DNA, 553 bp, Homo sapiens
  Payload ID: 13799
  Gene Symbol: PCDH1
  Gene Name: protocadherin 1
  ENST ID: ENST00000514773
  CDS Start-End: 102-553
ggcactgcgagggcgtgtgacacaggccgtgacactgcgcggcctcgcggggcagggacccggtgactgtataatccctcctgattctggggcctcccaggatggagcacctgaggcacagcccaggccctggggggcaacggctactgctgccctccatgctgctagcactgctgctcctgctggctccatccccaggccacgccactcgggtagtgtacaaggtgccggaggaacagccacccaacaccctcattgggagcctcgcagccgactatggttttccagatgtggggcacctgtacaagctagaggtgggtgccccgtaccttcgcgtggatggcaagacaggtgacattttcaccaccgagacctccatcgaccgtgaggggctccgtgaatgccagaaccagctccctggtgatccctgcatcctggagtttgaggtatctatcacagacctcgtgcagaatggcagcccccggctgctagagggccagatagaagtacaagacatcaatgacaacacacccaacttcgcctcaccagtcat

SEQ ID NO: 172050 - DNA, 2489 bp, Homo sapiens
  Payload ID: 13799
  Gene Symbol: PCDH1
  Gene Name: protocadherin 1
  ENST ID: ENST00000515351
  CDS Start-End: 1-52
catccaggtgagaggccccctccgtataactgtcagggtgacccaccactagaaatgggagcccacccaaccaggtgaaggccaatgactcagaccaaggtgccaatgcagaaatcgaatacacattccaccaggcgcccgaagttgtgaggcgtcttcttcgactggacaggaacactggacttatcactgttcagggcccggtggaccgtgaggacctaagcaccctgcgcttctcagtgcttgctaaggaccgaggcaccaaccccaagagtgcccgtgcccaggtggttgtgaccgtgaaggacatgaatgacaatgcccccaccattgagatccggggcatagggctagtgactcatcaagatgggatggctaacatctcagaggatgtggcagaggagacagctgtggccctggtgcaggtgtctgaccgagatgagggagagaatgcagctgtcacctgtgtggtggcaggtgatgtgcccttccagctgcgccaggccagtgagacaggcagtgacagcaagaagaagtatttcctgcagactaccaccccgctagactacgagaaggtcaaagactacaccattgagattgtggctgtggactctggcaaccccccactctccagcactaactccctcaaggtgcaggtggtggacgtcaatgacaacgcacctgtcttcactcagagtgtcactgaggtcgccttcccggaaaacaacaagcctggtgaagtgattgctgagatcactgccagtgatgctgactctggctctaatgctgagctggtttactctctggagcctgagccggctgctaagggcctcttcaccatctcacccgagactggagagatccaggtgaagacatctctggatcgggaacagcgggagagctatgagttgaaggtggtggcagctgaccggggcagtcctagcctccagggcacagccactgtccttgtcaatgtgctggactgcaatgacaatgaccccaaatttatgctgagtggctacaacttctcagtgatggagaacatgccagcactgagtccagtgggcatggtgactgtcattgatggagacaagggggagaatgcccaggtgcagctctcagtggagcaggacaacggtgactttgttatccagaatggcacaggcaccatcctatccagcctgagctttgatcgagagcaacaaagcacctacaccttccagctgaaggcagtggatggtggcgtcccacctcgctcagcttacgttggtgtcaccatcaatgtgctggacgagaatgacaacgcaccctatatcactgccccttctaacacctctcacaagctgctgaccccccagacacgtcttggtgagacggtcagccaggtggcagccgaggactttgactctggtgtcaatgctgagctgatctacagcattgcaggtggcaacccttatggactcttccagattgggtcacattcaggtgccatcaccctggagaaggagattgagcggcgccaccatgggctacaccgcctggtggtgaaggtcagtgaccgcggcaagcccccacgctatggcacagccttggtccatctttatgtcaatgagactctggccaaccgcacgctgctggagaccctcctgggccacagcctggacacgccgctggatattgacattgctggggatccagaatatgagcgctccaagcagcgtggcaacattctctttggtgtggtggctggtgtggtggccgtggccttgctcatcgccctggcggttcttgtgcgctactgcagacagcgggaggccaaaagtggttaccaggctggtaagaaggagaccaaggacctgtatgcccccaagcccagtggcaaggcctccaagggaaacaaaagcaaaggcaagaagagcaagtccccaaagcccgtgaagccagtggaggacgaggatgaggccgggctgcagaagtccctcaagttcaacctgatgagcgatgcccctggggacagtccccgcatccacctgcccctcaactacccaccaggcagccctgacctgggccgccactatcgctctaactccccactgccttccatccagctgcagccccagtcaccctcagcctccaagaagcaccaggtggtacaggacctgccacctgcaaacacattcgtgggcaccggggacaccacgtccacgggctctgagcagtactccgactacagctaccgcaccaacccccccaaataccccagcaagcaggtaggccagccctttcagctcagcacaccccagcccctaccccacccctaccacggagccatctggaccgaggtgtgggagtgatggagcaggtttactgtgcctgcccgtgttgggggccagcctgagccagcagtgggaggtggggccttagtgcctcaccgggcacacggattaggctgagtgaagattaagggagggtgtgctctgtggtctcct

SEQ ID NO: 172051 - DNA, 2373 bp, Homo sapiens
  Payload ID: 13799
  Gene Symbol: PCDH1
  Gene Name: protocadherin 1
  ENST ID: ENST00000503492
  CDS Start-End: 148-1296
cacactcggggagcgggagcgcggcgcggacgcaaagccgccgggctgctgcgcccagagccagccggagccggagccggagcccgaactgcagctccagccccagccgtgcggagccgcagcccaggccggggccggcggcggctcatggacagcggggcgggcggccggcgctgcccggaggcggccctcctgattctggggcctcccaggatggagcacctgaggcacagcccaggccctggggggcaacggctactgctgccctccatgctgctagcactgctgctcctgctggctccatccccaggccacgccactcgggtagtgtacaaggtgccggaggaacagccacccaacaccctcattgggagcctcgcagccgactatggttttccagatgtggggcacctgtacaagctagaggtgggtgccccgtaccttcgcgtggatggcaagacaggtgacattttcaccaccgagacctccatcgaccgtgaggggctccgtgaatgccagaaccagctccctggtgatccctgcatcctggagtttgaggtatctatcacagacctcgtgcagaatggcagcccccggctgctagagggccagatagaagtacaagacatcaatgacaacacacccaacttcgcctcaccagtcatcactctggccatccctgagaacaccaacatcggctcactcttccccatcccgctggcttcagaccgtgatgctggtcccaacggtgtggcatcctatgagctgcaggctgggcctgaggcccaggagctatttgggctgcaggtggcagaggaccaggaggagaagcaaccacagctcattgtgatgggcaacctggaccgtgagcgctgggactcctatgacctcaccatcaaggtgcaggatggcggcagccccccacgcgccagcagtgccctgctgcgtgtcaccgtgcttgacaccaatgacaacgcccccaagtttgagcggccctcctatgaggccgaactatctgagaatagccccataggccactcggtcatccagttacctcaccgccgcgtcaccttctcggccaccagccaggcccaggagctgcaggacccatcccagcacagttactatgacagtggcctggaggagtctgagacgccgtccagcaagtcatcctcagggcctcgactcggtcccctggccctgcctgaggatcactatgagcgcaccacccctgatggcagcataggagagatggagcaccccgagaatgagccggctggccggagcaggccctgaggcagagtgccagaccttcgccctttgcctgatgtcgccatgacaggcacatgtacccgggagtgcagtgagtttggccactctgacacatgctggatgcctggccagtcatctcccagccgccggaccaagagcagcgccctcaaactctccaccttcgtgccttaccaggaccgaggagggcaggagcctgcgggcgccggcagccccagccccccggaagaccggaacaccaaaacggcccccgtgcgcctcctgccctcctacagtgccttctcccacagtagccatgattcctgcaaggactcggccaccttggaggaaatccccctgacccagacctcggacttcccacccgcagccacaccggcatctgcccagacggccaagcgcgagatctacctgtgagccccctactggccggccggcccccctcccccagccgccggccagctcccaaatggcccattccagggcctcactctccaccccttcagcgtggacttcctggccagggccccaagtgggggtatcactgacctcatgaccacgctggcccttctcccatgcagggtccaggtcctctcccctcatttccatctcccagcccccaggggccccttcccctttatggggcttcccccatctgatgcccaagagggctcctctgcaatgactgggctccttcccttgacttccagggagcaccccctcgatttgggcagatggtggagtcaagggtgggcagcgtacttctaactcattgtttccctcatggccgaccagggcggggatagcatgcccaattttagccctgaagcagggctgaactggggagcccctttccctgggagctcccagaggaaactcttgaccaccagtggctccctgaagggcttttgttaccaaaggtggggtagggacgggggtgggagtggagcggaggccttgttttcccgtgctgctcctggactggcccacctgcctgccacatgcccacgcctagtcccatctgggcccccattccctgctggtcatgcagtgtctgtatataaggaccttggaatgacgtcccca

SEQ ID NO: 172052 - DNA, 8489 bp, Homo sapiens
  Payload ID: 13800
  Gene Symbol: PCDH10
  Gene Name: protocadherin 10
  Uniprot ID: Q9P2E7
  ENST ID: ENST00000264360
  CDS Start-End: 827-3949
caggctcagaggctgaagcaggaggaaggaaggactggaaggaaaaagagacaggttagagggaaagaggcttgggaagaaaacagcagaaaagaaactgctcattacacttacagagaggcaagtaacggtggagatgaggacagagggaaccaagactctgaaagacaaaaaatacaaatagagcgaaagaggaaaaaaatgtcaagaagaacatccatccggagaaatgaagagaatgaaagttttaagctgcagagccgttctgtgcttttccggcacaaaattatatcgctgattttaagcccttttgcatttgccagccgttgacattaagaggcatgtttaacggtgccaacagcatctccttttccttctcctcttcctcttcttcttcttcctcctcctcctcctctttttcctcctcctcgttctcctcccatcagcaagaagacaaaccgaggacagtcttgaaatatcgaaatttcctctttgggatttgccagcgccaagactgtcggaataaaggacgctgactattgtattattgttattttattaattagtcagtggaaagattacagatgaggaaaggggacgcctgtcacccttcctgtgctaagatttaaaaaaaaatgaggctggattgcgggaagctctaaaatgaagcaaaaggagtaagatttttaaagacagaaagccacaggagcccccacgtagcgcacttttatttgtattttttcagatttttttttgtttcgtggtggtgggggaggtgattgggtggctgactggctgcgggaagctacttcctttccttttggagatgattgtgctattattgtttgccttgctctggatggtggaaggagtcttttcccagcttcactacacggtacaggaggagcaggaacatggcactttcgtggggaatatcgctgaagatctgggtctggacattacaaaactttcggctcgcgggtttcagacggtgcccaactcaaggaccccttacttagacctcaacctggagacaggggtgctgtacgtgaacgagaaaatagaccgcgaacaaatctgcaaacagagcccctcctgtgtcctgcacctggaggtctttctggagaaccccctggagctgttccaggtggagatcgaggtgctggacattaatgacaaccccccctctttcccggagccagacctgacggtggaaatctctgagagcgccacgccaggcactcgcttccccttggagagcgcattcgacccagacgtgggcaccaactccttgcgcgactacgagatcacccccaacagctacttctccctggacgtgcagacccagggggatggcaaccgattcgctgagctggtgctggagaagccactggaccgagagcagcaagcggtgcaccgctacgtgctgaccgcggtggacggaggaggtgggggaggagtaggagaaggagggggaggtggcgggggagcaggcctgcccccccagcagcagcgcaccggcacggccctactcaccatccgagtgctggactccaatgacaatgtgcccgctttcgaccaacccgtctacactgtgtccctaccagagaactctcccccaggcactctcgtgatccagctcaacgccaccgacccggacgagggccagaacggtgaggtcgtgtactccttcagcagccacatttcgccccgggcgcgggagcttttcggactctcgccgcgcactggcagactggaggtaagcggcgagttggactatgaagagagcccagtgtaccaagtgtacgtgcaagccaaggacctgggccccaacgccgtgcctgcgcactgcaaggtgctagtgcgagtactggatgctaatgacaacgcgccagagatcagcttcagcaccgtgaaggaagcggtgagtgagggcgcggcgcccggcactgtggtggcccttttcagcgtgactgaccgcgactcagaggagaatgggcaggtgcagtgcgagctactgggagacgtgcctttccgcctcaagtcttcctttaagaattactacaccatcgttaccgaagcccccctggaccgagaggcgggggactcctacaccctgactgtagtggctcgggaccggggcgagcctgcgctctccaccagtaagtcgatccaggtacaagtgtcggatgtgaacgacaacgcgccgcgtttcagccagccggtctacgacgtgtatgtgactgaaaacaacgtgcctggcgcctacatctacgcggtgagcgccaccgaccgggatgagggcgccaacgcccagcttgcctactctatcctcgagtgccagatccagggcatgagcgtcttcacctacgtttctatcaactctgagaacggctacttgtacgccctgcgctccttcgactatgagcagctgaaggacttcagttttcaggtggaagcccgggacgctggcagcccccaggcgctggctggtaacgccactgtcaacatcctcatagtggatcaaaatgacaacgcccctgccatcgtggcgcctctaccagggcgcaacgggactccagcgcgtgaggtgctgccccgctcggcggagccgggttacctgctcacccgcgtggccgccgtggacgcggacgacggcgagaacgcccggctcacttacagcatcgtgcgtggcaacgaaatgaacctctttcgcatggactggcgcaccggggagctgcgcacagcacgccgagtcccggccaagcgcgacccccagcggccttatgagctggtgatcgaggtgcgcgaccatgggcagccgcccctttcctccaccgccaccctggtggttcagctggtggatggcgccgtggagccccagggcgggggcgggagcggaggcggagggtcaggagagcaccagcgccccagtcgctctggcggcggggaaacctcgctagacctcaccctcatcctcatcatcgcgttgggctcggtgtccttcatcttcctgctggccatgatcgtgctggccgtgcgttgccaaaaagagaagaagctcaacatctatacttgtctggccagcgattgctgcctctgctgctgctgctgcggtggcggaggttcgacctgctgtggccgccaagcccgggcgcgcaagaagaaactcagcaagtcagacatcatgctggtgcagagctccaatgtacccagtaacccggcccaggtgccgatagaggagtccgggggctttggctcccaccaccacaaccagaattactgctatcaggtatgcctgacccctgagtccgccaagaccgacctgatgtttcttaagccctgcagcccttcgcggagtacggacactgagcacaacccctgcggggccatcgtcaccggttacaccgaccagcagcctgatatcatctccaacggaagcattttgtccaacgagactaaacaccagcgagcagagctcagctatctagttgacagacctcgccgagttaacagttctgcattccaggaagccgacatagtaagctctaaggacagtggtcatggagacagtgaacagggagatagtgatcatgatgccaccaaccgtgcccagtcagctggtatggatctcttctccaattgcactgaggaatgtaaagctctgggccactcagatcggtgctggatgccttcttttgtcccttctgatggacgccaggctgctgattatcgcagcaatctgcatgttcctggcatggactctgttccagacactgaggtgtttgaaactccagaagcccagcctggggcagagcggtccttttccacctttggcaaagagaaggcccttcacagcactctggagaggaaggagctggatggactgctgactaatacgcgagcgccttacaaaccaccatatttgacacggaaaaggatatgctagtcaattctacaggacttacctgaagcagcatgatttgcacaaagtcgaccaacaaaagcatcaacttttcaacttcattatcttggccatccagttagtcatgtgtaactgagtattagatttcggatggagtcatcatggccaattataggacctaattgctctcagcaggcctgagaaatgagttgaaatgtgcagaactgtagaaactttagaggcaacagattttgcctccccgatcagtgtgtgcctgtttacagcactatctatctttctctctccaaatgtcactgagccctttagatgtttatattcaccacgagaagccagtcataaagataaaggaaatttgtgcattataaatgcaatatcactgttttaaacttgactgttttatattatttttgtgtgatcaagtgttccgcaagctattccaactttacaagagaaattgtgattatgttcttttcacctgtgggttataaaaaatgttgtattctgaagacccacaaaatatcaaagacattctgtagtttatacaccgtgttgcaaagtgtttactgtactatttcaaagcttctaaataaatataaaatatatatattatattatataattttcctaaaatgtggtacaactcagttggtttttaaatggatgcatacagtccacatcatacaataaaataaaaggtaattcagggtcccaaagacaaacttactaagaaaaaatcattaatagttttctcccaatttccatatcttactcaaccgtgtttttccttgtttaaaagaaaatgatgctctaagctacaaaattttgtcaaaaactcatattgaattttcaatgccaaagatgtagctattgatgttatcagacagagcactgactatgtactatcaaactatctaacaatctgcataagtctgattctatttctatgactttgaatttagaatcacttaaagcttttataaagaatcgataaattcacctgtatttgttgttagaaaaaaactgggtgtctgtacattttgtggtgtaaaatatgtaattgaagattactattttaagaagtcatcagtcatatcactcacacagaattttattttacatagttttgtgacttaattacacatgaatataaaatctataattctatatgaatatatagagatatagaaacatctgaactggtaaagaataactataaaatatgaaagctctaaatttaaaataaatttagagatagaatcatggtacattattgtttcagtattccatgtgaaaattttatagcttaaatgtagtcagtgtttgattaatgaaaaaattcttcatgagtcagccttcaaaagttaagcttgccttttacttttatgtcaacaatattaattattaaatttagtaagacgcactttcctttcttttatatattttttctactgttgtgtatgccttgttagaacacattcgagagaggaaaaaaatcagagaatataagataatctttcaagcaaaaaacagaattgtcacagctcccctcgccctctaaactatgatatcaaaacatcatatcaaagcttcaacattatatcaaaatgtttgcccagttcaaattagaaacctgttttgaaatactttccttaatttttaactgatcttatattcaatgacagtttgagctgcactgtgttattaaagaatagactaaaacttaacatttgacaaatgttcttcatcaaattttatgtaacttaagtggaaatttttccctagatttaactttaaaatacatatatatacacacacacacacacacacacacacacacacttaggtcctgatatgtacatttagagtgatatattggtatcactcatttgactgttatcaaattagatattaatatatcatattccaatcagttcatatatcaaaataatgtatgtaatgttccagccttttgaagtctctttaaacatatatgaagctaacagatcatatgtaatacaaaaagcacataaattcactaagtgcagcagtaacattttcttaaactttggcattactacattaatattttgaatgatagactattttagtaaggaaatgtttatacataatttaactggaaaaaagtctgtttgttccaactcttttttttagcaagaaaatgattttcttgttgagtcactctgctttaattaaaatgtttcacgcatcattttgcaatcatgggtgaatatccacatccatcttccttactgcatgcattgaaaataagattatactcacttcatgtatagtaattatattgtcatttacctcaaagacattttctttaattatttaaccttttatatcattgtatataatctcctttgaaccaacttttttattatatatttgtgtattagttattttcatatatcctaggaactagttatactaacttacattttagttatcatcaatctacaaaaccaaaaccagaacttcttcctaatttgcgggacaaatagaattgtttaaggataaaatgctacattattaggtcattaatcaacttatctgttgcatccaaagtaaattagaagttacaacagagtaaggatatgattcttgtaagttggttaaaatgttttcttccaatgagggggactataaaatggaaagtgcaaccaacaaataatgaaggtttctaattaagcatttactagattaatatatcaaggaattttaggataggttttctctttaatctggtcattctaatatccaatcttacataattttatatacatcaaagaataatatccatcgtattagacagtatttcgtcaataaattatttcagaaaaaaaaatcatgtcatttactccttgttaacatggttagttttagagcagtcaaagtcaaaaaaaatttcctgtggaaacagtgtcttaatgtttcaaaggtatgtcaaaagacaatttttagaaaatatttcatccacatgtagaattctaatttttaacgtgtgaacatagtttggtgaaatcatcttaaatcaaatttaaatatcacatcagaattacttcacagatataatagcgtcaatgatatatgtatcatcttttcttggcaaatattaaggaaatatgtgtattttattttttaaagatattaaatgcactgcctttatcaaacattgcaaattaagaactatagtagaatatttaaatattttaatttctcattgttttatttgttaattggattgtaatttgccatcagattctctgtattatagaagctatcttgcttcttcaataagaggaggaaaaagaatctcacaattcccaatataatctttaacaactgtacgttaattgtaccattttaccttctaaacattatttactggagctcagttagtctttaaaacaattactcaggcagagtgtggcaaaagttcagcaagatcaagaaaagtatttaagttattgactgatcatagcactgttatttgtcattgcatgtgtttttccccctcatgtttctatgtgtgctattgatacccaaggaactcaaaaatacttaaaatattggtatacttgatgatttttctgaaaatcttatatttttcatattacaaattcttgagttctttatctttttcaagtctaattttgtagtggtaaaggctttgcacttaacatccttttgtgttcctttttaacaaggaaaaacagaaaataatggaattccatattttttacaccatggagtagtaaaattattttatatattgttagtacttcaacaaacatccctctgctaagtcagacaaaatccttatacagtaatttgtgaaactgttcagtagagtattcttttcttcaaatcttggcataggttttagattatagcattctgtatgaatgcaggtagatgggtgccgccagagtattgcaggcaataatacgactaaaattctaatacttttagtgtgcatgcgtgtatttctaatcactgttattttttaagtatttgtaaaattagaaaaattgcttttatttcttgaaaagttgtcacatgcttagtttgaagttttactctccagatgtttttgagttgcataaaaatcttgcattcatcattcaaaaaatactaaatttcacatgagactcaaaaatttctgaatgatggaactcagacttccaatacattcatacatgctagagctgaaagtaagcagggaatttcagctctaaacacatttttgagacagttatctgtgagtgaaaacagggtattataacaaaagatgagtttcaatcttaactacagtgtttgttactgtgaatgctataataatacataagtaaaatgagtgtaaatgtaataaattattttatactgctgtatacatatgaaataaataaaactaggatacatattatgccatttttccatgcatggatcttccactgacgcctgtgggagctttgaataaaaatcagtggcaaatatggctctaagtttaaaaaca

SEQ ID NO: 172053 - DNA, 4574 bp, Homo sapiens
  Payload ID: 13800
  Gene Symbol: PCDH10
  Gene Name: protocadherin 10
  Uniprot ID: Q9P2E7
  ENST ID: ENST00000618019
  CDS Start-End: 827-3517
caggctcagaggctgaagcaggaggaaggaaggactggaaggaaaaagagacaggttagagggaaagaggcttgggaagaaaacagcagaaaagaaactgctcattacacttacagagaggcaagtaacggtggagatgaggacagagggaaccaagactctgaaagacaaaaaatacaaatagagcgaaagaggaaaaaaatgtcaagaagaacatccatccggagaaatgaagagaatgaaagttttaagctgcagagccgttctgtgcttttccggcacaaaattatatcgctgattttaagcccttttgcatttgccagccgttgacattaagaggcatgtttaacggtgccaacagcatctccttttccttctcctcttcctcttcttcttcttcctcctcctcctcctctttttcctcctcctcgttctcctcccatcagcaagaagacaaaccgaggacagtcttgaaatatcgaaatttcctctttgggatttgccagcgccaagactgtcggaataaaggacgctgactattgtattattgttattttattaattagtcagtggaaagattacagatgaggaaaggggacgcctgtcacccttcctgtgctaagatttaaaaaaaaatgaggctggattgcgggaagctctaaaatgaagcaaaaggagtaagatttttaaagacagaaagccacaggagcccccacgtagcgcacttttatttgtattttttcagatttttttttgtttcgtggtggtgggggaggtgattgggtggctgactggctgcgggaagctacttcctttccttttggagatgattgtgctattattgtttgccttgctctggatggtggaaggagtcttttcccagcttcactacacggtacaggaggagcaggaacatggcactttcgtggggaatatcgctgaagatctgggtctggacattacaaaactttcggctcgcgggtttcagacggtgcccaactcaaggaccccttacttagacctcaacctggagacaggggtgctgtacgtgaacgagaaaatagaccgcgaacaaatctgcaaacagagcccctcctgtgtcctgcacctggaggtctttctggagaaccccctggagctgttccaggtggagatcgaggtgctggacattaatgacaaccccccctctttcccggagccagacctgacggtggaaatctctgagagcgccacgccaggcactcgcttccccttggagagcgcattcgacccagacgtgggcaccaactccttgcgcgactacgagatcacccccaacagctacttctccctggacgtgcagacccagggggatggcaaccgattcgctgagctggtgctggagaagccactggaccgagagcagcaagcggtgcaccgctacgtgctgaccgcggtggacggaggaggtgggggaggagtaggagaaggagggggaggtggcgggggagcaggcctgcccccccagcagcagcgcaccggcacggccctactcaccatccgagtgctggactccaatgacaatgtgcccgctttcgaccaacccgtctacactgtgtccctaccagagaactctcccccaggcactctcgtgatccagctcaacgccaccgacccggacgagggccagaacggtgaggtcgtgtactccttcagcagccacatttcgccccgggcgcgggagcttttcggactctcgccgcgcactggcagactggaggtaagcggcgagttggactatgaagagagcccagtgtaccaagtgtacgtgcaagccaaggacctgggccccaacgccgtgcctgcgcactgcaaggtgctagtgcgagtactggatgctaatgacaacgcgccagagatcagcttcagcaccgtgaaggaagcggtgagtgagggcgcggcgcccggcactgtggtggcccttttcagcgtgactgaccgcgactcagaggagaatgggcaggtgcagtgcgagctactgggagacgtgcctttccgcctcaagtcttcctttaagaattactacaccatcgttaccgaagcccccctggaccgagaggcgggggactcctacaccctgactgtagtggctcgggaccggggcgagcctgcgctctccaccagtaagtcgatccaggtacaagtgtcggatgtgaacgacaacgcgccgcgtttcagccagccggtctacgacgtgtatgtgactgaaaacaacgtgcctggcgcctacatctacgcggtgagcgccaccgaccgggatgagggcgccaacgcccagcttgcctactctatcctcgagtgccagatccagggcatgagcgtcttcacctacgtttctatcaactctgagaacggctacttgtacgccctgcgctccttcgactatgagcagctgaaggacttcagttttcaggtggaagcccgggacgctggcagcccccaggcgctggctggtaacgccactgtcaacatcctcatagtggatcaaaatgacaacgcccctgccatcgtggcgcctctaccagggcgcaacgggactccagcgcgtgaggtgctgccccgctcggcggagccgggttacctgctcacccgcgtggccgccgtggacgcggacgacggcgagaacgcccggctcacttacagcatcgtgcgtggcaacgaaatgaacctctttcgcatggactggcgcaccggggagctgcgcacagcacgccgagtcccggccaagcgcgacccccagcggccttatgagctggtgatcgaggtgcgcgaccatgggcagccgcccctttcctccaccgccaccctggtggttcagctggtggatggcgccgtggagccccagggcgggggcgggagcggaggcggagggtcaggagagcaccagcgccccagtcgctctggcggcggggaaacctcgctagacctcaccctcatcctcatcatcgcgttgggctcggtgtccttcatcttcctgctggccatgatcgtgctggccgtgcgttgccaaaaagagaagaagctcaacatctatacttgtctggccagcgattgctgcctctgctgctgctgctgcggtggcggaggttcgacctgctgtggccgccaagcccgggcgcgcaagaagaaactcagcaagtcagacatcatgctggtgcagagctccaatgtacccagtaacccggcccaggtgccgatagaggagtccgggggctttggctcccaccaccacaaccagaattactgctatcaggtatgcctgacccctgagtccgccaagaccgacctgatgtttcttaagccctgcagcccttcgcggagtacggacactgagcacaacccctgcggggccatcgtcaccggttacaccgaccagcagcctgatatcatctccaacggaagcattttgtccaacgaggtaaggctgaagcgaaaggaccaccatctctcatctcctccatcagaaagcctcctctagcccggcccttgtatctctggtgcactgtatctatttttaggatattagcttatgtgtatcgttgtgggagcagagatgggcggtcaccttctcccactccttcgtgtgtaacctaactttcgcgttgttccaccctttcacatttattttcattccgtccccttggtactttgccaccttggagctccctcctttgctcttccatcctgtcagtcctttcccttctcagtaacctgggcatgaagggaaactgcgtgaagggagagggaaatgtggaggagggacttactttctagcactggcaaaggtcttttttctttgcgtctgtcccaggcattaataaagttggctctattttgctttgtttaacgatgcttttagtcgcgtgtacaagtaagctatagattgtttaactttacacagttgtctaacctcgaattcatgttttagtgaacaagttaccagatccttctcctctgaactcgggttgcaaaaaaagccttcagttcggctctggacagcatttacagacgctcttgaagccgagcgcccacacagtgtgaatttgaatgaagctgcgttggcacaaacccctgttaagagtaaactaacgaaaggcttaaacaattgttgtcttaaatatatctttttagctaataatcaccttcttgccactgttttggataaatcacgctgttggctttcttcataaaagaatttggcttgtcaattctgacttctttttaaaaggatggagaagtgacaaagtcggagggtgggggttggggggagaacaaagttggtttatgtgaaagaaagcttggaccggaaaggtgtgtgggtggtagaggtggggaggcgaatgcagagggcctttggaggggaaaagaatgggggtggtggggggcgggcaggattatgaactcctttcctggcaggttattttatttgagtcttagatattattaattgactttcatgaatatttgtacagctcatttgtatcttaagcacattttgaaaataaacaacaacataattccatgaaatatccaaa

SEQ ID NO: 172054 - DNA, 4126 bp, Homo sapiens
  Payload ID: 13801
  Gene Symbol: PCDH11X
  Gene Name: protocadherin 11 X-linked
  Uniprot ID: Q9BZA7
  ENST ID: ENST00000361655
  CDS Start-End: 1-3990
atggacttgttgtccgggacgtacattttcgcggtcctgctagcatgcgtggtgttccactctggcgcccaggagaaaaactacaccatccgagaagaaatgccagaaaacgtcctgataggcgacttgttgaaagaccttaacttgtcgctgattccaaacaagtccttgacaactgctatgcagttcaagctagtgtacaagaccggagatgtgccactgattcgaattgaagaggatactggtgagatcttcactactggcgctcgcattgatcgtgagaaattatgtgctggtatcccaagggatgagcattgcttttatgaagtggaggttgccattttgccggatgaaatatttagactggttaagatacgttttctgatagaagatataaatgataatgcaccattgttcccagcaacagttatcaacatatcaattccagagaactcggctataaactctaaatatactctcccagcggctgttgatcctgacgtaggaataaacggagttcaaaactacgaactaattaagagtcaaaacatttttggcctcgatgtcattgaaacaccagaaggagacaagatgccacaactgattgttcaaaaggagttagatagggaagagaaggatacctacgtgatgaaagtaaaggttgaagatggtggctttcctcaaagatccagtactgctattttgcaagtgagtgttactgatacaaatgacaaccacccagtctttaaggagacagagattgaagtcagtataccagaaaatgctcctgtaggcacttcagtgacacagctccatgccacagatgctgacataggtgaaaatgccaagatccacttctctttcagcaatctagtctccaacattgccaggagattatttcacctcaatgccaccactggacttatcacaatcaaagaaccactggatagggaagaaacaccaaaccacaagttactggttttggcaagtgatggtggattgatgccagcaagagcaatggtgctggtaaatgttacagatgtcaatgataatgtcccatccattgacataagatacatcgtcaatcctgtcaatgacacagttgttctttcagaaaatattccactcaacaccaaaattgctctcataactgtgacggataaggatgcggaccataatggcagggtgacatgcttcacagatcatgaaatccctttcagattaaggccagtattcagtaatcagttcctcctggagactgcagcatatcttgactatgagtccacaaaagaatatgccattaaattactggctgcagatgctggcaaacctcctttgaatcagtcagcaatgctcttcatcaaagtgaaagatgaaaatgacaatgctccagttttcacccagtctttcgtaactgtttctattcctgagaataactctcctggcatccagttgacgaaagtaagtgcaatggatgcagacagtgggcctaatgctaagatcaattacctgctaggccctgatgctccacctgaattcagcctggattgtcgtacaggcatgctgactgtagtgaagaaactagatagagaaaaagaggataaatatttattcacaattctggcaaaagataacggggtaccacccttaaccagcaatgtcacagtctttgtaagcattattgatcagaatgacaatagcccagttttcactcacaatgaatacaacttctatgtcccagaaaaccttccaaggcatggtacagtaggactaatcactgtaactgatcctgattatggagacaattctgcagttacgctctccattttagatgagaatgatgacttcaccattgattcacaaactggtgtcatccgaccaaatatttcatttgatagagaaaaacaagaatcttacactttctatgtaaaggctgaggatggtggtagagtatcacgttcttcaagtgccaaagtaaccataaatgtggttgatgtcaatgacaacaaaccagttttcattgtccctccttccaactgttcttatgaattggttctaccgtccactaatccaggcacagtggtctttcaggtaattgctgttgacaatgacactggcatgaatgcagaggttcgttacagcattgtaggaggaaacacaagagatctgtttgcaatcgaccaagaaacaggcaacataacattgatggagaaatgtgatgttacagaccttggtttacacagagtgttggtcaaagctaatgacttaggacagcctgattctctcttcagtgttgtaattgtcaatctgttcgtgaatgagtcggtgaccaatgctacactgattaatgaactggtgcgcaaaagcactgaagcaccagtgaccccaaatactgagatagctgatgtatcctcaccaactagtgactatgtcaagatcctggttgcagctgttgctggcaccataactgtcgttgtagttattttcatcactgctgtagtaagatgtcgccaggcaccacaccttaaggctgctcagaaaaacaagcagaattctgaatgggctaccccaaacccagaaaacaggcagatgataatgatgaagaaaaagaaaaagaagaagaagcattcccctaagaacttgctgcttaattttgtcactattgaagaaactaaggcagatgatgttgacagtgatggaaacagagtcacactagaccttcctattgatctagaagagcaaacaatgggaaagtacaattgggtaactacacctactactttcaagcccgacagccctgatttggcccgacactacaaatctgcctctccacagcctgccttccaaattcagcctgaaactcccctgaattcgaagcaccacatcatccaagaactgcctctcgataacacctttgtggcctgtgactctatctccaagtgttcctcaagcagttcagatccctacagcgtttctgactgtggctatccagtgacgaccttcgaggtacctgtgtccgtacacaccagaccgccaatgaaggaggttgtgcgatcttgcacccccatgaaagagtctacaactatggagatctggattcatccccaaccacagtcccagcggcgtgtcacatttcacctgccagaaggctctcaggaaagcagcagtgatggtggactgggagaccatgatgcaggcagccttaccagcacatctcatggcctgccccttggctatcctcaggaggagtactttgatcgtgctacacccagcaatcgcactgaaggggatggcaactccgatcctgaatctactgcagaaataactgttcaaccaactgtggaagaggcctctgacaactgcactcaagaatgtctcatctatggccattctgatgcctgctggatgccggcatctctggatcattccagctcttcgcaagcacaggcctctgctctatgccacagcccaccactgtcacaggcctctactcagcaccacagcccacgagtgacacagaccattgctctctgccacagccctccagtgacacagaccatcgcattgtgccacagcccaccaccgatacaggtgtctgctctccaccacagtcctcctctagtgcaggctactgcacttcaccacagcccaccatcagcacaggcctcagccctctgctacagccctcctttagcacaggctgctgcaatcagccacagctctcctctgccacaggttattgccctccatcgtagtcaggcccaatcatcagtcagtttgcagcaaggttgggtgcaaggtgctgatgggctatgctctgttgatcagggagtgcaaggtagtgcaacatctcagttttacaccatgtctgaaagacttcatcccagtgatgattcaattaaagtcattcctttgacaaccttcactccacgccaacaggccagaccgtccagaggtgattcccccattatggaagaacatcccttgtaaagctaaaatagttacttcaaattttcagaaaagatgtatatagtcaaaatttaagatacaattccaatgagtattctgattatcagatttgtaaataactatgtaaatagaaacagataccagaataaatctacag

SEQ ID NO: 172055 - DNA, 4069 bp, Homo sapiens
  Payload ID: 13801
  Gene Symbol: PCDH11X
  Gene Name: protocadherin 11 X-linked
  Uniprot ID: Q9BZA7
  ENST ID: ENST00000373088
  CDS Start-End: 1-3933
atggacttgttgtccgggacgtacattttcgcggtcctgctagcatgcgtggtgttccactctggcgcccaggagaaaaactacaccatccgagaagaaatgccagaaaacgtcctgataggcgacttgttgaaagaccttaacttgtcgctgattccaaacaagtccttgacaactgctatgcagttcaagctagtgtacaagaccggagatgtgccactgattcgaattgaagaggatactggtgagatcttcactactggcgctcgcattgatcgtgagaaattatgtgctggtatcccaagggatgagcattgcttttatgaagtggaggttgccattttgccggatgaaatatttagactggttaagatacgttttctgatagaagatataaatgataatgcaccattgttcccagcaacagttatcaacatatcaattccagagaactcggctataaactctaaatatactctcccagcggctgttgatcctgacgtaggaataaacggagttcaaaactacgaactaattaagagtcaaaacatttttggcctcgatgtcattgaaacaccagaaggagacaagatgccacaactgattgttcaaaaggagttagatagggaagagaaggatacctacgtgatgaaagtaaaggttgaagatggtggctttcctcaaagatccagtactgctattttgcaagtgagtgttactgatacaaatgacaaccacccagtctttaaggagacagagattgaagtcagtataccagaaaatgctcctgtaggcacttcagtgacacagctccatgccacagatgctgacataggtgaaaatgccaagatccacttctctttcagcaatctagtctccaacattgccaggagattatttcacctcaatgccaccactggacttatcacaatcaaagaaccactggatagggaagaaacaccaaaccacaagttactggttttggcaagtgatggtggattgatgccagcaagagcaatggtgctggtaaatgttacagatgtcaatgataatgtcccatccattgacataagatacatcgtcaatcctgtcaatgacacagttgttctttcagaaaatattccactcaacaccaaaattgctctcataactgtgacggataaggatgcggaccataatggcagggtgacatgcttcacagatcatgaaatccctttcagattaaggccagtattcagtaatcagttcctcctggagactgcagcatatcttgactatgagtccacaaaagaatatgccattaaattactggctgcagatgctggcaaacctcctttgaatcagtcagcaatgctcttcatcaaagtgaaagatgaaaatgacaatgctccagttttcacccagtctttcgtaactgtttctattcctgagaataactctcctggcatccagttgacgaaagtaagtgcaatggatgcagacagtgggcctaatgctaagatcaattacctgctaggccctgatgctccacctgaattcagcctggattgtcgtacaggcatgctgactgtagtgaagaaactagatagagaaaaagaggataaatatttattcacaattctggcaaaagataacggggtaccacccttaaccagcaatgtcacagtctttgtaagcattattgatcagaatgacaatagcccagttttcactcacaatgaatacaacttctatgtcccagaaaaccttccaaggcatggtacagtaggactaatcactgtaactgatcctgattatggagacaattctgcagttacgctctccattttagatgagaatgatgacttcaccattgattcacaaactggtgtcatccgaccaaatatttcatttgatagagaaaaacaagaatcttacactttctatgtaaaggctgaggatggtggtagagtatcacgttcttcaagtgccaaagtaaccataaatgtggttgatgtcaatgacaacaaaccagttttcattgtccctccttccaactgttcttatgaattggttctaccgtccactaatccaggcacagtggtctttcaggtaattgctgttgacaatgacactggcatgaatgcagaggttcgttacagcattgtaggaggaaacacaagagatctgtttgcaatcgaccaagaaacaggcaacataacattgatggagaaatgtgatgttacagaccttggtttacacagagtgttggtcaaagctaatgacttaggacagcctgattctctcttcagtgttgtaattgtcaatctgttcgtgaatgagtcggtgaccaatgctacactgattaatgaactggtgcgcaaaagcactgaagcaccagtgaccccaaatactgagatagctgatgtatcctcaccaactagtgactatgtcaagatcctggttgcagctgttgctggcaccataactgtcgttgtagttattttcatcactgctgtagtaagatgtcgccaggcaccacaccttaaggctgctcagaaaaacaagcagaattctgaatgggctaccccaaacccagaaaacaggcagatgataatgatgaagaaaaagaaaaagaagaagaagcattcccctaagaacttgctgcttaattttgtcactattgaagaaactaaggcagatgatgttgacagtgatggaaacagagtcacactagaccttcctattgatctagaagagcaaacaatgggaaagtacaattgggtaactacacctactactttcaagcccgacagccctgatttggcccgacactacaaatctgcctctccacagcctgccttccaaattcagcctgaaactcccctgaattcgaagcaccacatcatccaagaactgcctctcgataacacctttgtggcctgtgactctatctccaagtgttcctcaagcagttcagatccctacagcgtttctgactgtggctatccagtgacgaccttcgaggtacctgtgtccgtacacaccagaccgtcccagcggcgtgtcacatttcacctgccagaaggctctcaggaaagcagcagtgatggtggactgggagaccatgatgcaggcagccttaccagcacatctcatggcctgccccttggctatcctcaggaggagtactttgatcgtgctacacccagcaatcgcactgaaggggatggcaactccgatcctgaatctactttcatacctggactaaagaaagctgcagaaataactgttcaaccaactgtggaagaggcctctgacaactgcactcaagaatgtctcatctatggccattctgatgcctgctggatgccggcatctctggatcattccagctcttcgcaagcacaggcctctgctctatgccacagcccaccactgtcacaggcctctactcagcaccacagcccacgagtgacacagaccattgctctctgccacagccctccagtgacacagaccatcgcattgtgccacagcccaccaccgatacaggtgtctgctctccaccacagtcctcctctagtgcaggctactgcacttcaccacagcccaccatcagcacaggcctcagccctctgctacagccctcctttagcacaggctgctgcaatcagccacagctctcctctgccacaggttattgccctccatcgtagtcaggcccaatcatcagtcagtttgcagcaaggttgggtgcaaggtgctgatgggctatgctctgttgatcagggagtgcaaggtagtgcaacatctcagttttacaccatgtctgaaagacttcatcccagtgatgattcaattaaagtcattcctttgacaaccttcactccacgccaacaggccagaccgtccagaggtgattcccccattatggaagaacatcccttgtaaagctaaaatagttacttcaaattttcagaaaagatgtatatagtcaaaatttaagatacaattccaatgagtattctgattatcagatttgtaaataactatgtaaatagaaacagataccagaataaatctacag

SEQ ID NO: 172056 - DNA, 9179 bp, Homo sapiens
  Payload ID: 13801
  Gene Symbol: PCDH11X
  Gene Name: protocadherin 11 X-linked
  Uniprot ID: Q9BZA7
  ENST ID: ENST00000373094
  CDS Start-End: 846-4889
ctggtggtccagtacctccaaagatatggaatacactcctgaaatatcctgaaaacttttttttttcagaatcctttaataagcagttatgtcaatctgaaagttgcttacttgtactttatattaatagctattcttgtttttcttatccaaagaaaaatcctctaatccccttttcacatgatagttgttaccatgtttaggcattagtcacatcaacccctctcctctcccaaacttctcttcttcaaatcaaactttattagtccctcctttataatgattccttgcctcgttttatccagatcaattttttttcactttgatgcccagagctgaagaaatggactactgtataaattattcattgccaagagaataattgcattttaaacccatattataacaaagaataatgattatattttgtgatttgtaacaaataccctttattttcccttaactattgaattaaatattttaattatttgtattctctttaactatcttggtatattaaagtattatcttttatatatttatcaatggtggacacttttataggtactctgtgtcatttttgatactgtaggtatcttatttcatttatctttattcttaatgtacgaattcataatatttgattcagaacaaatttatcactaattaacagagtgtcaattatgctaacatctcatttactgattttaatttaaaacagtttttgttaacatgcatgtttagggttggcttcttaataatttcttcttcctcttctctctctcctcttcttttggtcagtgttgtgcgggttaatacaacaaactgtaacaagtgtacctggtatggacttgttgtccgggacgtacattttcgcggtcctgctagcatgcgtggtgttccactctggcgcccaggagaaaaactacaccatccgagaagaaatgccagaaaacgtcctgataggcgacttgttgaaagaccttaacttgtcgctgattccaaacaagtccttgacaactgctatgcagttcaagctagtgtacaagaccggagatgtgccactgattcgaattgaagaggatactggtgagatcttcactactggcgctcgcattgatcgtgagaaattatgtgctggtatcccaagggatgagcattgcttttatgaagtggaggttgccattttgccggatgaaatatttagactggttaagatacgttttctgatagaagatataaatgataatgcaccattgttcccagcaacagttatcaacatatcaattccagagaactcggctataaactctaaatatactctcccagcggctgttgatcctgacgtaggaataaacggagttcaaaactacgaactaattaagagtcaaaacatttttggcctcgatgtcattgaaacaccagaaggagacaagatgccacaactgattgttcaaaaggagttagatagggaagagaaggatacctacgtgatgaaagtaaaggttgaagatggtggctttcctcaaagatccagtactgctattttgcaagtgagtgttactgatacaaatgacaaccacccagtctttaaggagacagagattgaagtcagtataccagaaaatgctcctgtaggcacttcagtgacacagctccatgccacagatgctgacataggtgaaaatgccaagatccacttctctttcagcaatctagtctccaacattgccaggagattatttcacctcaatgccaccactggacttatcacaatcaaagaaccactggatagggaagaaacaccaaaccacaagttactggttttggcaagtgatggtggattgatgccagcaagagcaatggtgctggtaaatgttacagatgtcaatgataatgtcccatccattgacataagatacatcgtcaatcctgtcaatgacacagttgttctttcagaaaatattccactcaacaccaaaattgctctcataactgtgacggataaggatgcggaccataatggcagggtgacatgcttcacagatcatgaaatccctttcagattaaggccagtattcagtaatcagttcctcctggagactgcagcatatcttgactatgagtccacaaaagaatatgccattaaattactggctgcagatgctggcaaacctcctttgaatcagtcagcaatgctcttcatcaaagtgaaagatgaaaatgacaatgctccagttttcacccagtctttcgtaactgtttctattcctgagaataactctcctggcatccagttgacgaaagtaagtgcaatggatgcagacagtgggcctaatgctaagatcaattacctgctaggccctgatgctccacctgaattcagcctggattgtcgtacaggcatgctgactgtagtgaagaaactagatagagaaaaagaggataaatatttattcacaattctggcaaaagataacggggtaccacccttaaccagcaatgtcacagtctttgtaagcattattgatcagaatgacaatagcccagttttcactcacaatgaatacaacttctatgtcccagaaaaccttccaaggcatggtacagtaggactaatcactgtaactgatcctgattatggagacaattctgcagttacgctctccattttagatgagaatgatgacttcaccattgattcacaaactggtgtcatccgaccaaatatttcatttgatagagaaaaacaagaatcttacactttctatgtaaaggctgaggatggtggtagagtatcacgttcttcaagtgccaaagtaaccataaatgtggttgatgtcaatgacaacaaaccagttttcattgtccctccttccaactgttcttatgaattggttctaccgtccactaatccaggcacagtggtctttcaggtaattgctgttgacaatgacactggcatgaatgcagaggttcgttacagcattgtaggaggaaacacaagagatctgtttgcaatcgaccaagaaacaggcaacataacattgatggagaaatgtgatgttacagaccttggtttacacagagtgttggtcaaagctaatgacttaggacagcctgattctctcttcagtgttgtaattgtcaatctgttcgtgaatgagtcggtgaccaatgctacactgattaatgaactggtgcgcaaaagcactgaagcaccagtgaccccaaatactgagatagctgatgtatcctcaccaactagtgactatgtcaagatcctggttgcagctgttgctggcaccataactgtcgttgtagttattttcatcactgctgtagtaagatgtcgccaggcaccacaccttaaggctgctcagaaaaacaagcagaattctgaatgggctaccccaaacccagaaaacaggcagatgataatgatgaagaaaaagaaaaagaagaagaagcattcccctaagaacttgctgcttaattttgtcactattgaagaaactaaggcagatgatgttgacagtgatggaaacagagtcacactagaccttcctattgatctagaagagcaaacaatgggaaagtacaattgggtaactacacctactactttcaagcccgacagccctgatttggcccgacactacaaatctgcctctccacagcctgccttccaaattcagcctgaaactcccctgaattcgaagcaccacatcatccaagaactgcctctcgataacacctttgtggcctgtgactctatctccaagtgttcctcaagcagttcagatccctacagcgtttctgactgtggctatccagtgacgaccttcgaggtacctgtgtccgtacacaccagaccgccaatgaaggaggttgtgcgatcttgcacccccatgaaagagtctacaactatggagatctggattcatccccaaccacagcggaaatctgaagggaaagtggcaggaaagtcccagcggcgtgtcacatttcacctgccagaaggctctcaggaaagcagcagtgatggtggactgggagaccatgatgcaggcagccttaccagcacatctcatggcctgccccttggctatcctcaggaggagtactttgatcgtgctacacccagcaatcgcactgaaggggatggcaactccgatcctgaatctactttcatacctggactaaagaaagctgcagaaataactgttcaaccaactgtggaagaggcctctgacaactgcactcaagaatgtctcatctatggccattctgatgcctgctggatgccggcatctctggatcattccagctcttcgcaagcacaggcctctgctctatgccacagcccaccactgtcacaggcctctactcagcaccacagcccacgagtgacacagaccattgctctctgccacagccctccagtgacacagaccatcgcattgtgccacagcccaccaccgatacaggtgtctgctctccaccacagtcctcctctagtgcaggctactgcacttcaccacagcccaccatcagcacaggcctcagccctctgctacagccctcctttagcacaggctgctgcaatcagccacagctctcctctgccacaggttattgccctccatcgtagtcaggcccaatcatcagtcagtttgcagcaaggttgggtgcaaggtgctgatgggctatgctctgttgatcagggagtgcaaggtagtgcaacatctcagttttacaccatgtctgaaagacttcatcccagtgatgattcaattaaagtcattcctttgacaaccttcactccacgccaacaggccagaccgtccagaggtgattcccccattatggaagaacatcccttgtaaagctaaaatagttacttcaaattttcagaaaagatgtatatagtcaaaatttaagatacaattccaatgagtattctgattatcagatttgtaaataactatgtaaatagaaacagataccagaataaatctacagctagacccttagtcaatagttaaccaaaaaattgcaatttgtttaattcagaatgtgtatttaaaaagaaaaggaatttaacaatttgcatccccttgtacagtaaggcttatcatgacagagcgcactatttctgatgtacagtattttttgttgtttttatcatcatgtgcaatattactgatttgtttccatgctgattgtgtggaaccagtatgtagcaaatggaaagcctagaaatatcttattttctaagtttacctttagtttacctaaacttttgttcagataacgttaaaaggtatacgtactctagcctttttttgggctttctttttgatttttgtttgttgttttcagtttttttgttgttgttagtgagtctcccttcaaaatacgcagtaggtagtgtaaatactgcttgtttgtgtctctctgctgtcatgttttctaccttattccaatactatattgttgataaaatttgtatatacattttcaataaagaatatgtataaactgtacagatctagatctacaacctatttctctactctttagtagagttcgagacacagaagtgcaataactgccctaattaagcaactatttgttaaaaagggcctctttttactttaatagtttagtgtaaagtacatcagaaataaagctgtatctgccattttaagcctgtagtccattattacttgggtctttacttctgggaatttgtatgtaacagcctagaaaattaaaaggaggtggatgcatccaaagcacgagtcacttaaaatatcgacggtaaactactattttgtagagaaactcaggaagatttaaatgttgatttgacagctcaataggctgttaccaaagggtgttcagtaaaaataacaaatacatgtaactgtagataaaaccatatactaaatctataagactaagggatttttgttattctagctcaacttactgaagaaaaccactaataacaacaagaatatcaggaaggaacttttcaagaaatgtaattataaatctacatcaaacagaattttaaggaaaaatgcagagggagaaataaggcacatgactgcttcttgcagtcaacaagaaataccaataacacacacagaacaaaaaccatcaaaatctcatatatgaaataaaatatattcttctaagcaaagaaacagtactattcatagaaaacattagttttcttctgttgtctgttatttccttcttgtatcctcttaactggccattatcttgtatgtgcacattttataaatgtacagaaacatcaccaacttaattttcttccatagcaaaactgagaaaataccttgtttcagtataacactaaaccaagagacaattgatgtttaatgggggcggttggggtgggggggggagtcaatatctcctattgattaacttagacatagattttgtaatgtataacttgatatttaatttatgattaaactgtgtgtaaattttgtaacataaactgtggtaattgcataatttcattggtgaggatttccactgaatattgagaaagtttcttttcatgtgcccagcaggttaagtagcgttttcagaatatacattattcccatccattgtaaagttccttaagtcatatttgactgggcgtgcagaataacttcttaacttttaactatcagagtttgattaataaaattaattaatgttttttctccttcgtgttgttaatgttccaagggatttggagcatactggttttccaggtgcatgtgaatcccgaaggactgatgatatttgaatgtttattaaattattatcatacaaatgtgttgatattgtggctattgttgatgttgaaaattttaaacttggggaagattaagaaaagaaccaatagtgacaaaaatcagtgcttccagtagattttagaacattctttgcctcaaaaaacctgcaaagatgatgtgagattttttcttgtgttttaattattttcacattttctctctgcaaaactttagttttctgatgatctacacacacacacacacacacacgtgcacacacacacacatttaaatgatataaaaagaagaggttgaaagattattaaataacttatcaggcatctcaatggttactatctatgttagtgaaaatcaaataggactcaaagttggatatttgggatttttcttctgacagtataatttattgagttactagggaggttcttaaatcctcatatctggaaacttgtgacgttttgacacctttcctatagatgatataggaatgaaccaatacgcttttattaccctttctaactctgattttataatcagacttagattgtgtttagaatattaaatgactgggcaccctcttcttggtttttaccagagaggctttgaatggaagcaggctgagagtagccaaagaggcaaggggtattagcccagttattctcccctatgccttccttctctttctaagcgtccactaggtctggccttggaaacctgttacttctagggcttcagatctgatgatatctttttcatcacattacaagttatttctctgactgaatagacagtggtataggttgacacagcacacaagtggctattgtgatgtatgatgtatgtagtcctacaactgcaaaacgtcttactgaaccaacaatcaaaaaatggttctgttttaaaaaggattttgtttgatttgaaattaaaacttcaagctgaatgacttatatgagaataatacgttcaatcaaagtagttattctattttgtgtccatattccattagattgtgattattaattttctagctatggtattactatatcacacttgtgagtatgtattcaaatactaagtatcttatatgctacgtgcatacacattcttttcttaaactttacctgtgttttaactaatattgtgtcagtgtattaaaaattagcttttacatatgatatctacaatgtaataaatttagagagtaattttgtgtattcttatttacttaacattttacttttaattatgtaaatttggttagaaaataataataaatggttagtgctattgtgtaatggtagcagttacaaagagcctctgccttcccaaactaatatttatcacacatggtcattaaatgggaaaaaaatagactaaacaaatcacaaattgttcagttcttaaaatgtaattatgtcacacacacaaaaaatccttttcaatcctgagaaaattaaaggcgttttactcacatggctatttcaacattagttttttttgtttgtttctttttcatggtattactgaaggtgtgtatactccctaatacacatttatgaaaatctacttgtttaggcttttatttatactcttctgatttatattttttattataattattatttcttatctttcttcttttatattttttggaaaccaaatttatagttagtttaggtaaactttttattatgaccattagaaactattttgaatgcttccaactggctcaattggccgggaaaacatgggagcaagagaagctgaaatatatttctgcaagaacctttctatattatgtgccaattaccacaccagatcaattttatgcagaggccttaaaatattctttcacagtagctttcttacactaaccgtcatgtgcttttagtaaatatgatttttaaaagcagttcaagttgacaacagcagaaacagtaacaaaaaaatctgctcagaaaaatgtatgtgcacaaataaaaaaaattaatggcaattgtttagtgattgtaagtgatactttttaaagagtaaactgtgtgaaatttatactatccctgcttaaaatattaagatttttatgaaatatgtatttatgtttgtattgtgggaagattcctcctctgtgatatcatacagcatctgaaagtgaacagtatcccaaagcagttccaaccatgctttggaagtaagaaggttgactattgtatggccaaggatggcagtatgtaatccagaagcaaacttgtattaattgttctatttcaggttctgtattgcatgttttcttattaatatatattaataaaagttatgagaaataaa

SEQ ID NO: 172057 - DNA, 9146 bp, Homo sapiens
  Payload ID: 13801
  Gene Symbol: PCDH11X
  Gene Name: protocadherin 11 X-linked
  Uniprot ID: Q9BZA7
  ENST ID: ENST00000373097
  CDS Start-End: 846-4859
ctggtggtccagtacctccaaagatatggaatacactcctgaaatatcctgaaaacttttttttttcagaatcctttaataagcagttatgtcaatctgaaagttgcttacttgtactttatattaatagctattcttgtttttcttatccaaagaaaaatcctctaatccccttttcacatgatagttgttaccatgtttaggcattagtcacatcaacccctctcctctcccaaacttctcttcttcaaatcaaactttattagtccctcctttataatgattccttgcctcgttttatccagatcaattttttttcactttgatgcccagagctgaagaaatggactactgtataaattattcattgccaagagaataattgcattttaaacccatattataacaaagaataatgattatattttgtgatttgtaacaaataccctttattttcccttaactattgaattaaatattttaattatttgtattctctttaactatcttggtatattaaagtattatcttttatatatttatcaatggtggacacttttataggtactctgtgtcatttttgatactgtaggtatcttatttcatttatctttattcttaatgtacgaattcataatatttgattcagaacaaatttatcactaattaacagagtgtcaattatgctaacatctcatttactgattttaatttaaaacagtttttgttaacatgcatgtttagggttggcttcttaataatttcttcttcctcttctctctctcctcttcttttggtcagtgttgtgcgggttaatacaacaaactgtaacaagtgtacctggtatggacttgttgtccgggacgtacattttcgcggtcctgctagcatgcgtggtgttccactctggcgcccaggagaaaaactacaccatccgagaagaaatgccagaaaacgtcctgataggcgacttgttgaaagaccttaacttgtcgctgattccaaacaagtccttgacaactgctatgcagttcaagctagtgtacaagaccggagatgtgccactgattcgaattgaagaggatactggtgagatcttcactactggcgctcgcattgatcgtgagaaattatgtgctggtatcccaagggatgagcattgcttttatgaagtggaggttgccattttgccggatgaaatatttagactggttaagatacgttttctgatagaagatataaatgataatgcaccattgttcccagcaacagttatcaacatatcaattccagagaactcggctataaactctaaatatactctcccagcggctgttgatcctgacgtaggaataaacggagttcaaaactacgaactaattaagagtcaaaacatttttggcctcgatgtcattgaaacaccagaaggagacaagatgccacaactgattgttcaaaaggagttagatagggaagagaaggatacctacgtgatgaaagtaaaggttgaagatggtggctttcctcaaagatccagtactgctattttgcaagtgagtgttactgatacaaatgacaaccacccagtctttaaggagacagagattgaagtcagtataccagaaaatgctcctgtaggcacttcagtgacacagctccatgccacagatgctgacataggtgaaaatgccaagatccacttctctttcagcaatctagtctccaacattgccaggagattatttcacctcaatgccaccactggacttatcacaatcaaagaaccactggatagggaagaaacaccaaaccacaagttactggttttggcaagtgatggtggattgatgccagcaagagcaatggtgctggtaaatgttacagatgtcaatgataatgtcccatccattgacataagatacatcgtcaatcctgtcaatgacacagttgttctttcagaaaatattccactcaacaccaaaattgctctcataactgtgacggataaggatgcggaccataatggcagggtgacatgcttcacagatcatgaaatccctttcagattaaggccagtattcagtaatcagttcctcctggagactgcagcatatcttgactatgagtccacaaaagaatatgccattaaattactggctgcagatgctggcaaacctcctttgaatcagtcagcaatgctcttcatcaaagtgaaagatgaaaatgacaatgctccagttttcacccagtctttcgtaactgtttctattcctgagaataactctcctggcatccagttgacgaaagtaagtgcaatggatgcagacagtgggcctaatgctaagatcaattacctgctaggccctgatgctccacctgaattcagcctggattgtcgtacaggcatgctgactgtagtgaagaaactagatagagaaaaagaggataaatatttattcacaattctggcaaaagataacggggtaccacccttaaccagcaatgtcacagtctttgtaagcattattgatcagaatgacaatagcccagttttcactcacaatgaatacaacttctatgtcccagaaaaccttccaaggcatggtacagtaggactaatcactgtaactgatcctgattatggagacaattctgcagttacgctctccattttagatgagaatgatgacttcaccattgattcacaaactggtgtcatccgaccaaatatttcatttgatagagaaaaacaagaatcttacactttctatgtaaaggctgaggatggtggtagagtatcacgttcttcaagtgccaaagtaaccataaatgtggttgatgtcaatgacaacaaaccagttttcattgtccctccttccaactgttcttatgaattggttctaccgtccactaatccaggcacagtggtctttcaggtaattgctgttgacaatgacactggcatgaatgcagaggttcgttacagcattgtaggaggaaacacaagagatctgtttgcaatcgaccaagaaacaggcaacataacattgatggagaaatgtgatgttacagaccttggtttacacagagtgttggtcaaagctaatgacttaggacagcctgattctctcttcagtgttgtaattgtcaatctgttcgtgaatgagtcggtgaccaatgctacactgattaatgaactggtgcgcaaaagcactgaagcaccagtgaccccaaatactgagatagctgatgtatcctcaccaactagtgactatgtcaagatcctggttgcagctgttgctggcaccataactgtcgttgtagttattttcatcactgctgtagtaagatgtcgccaggcaccacaccttaaggctgctcagaaaaacaagcagaattctgaatgggctaccccaaacccagaaaacaggcagatgataatgatgaagaaaaagaaaaagaagaagaagcattcccctaagaacttgctgcttaattttgtcactattgaagaaactaaggcagatgatgttgacagtgatggaaacagagtcacactagaccttcctattgatctagaagagcaaacaatgggaaagtacaattgggtaactacacctactactttcaagcccgacagccctgatttggcccgacactacaaatctgcctctccacagcctgccttccaaattcagcctgaaactcccctgaattcgaagcaccacatcatccaagaactgcctctcgataacacctttgtggcctgtgactctatctccaagtgttcctcaagcagttcagatccctacagcgtttctgactgtggctatccagtgacgaccttcgaggtacctgtgtccgtacacaccagaccgccaatgaaggaggttgtgcgatcttgcacccccatgaaagagtctacaactatggagatctggattcatccccaaccacagtcccagcggcgtgtcacatttcacctgccagaaggctctcaggaaagcagcagtgatggtggactgggagaccatgatgcaggcagccttaccagcacatctcatggcctgccccttggctatcctcaggaggagtactttgatcgtgctacacccagcaatcgcactgaaggggatggcaactccgatcctgaatctactttcatacctggactaaagaaagctgcagaaataactgttcaaccaactgtggaagaggcctctgacaactgcactcaagaatgtctcatctatggccattctgatgcctgctggatgccggcatctctggatcattccagctcttcgcaagcacaggcctctgctctatgccacagcccaccactgtcacaggcctctactcagcaccacagcccacgagtgacacagaccattgctctctgccacagccctccagtgacacagaccatcgcattgtgccacagcccaccaccgatacaggtgtctgctctccaccacagtcctcctctagtgcaggctactgcacttcaccacagcccaccatcagcacaggcctcagccctctgctacagccctcctttagcacaggctgctgcaatcagccacagctctcctctgccacaggttattgccctccatcgtagtcaggcccaatcatcagtcagtttgcagcaaggttgggtgcaaggtgctgatgggctatgctctgttgatcagggagtgcaaggtagtgcaacatctcagttttacaccatgtctgaaagacttcatcccagtgatgattcaattaaagtcattcctttgacaaccttcactccacgccaacaggccagaccgtccagaggtgattcccccattatggaagaacatcccttgtaaagctaaaatagttacttcaaattttcagaaaagatgtatatagtcaaaatttaagatacaattccaatgagtattctgattatcagatttgtaaataactatgtaaatagaaacagataccagaataaatctacagctagacccttagtcaatagttaaccaaaaaattgcaatttgtttaattcagaatgtgtatttaaaaagaaaaggaatttaacaatttgcatccccttgtacagtaaggcttatcatgacagagcgcactatttctgatgtacagtattttttgttgtttttatcatcatgtgcaatattactgatttgtttccatgctgattgtgtggaaccagtatgtagcaaatggaaagcctagaaatatcttattttctaagtttacctttagtttacctaaacttttgttcagataacgttaaaaggtatacgtactctagcctttttttgggctttctttttgatttttgtttgttgttttcagtttttttgttgttgttagtgagtctcccttcaaaatacgcagtaggtagtgtaaatactgcttgtttgtgtctctctgctgtcatgttttctaccttattccaatactatattgttgataaaatttgtatatacattttcaataaagaatatgtataaactgtacagatctagatctacaacctatttctctactctttagtagagttcgagacacagaagtgcaataactgccctaattaagcaactatttgttaaaaagggcctctttttactttaatagtttagtgtaaagtacatcagaaataaagctgtatctgccattttaagcctgtagtccattattacttgggtctttacttctgggaatttgtatgtaacagcctagaaaattaaaaggaggtggatgcatccaaagcacgagtcacttaaaatatcgacggtaaactactattttgtagagaaactcaggaagatttaaatgttgatttgacagctcaataggctgttaccaaagggtgttcagtaaaaataacaaatacatgtaactgtagataaaaccatatactaaatctataagactaagggatttttgttattctagctcaacttactgaagaaaaccactaataacaacaagaatatcaggaaggaacttttcaagaaatgtaattataaatctacatcaaacagaattttaaggaaaaatgcagagggagaaataaggcacatgactgcttcttgcagtcaacaagaaataccaataacacacacagaacaaaaaccatcaaaatctcatatatgaaataaaatatattcttctaagcaaagaaacagtactattcatagaaaacattagttttcttctgttgtctgttatttccttcttgtatcctcttaactggccattatcttgtatgtgcacattttataaatgtacagaaacatcaccaacttaattttcttccatagcaaaactgagaaaataccttgtttcagtataacactaaaccaagagacaattgatgtttaatgggggcggttggggtgggggggggagtcaatatctcctattgattaacttagacatagattttgtaatgtataacttgatatttaatttatgattaaactgtgtgtaaattttgtaacataaactgtggtaattgcataatttcattggtgaggatttccactgaatattgagaaagtttcttttcatgtgcccagcaggttaagtagcgttttcagaatatacattattcccatccattgtaaagttccttaagtcatatttgactgggcgtgcagaataacttcttaacttttaactatcagagtttgattaataaaattaattaatgttttttctccttcgtgttgttaatgttccaagggatttggagcatactggttttccaggtgcatgtgaatcccgaaggactgatgatatttgaatgtttattaaattattatcatacaaatgtgttgatattgtggctattgttgatgttgaaaattttaaacttggggaagattaagaaaagaaccaatagtgacaaaaatcagtgcttccagtagattttagaacattctttgcctcaaaaaacctgcaaagatgatgtgagattttttcttgtgttttaattattttcacattttctctctgcaaaactttagttttctgatgatctacacacacacacacacacacacgtgcacacacacacacatttaaatgatataaaaagaagaggttgaaagattattaaataacttatcaggcatctcaatggttactatctatgttagtgaaaatcaaataggactcaaagttggatatttgggatttttcttctgacagtataatttattgagttactagggaggttcttaaatcctcatatctggaaacttgtgacgttttgacacctttcctatagatgatataggaatgaaccaatacgcttttattaccctttctaactctgattttataatcagacttagattgtgtttagaatattaaatgactgggcaccctcttcttggtttttaccagagaggctttgaatggaagcaggctgagagtagccaaagaggcaaggggtattagcccagttattctcccctatgccttccttctctttctaagcgtccactaggtctggccttggaaacctgttacttctagggcttcagatctgatgatatctttttcatcacattacaagttatttctctgactgaatagacagtggtataggttgacacagcacacaagtggctattgtgatgtatgatgtatgtagtcctacaactgcaaaacgtcttactgaaccaacaatcaaaaaatggttctgttttaaaaaggattttgtttgatttgaaattaaaacttcaagctgaatgacttatatgagaataatacgttcaatcaaagtagttattctattttgtgtccatattccattagattgtgattattaattttctagctatggtattactatatcacacttgtgagtatgtattcaaatactaagtatcttatatgctacgtgcatacacattcttttcttaaactttacctgtgttttaactaatattgtgtcagtgtattaaaaattagcttttacatatgatatctacaatgtaataaatttagagagtaattttgtgtattcttatttacttaacattttacttttaattatgtaaatttggttagaaaataataataaatggttagtgctattgtgtaatggtagcagttacaaagagcctctgccttcccaaactaatatttatcacacatggtcattaaatgggaaaaaaatagactaaacaaatcacaaattgttcagttcttaaaatgtaattatgtcacacacacaaaaaatccttttcaatcctgagaaaattaaaggcgttttactcacatggctatttcaacattagttttttttgtttgtttctttttcatggtattactgaaggtgtgtatactccctaatacacatttatgaaaatctacttgtttaggcttttatttatactcttctgatttatattttttattataattattatttcttatctttcttcttttatattttttggaaaccaaatttatagttagtttaggtaaactttttattatgaccattagaaactattttgaatgcttccaactggctcaattggccgggaaaacatgggagcaagagaagctgaaatatatttctgcaagaacctttctatattatgtgccaattaccacaccagatcaattttatgcagaggccttaaaatattctttcacagtagctttcttacactaaccgtcatgtgcttttagtaaatatgatttttaaaagcagttcaagttgacaacagcagaaacagtaacaaaaaaatctgctcagaaaaatgtatgtgcacaaataaaaaaaattaatggcaattgtttagtgattgtaagtgatactttttaaagagtaaactgtgtgaaatttatactatccctgcttaaaatattaagatttttatgaaatatgtatttatgtttgtattgtgggaagattcctcctctgtgatatcatacagcatctgaaagtgaacagtatcccaaagcagttccaaccatgctttggaagtaagaaggttgactattgtatggccaaggatggcagtatgtaatccagaagcaaacttgtattaattgttctatttcaggttctgtattgcatgttttcttattaatatatattaataaaagttatgagaaat

SEQ ID NO: 172058 - DNA, 3637 bp, Homo sapiens
  Payload ID: 13801
  Gene Symbol: PCDH11X
  Gene Name: protocadherin 11 X-linked
  ENST ID: ENST00000395337
  CDS Start-End: 590-3637
cccctttctccccctcggttaagtccctccccctcgccattcaaaagggctggctcggcactggctccttgcagtcggcgaactgtcggggcgggaggagccgtgagcagtagctgcactcagctgcccgcgcggcaaagaggaaggcaagccaaacagagtgcgcagagtggcagtgccagcggcgacacaggcagcacaggcagcccgggctgcctgaatagcctcagaaacaacctcagcgactccggctgctctgcggactgcgagctgtggcggtagagcccgctacagcagtcgcagtctccgtggagcgggcggaagccttttttctccctttcgtttacctcttcattctactctaaaggcatcgttattaggaaaatcctgttgcgaataagaaggattccacagatcacataccggagaggttttgcctcagctgctctcaactttgtaatcttgtgaagaagctgacaagcttggctgattgcagagcactatgaggactgaacgacagtgggttttaattcagatatttcaagtgttgtgcgggttaatacaacaaactgtaacaagtgtacctggtatggacttgttgtccgggacgtacattttcgcggtcctgctagcatgcgtggtgttccactctggcgcccaggagaaaaactacaccatccgagaagaaatgccagaaaacgtcctgataggcgacttgttgaaagaccttaacttgtcgctgattccaaacaagtccttgacaactgctatgcagttcaagctagtgtacaagaccggagatgtgccactgattcgaattgaagaggatactggtgagatcttcactactggcgctcgcattgatcgtgagaaattatgtgctggtatcccaagggatgagcattgcttttatgaagtggaggttgccattttgccggatgaaatatttagactggttaagatacgttttctgatagaagatataaatgataatgcaccattgttcccagcaacagttatcaacatatcaattccagagaactcggctataaactctaaatatactctcccagcggctgttgatcctgacgtaggaataaacggagttcaaaactacgaactaattaagagtcaaaacatttttggcctcgatgtcattgaaacaccagaaggagacaagatgccacaactgattgttcaaaaggagttagatagggaagagaaggatacctacgtgatgaaagtaaaggttgaagatggtggctttcctcaaagatccagtactgctattttgcaagtgagtgttactgatacaaatgacaaccacccagtctttaaggagacagagattgaagtcagtataccagaaaatgctcctgtaggcacttcagtgacacagctccatgccacagatgctgacataggtgaaaatgccaagatccacttctctttcagcaatctagtctccaacattgccaggagattatttcacctcaatgccaccactggacttatcacaatcaaagaaccactggatagggaagaaacaccaaaccacaagttactggttttggcaagtgatggtggattgatgccagcaagagcaatggtgctggtaaatgttacagatgtcaatgataatgtcccatccattgacataagatacatcgtcaatcctgtcaatgacacagttgttctttcagaaaatattccactcaacaccaaaattgctctcataactgtgacggataaggatgcggaccataatggcagggtgacatgcttcacagatcatgaaatccctttcagattaaggccagtattcagtaatcagttcctcctggagactgcagcatatcttgactatgagtccacaaaagaatatgccattaaattactggctgcagatgctggcaaacctcctttgaatcagtcagcaatgctcttcatcaaagtgaaagatgaaaatgacaatgctccagttttcacccagtctttcgtaactgtttctattcctgagaataactctcctggcatccagttgacgaaagtaagtgcaatggatgcagacagtgggcctaatgctaagatcaattacctgctaggccctgatgctccacctgaattcagcctggattgtcgtacaggcatgctgactgtagtgaagaaactagatagagaaaaagaggataaatatttattcacaattctggcaaaagataacggggtaccacccttaaccagcaatgtcacagtctttgtaagcattattgatcagaatgacaatagcccagttttcactcacaatgaatacaacttctatgtcccagaaaaccttccaaggcatggtacagtaggactaatcactgtaactgatcctgattatggagacaattctgcagttacgctctccattttagatgagaatgatgacttcaccattgattcacaaactggtgtcatccgaccaaatatttcatttgatagagaaaaacaagaatcttacactttctatgtaaaggctgaggatggtggtagagtatcacgttcttcaagtgccaaagtaaccataaatgtggttgatgtcaatgacaacaaaccagttttcattgtccctccttccaactgttcttatgaattggttctaccgtccactaatccaggcacagtggtctttcaggtaattgctgttgacaatgacactggcatgaatgcagaggttcgttacagcattgtaggaggaaacacaagagatctgtttgcaatcgaccaagaaacaggcaacataacattgatggagaaatgtgatgttacagaccttggtttacacagagtgttggtcaaagctaatgacttaggacagcctgattctctcttcagtgttgtaattgtcaatctgttcgtgaatgagtcggtgaccaatgctacactgattaatgaactggtgcgcaaaagcactgaagcaccagtgaccccaaatactgagatagctgatgtatcctcaccaactagtgactatgtcaagatcctggttgcagctgttgctggcaccataactgtcgttgtagttattttcatcactgctgtagtaagatgtcgccaggcaccacaccttaaggctgctcagaaaaacaagcagaattctgaatgggctaccccaaacccagaaaacaggcagatgataatgatgaagaaaaagaaaaagaagaagaagcattcccctaagaacttgctgcttaattttgtcactattgaagaaactaaggcagatgatgttgacagtgatggaaacagagtcacactagaccttcctattgatctagaagagcaaacaatgggaaagtacaattgggtaactacacctactactttcaagcccgacagccctgatttggcccgacactacaaatctgcctctccacagcctgccttccaaattcagcctgaaactcccctgaattcgaagcaccacatcatccaagaactgcctctcgataacacctttgtggcctgtgactctatctccaagtgttcctcaagcagttcagatccctacagcgtttctgactgtggctatccagtgacgaccttcgaggtacctgtgtccgtacacaccagaccggcacaaagaaaactg

SEQ ID NO: 172059 - DNA, 4156 bp, Homo sapiens
  Payload ID: 13801
  Gene Symbol: PCDH11X
  Gene Name: protocadherin 11 X-linked
  Uniprot ID: Q9BZA7
  ENST ID: ENST00000406881
  CDS Start-End: 1-4020
atggacttgttgtccgggacgtacattttcgcggtcctgctagcatgcgtggtgttccactctggcgcccaggagaaaaactacaccatccgagaagaaatgccagaaaacgtcctgataggcgacttgttgaaagaccttaacttgtcgctgattccaaacaagtccttgacaactgctatgcagttcaagctagtgtacaagaccggagatgtgccactgattcgaattgaagaggatactggtgagatcttcactactggcgctcgcattgatcgtgagaaattatgtgctggtatcccaagggatgagcattgcttttatgaagtggaggttgccattttgccggatgaaatatttagactggttaagatacgttttctgatagaagatataaatgataatgcaccattgttcccagcaacagttatcaacatatcaattccagagaactcggctataaactctaaatatactctcccagcggctgttgatcctgacgtaggaataaacggagttcaaaactacgaactaattaagagtcaaaacatttttggcctcgatgtcattgaaacaccagaaggagacaagatgccacaactgattgttcaaaaggagttagatagggaagagaaggatacctacgtgatgaaagtaaaggttgaagatggtggctttcctcaaagatccagtactgctattttgcaagtgagtgttactgatacaaatgacaaccacccagtctttaaggagacagagattgaagtcagtataccagaaaatgctcctgtaggcacttcagtgacacagctccatgccacagatgctgacataggtgaaaatgccaagatccacttctctttcagcaatctagtctccaacattgccaggagattatttcacctcaatgccaccactggacttatcacaatcaaagaaccactggatagggaagaaacaccaaaccacaagttactggttttggcaagtgatggtggattgatgccagcaagagcaatggtgctggtaaatgttacagatgtcaatgataatgtcccatccattgacataagatacatcgtcaatcctgtcaatgacacagttgttctttcagaaaatattccactcaacaccaaaattgctctcataactgtgacggataaggatgcggaccataatggcagggtgacatgcttcacagatcatgaaatccctttcagattaaggccagtattcagtaatcagttcctcctggagactgcagcatatcttgactatgagtccacaaaagaatatgccattaaattactggctgcagatgctggcaaacctcctttgaatcagtcagcaatgctcttcatcaaagtgaaagatgaaaatgacaatgctccagttttcacccagtctttcgtaactgtttctattcctgagaataactctcctggcatccagttgacgaaagtaagtgcaatggatgcagacagtgggcctaatgctaagatcaattacctgctaggccctgatgctccacctgaattcagcctggattgtcgtacaggcatgctgactgtagtgaagaaactagatagagaaaaagaggataaatatttattcacaattctggcaaaagataacggggtaccacccttaaccagcaatgtcacagtctttgtaagcattattgatcagaatgacaatagcccagttttcactcacaatgaatacaacttctatgtcccagaaaaccttccaaggcatggtacagtaggactaatcactgtaactgatcctgattatggagacaattctgcagttacgctctccattttagatgagaatgatgacttcaccattgattcacaaactggtgtcatccgaccaaatatttcatttgatagagaaaaacaagaatcttacactttctatgtaaaggctgaggatggtggtagagtatcacgttcttcaagtgccaaagtaaccataaatgtggttgatgtcaatgacaacaaaccagttttcattgtccctccttccaactgttcttatgaattggttctaccgtccactaatccaggcacagtggtctttcaggtaattgctgttgacaatgacactggcatgaatgcagaggttcgttacagcattgtaggaggaaacacaagagatctgtttgcaatcgaccaagaaacaggcaacataacattgatggagaaatgtgatgttacagaccttggtttacacagagtgttggtcaaagctaatgacttaggacagcctgattctctcttcagtgttgtaattgtcaatctgttcgtgaatgagtcggtgaccaatgctacactgattaatgaactggtgcgcaaaagcactgaagcaccagtgaccccaaatactgagatagctgatgtatcctcaccaactagtgactatgtcaagatcctggttgcagctgttgctggcaccataactgtcgttgtagttattttcatcactgctgtagtaagatgtcgccaggcaccacaccttaaggctgctcagaaaaacaagcagaattctgaatgggctaccccaaacccagaaaacaggcagatgataatgatgaagaaaaagaaaaagaagaagaagcattcccctaagaacttgctgcttaattttgtcactattgaagaaactaaggcagatgatgttgacagtgatggaaacagagtcacactagaccttcctattgatctagaagagcaaacaatgggaaagtacaattgggtaactacacctactactttcaagcccgacagccctgatttggcccgacactacaaatctgcctctccacagcctgccttccaaattcagcctgaaactcccctgaattcgaagcaccacatcatccaagaactgcctctcgataacacctttgtggcctgtgactctatctccaagtgttcctcaagcagttcagatccctacagcgtttctgactgtggctatccagtgacgaccttcgaggtacctgtgtccgtacacaccagaccgccaatgaaggaggttgtgcgatcttgcacccccatgaaagagtctacaactatggagatctggattcatccccaaccacagcggaaatctgaagggaaagtggcaggaaagtcccagcggcgtgtcacatttcacctgccagaaggctctcaggaaagcagcagtgatggtggactgggagaccatgatgcaggcagccttaccagcacatctcatggcctgccccttggctatcctcaggaggagtactttgatcgtgctacacccagcaatcgcactgaaggggatggcaactccgatcctgaatctactgcagaaataactgttcaaccaactgtggaagaggcctctgacaactgcactcaagaatgtctcatctatggccattctgatgcctgctggatgccggcatctctggatcattccagctcttcgcaagcacaggcctctgctctatgccacagcccaccactgtcacaggcctctactcagcaccacagcccacgagtgacacagaccattgctctctgccacagccctccagtgacacagaccatcgcattgtgccacagcccaccaccgatacaggtgtctgctctccaccacagtcctcctctagtgcaggctactgcacttcaccacagcccaccatcagcacaggcctcagccctctgctacagccctcctttagcacaggctgctgcaatcagccacagctctcctctgccacaggttattgccctccatcgtagtcaggcccaatcatcagtcagtttgcagcaaggttgggtgcaaggtgctgatgggctatgctctgttgatcagggagtgcaaggtagtgcaacatctcagttttacaccatgtctgaaagacttcatcccagtgatgattcaattaaagtcattcctttgacaaccttcactccacgccaacaggccagaccgtccagaggtgattcccccattatggaagaacatcccttgtaaagctaaaatagttacttcaaattttcagaaaagatgtatatagtcaaaatttaagatacaattccaatgagtattctgattatcagatttgtaaataactatgtaaatagaaacagataccagaataaatctacag

SEQ ID NO: 172060 - DNA, 4017 bp, Homo sapiens
  Payload ID: 13801
  Gene Symbol: PCDH11X
  Gene Name: protocadherin 11 X-linked
  Uniprot ID: Q9BZA7
  ENST ID: ENST00000504220
  CDS Start-End: 1-3198
atggacttgttgtccgggacgtacattttcgcggtcctgctagcatgcgtggtgttccactctggcgcccaggagaaaaactacaccatccgagaagaaatgccagaaaacgtcctgataggcgacttgttgaaagaccttaacttgtcgctgattccaaacaagtccttgacaactgctatgcagttcaagctagtgtacaagaccggagatgtgccactgattcgaattgaagaggatactggtgagatcttcactactggcgctcgcattgatcgtgagaaattatgtgctggtatcccaagggatgagcattgcttttatgaagtggaggttgccattttgccggatgaaatatttagactggttaagatacgttttctgatagaagatataaatgataatgcaccattgttcccagcaacagttatcaacatatcaattccagagaactcggctataaactctaaatatactctcccagcggctgttgatcctgacgtaggaataaacggagttcaaaactacgaactaattaagagtcaaaacatttttggcctcgatgtcattgaaacaccagaaggagacaagatgccacaactgattgttcaaaaggagttagatagggaagagaaggatacctacgtgatgaaagtaaaggttgaagatggtggctttcctcaaagatccagtactgctattttgcaagtgagtgttactgatacaaatgacaaccacccagtctttaaggagacagagattgaagtcagtataccagaaaatgctcctgtaggcacttcagtgacacagctccatgccacagatgctgacataggtgaaaatgccaagatccacttctctttcagcaatctagtctccaacattgccaggagattatttcacctcaatgccaccactggacttatcacaatcaaagaaccactggatagggaagaaacaccaaaccacaagttactggttttggcaagtgatggtggattgatgccagcaagagcaatggtgctggtaaatgttacagatgtcaatgataatgtcccatccattgacataagatacatcgtcaatcctgtcaatgacacagttgttctttcagaaaatattccactcaacaccaaaattgctctcataactgtgacggataaggatgcggaccataatggcagggtgacatgcttcacagatcatgaaatccctttcagattaaggccagtattcagtaatcagttcctcctggagactgcagcatatcttgactatgagtccacaaaagaatatgccattaaattactggctgcagatgctggcaaacctcctttgaatcagtcagcaatgctcttcatcaaagtgaaagatgaaaatgacaatgctccagttttcacccagtctttcgtaactgtttctattcctgagaataactctcctggcatccagttgacgaaagtaagtgcaatggatgcagacagtgggcctaatgctaagatcaattacctgctaggccctgatgctccacctgaattcagcctggattgtcgtacaggcatgctgactgtagtgaagaaactagatagagaaaaagaggataaatatttattcacaattctggcaaaagataacggggtaccacccttaaccagcaatgtcacagtctttgtaagcattattgatcagaatgacaatagcccagttttcactcacaatgaatacaacttctatgtcccagaaaaccttccaaggcatggtacagtaggactaatcactgtaactgatcctgattatggagacaattctgcagttacgctctccattttagatgagaatgatgacttcaccattgattcacaaactggtgtcatccgaccaaatatttcatttgatagagaaaaacaagaatcttacactttctatgtaaaggctgaggatggtggtagagtatcacgttcttcaagtgccaaagtaaccataaatgtggttgatgtcaatgacaacaaaccagttttcattgtccctccttccaactgttcttatgaattggttctaccgtccactaatccaggcacagtggtctttcaggtaattgctgttgacaatgacactggcatgaatgcagaggttcgttacagcattgtaggaggaaacacaagagatctgtttgcaatcgaccaagaaacaggcaacataacattgatggagaaatgtgatgttacagaccttggtttacacagagtgttggtcaaagctaatgacttaggacagcctgattctctcttcagtgttgtaattgtcaatctgttcgtgaatgagtcggtgaccaatgctacactgattaatgaactggtgcgcaaaagcactgaagcaccagtgaccccaaatactgagatagctgatgtatcctcaccaactagtgactatgtcaagatcctggttgcagctgttgctggcaccataactgtcgttgtagttattttcatcactgctgtagtaagatgtcgccaggcaccacaccttaaggctgctcagaaaaacaagcagaattctgaatgggctaccccaaacccagaaaacaggcagatgataatgatgaagaaaaagaaaaagaagaagaagcattcccctaagaacttgctgcttaattttgtcactattgaagaaactaaggcagatgatgttgacagtgatggaaacagagtcacactagaccttcctattgatctagaagagcaaacaatgggaaagtacaattgggtaactacacctactactttcaagcccgacagccctgatttggcccgacactacaaatctgcctctccacagcctgccttccaaattcagcctgaaactcccctgaattcgaagcaccacatcatccaagaactgcctctcgataacacctttgtggcctgtgactctatctccaagtgttcctcaagcagttcagatccctacagcgtttctgactgtggctatccagtgacgaccttcgaggtacctgtgtccgtacacaccagaccgccaatgaaggaggttgtgcgatcttgcacccccatgaaagagtctacaactatggagatctggattcatccccaaccacagcggaaatctgaagggaaagtggcaggaaagactgtgcttacttcctcttccccttctgccatgaccctttcatacctggactaaagaaagctgcagaaataactgttcaaccaactgtggaagaggcctctgacaactgcactcaagaatgtctcatctatggccattctgatgcctgctggatgccggcatctctggatcattccagctcttcgcaagcacaggcctctgctctatgccacagcccaccactgtcacaggcctctactcagcaccacagcccacgagtgacacagaccattgctctctgccacagccctccagtgacacagaccatcgcattgtgccacagcccaccaccgatacaggtgtctgctctccaccacagtcctcctctagtgcaggctactgcacttcaccacagcccaccatcagcacaggcctcagccctctgctacagccctcctttagcacaggctgctgcaatcagccacagctctcctctgccacaggttattgccctccatcgtagtcaggcccaatcatcagtcagtttgcagcaaggttgggtgcaaggtgctgatgggctatgctctgttgatcagggagtgcaaggtagtgcaacatctcagttttacaccatgtctgaaagacttcatcccagtgatgattcaattaaagtcattcctttgacaaccttcactccacgccaacaggccagaccgtccagaggtgattcccccattatggaagaacatcccttgtaaagctaaaatagttacttcaaattttcagaaaagatgtatatagtcaaaatttaagatacaattccaatgagtattctgattatcagatttgtaaataactatgtaaatagaaacagataccagaataaatctacag

SEQ ID NO: 172061 - DNA, 4595 bp, Homo sapiens
  Payload ID: 13802
  Gene Symbol: PCDH11Y
  Gene Name: protocadherin 11 Y-linked
  Uniprot ID: Q9BZA8
  ENST ID: ENST00000215473
  CDS Start-End: 737-3898
ctggtggtccagtacctccaaagatatggaatacactcctgaaatatcctgaaaccttttttttttcagaatcctttaataagcagttatgtcaatctgaaagttgcttacttgtactttatattaatagctattcttgtttttcttatccaaagaaaaatcctctaatccccttttcacatgatagttgttaccatgtttaggcgttagtcacatcaacccctctcctctcccaaacttctcttcttcaaatcaaactttattagtccctcctttataatgattccttgcctccttttatccagatcaattttttttcactttgatgcccagagctgaagaaatggactattgtataaattattcattgccaagagaataattgcattttaaacccatgttataacaaagaataatgattatattttgtgatttgtaacaaataccctttattttcccttaactattgaattaaatattttaattatttgtattctctttaactatcttggtatattaaagtattatcttttatatatttatcaatggtggacacttttataggtactctgtgtcatttttgatactgtaggtatcttatttcatttatctttattcttaatgtacgaattcataatatttgattcagaacagatttatcactaattaacagagtgtcaattatgctaacatctcatttactgattttaatttaaaacagtttttgttaacatgcatgtttagggttggcttcttaataatttcttcttcctcttctctctctcctcttcttttggtcagtgttgtgcgggttaatacaacaaactgtcacaagtgtttgttgtccgggacgtacattttcgcggtcctgctagtatgcgtggtgttccactctggcgcccaggagaaaaactacaccatccgagaagaaattccagaaaacgtcctgataggcaacttgttgaaagaccttaacttgtcgctgattccaaacaagtccttgacaactactatgcagttcaagctagtgtacaagaccggagatgtgccactgattcgaattgaagaggatactggtgagatcttcactaccggcgctcgcattgatcgtgagaaattatgtgctggtatcccaagggatgagcattgcttttatgaagtggaggttgccattttgccggatgaaatatttagactggttaagatacgttttctgatagaagatataaatgataatgcaccattgttcccagcaacagttatcaacatatcaattccagagaactcggctataaactctaaatatactctcccagcggctgttgatcctgacgtaggcataaacggagttcaaaactacgaactaattaagagtcaaaacatttttggcctcgatgtcattgaaacaccagaaggagacaagatgccacaactgattgttcaaaaggagttagatagggaagagaaggatacctatgtgatgaaagtaaaggttgaagatggtggctttcctcaaagatccagtactgctattttgcaagtaagtgttactgatacaaatgacaaccacccagtctttaaggagacagagattgaagtcagtataccagaaaatgctcctgtaggcacttcagtgacacagctccatgccacagatgctgacataggtgaaaatgccaagatccacttctctttcagcaatctagtctccaacattgccaggagattatttcacctcaatgccaccactggacttatcacaatcaaagaaccactggatagggaagaaacaccaaaccacaagttactggttttggcaagtgatggtggattgatgccagcaagagcaatggtgctggtaaatgttacagatgtcaatgataatgtcccatccattgacataagatacatcgtcaatcctgtcaatgacacagttgttctttcagaaaatattccactcaacaccaaaattgctctcataactgtgacggataaggatgcggaccataatggcagggtgacatgcttcacagatcatgaaattcctttcagattaaggccagtattcagtaatcagttcctcctggagaatgcagcatatcttgactatgagtccacaaaagaatatgccattaaattactggctgcagatgctggcaaacctcctttgaatcagtcagcaatgctcttcatcaaagtgaaagatgaaaatgacaatgctccagttttcacccagtctttcgtaactgtttctattcctgagaataactctcctggcatccagttgatgaaagtaagtgcaacggatgcagacagtgggcctaatgctgagatcaattacctgctaggccctgatgctccacctgaattcagcctggatcgtcgtacaggcatgctgactgtagtgaagaaactagatagagaaaaagaggataaatatttattcacaattctggcaaaagataatggggtaccacccttaaccagcaatgtcacagtctttgtaagcattattgatcagaatgacaatagcccagttttcactcacaatgaatacaaattctatgtcccagaaaaccttccaaggcatggtacagtaggactaatcactgtaactgatcctgattatggagacaattctgcagttacgctctccattttagatgagaatgatgacttcaccattgattcacaaactggtgtcatccgaccaaatatttcatttgatagagaaaaacaagaatcttacactttctatgtaaaggctgaggatggtggtagagtatcacgttcttcaagtgccaaagtaaccataaatgtggttgatgtcaatgacaacaaaccagttttcattgtccctccttacaactattcttatgaattggttctaccgtccactaatccaggcacagtggtctttcaggtaattgctgttgacaatgacactggcatgaatgcagaggttcgttacagcattgtaggaggaaacacaagagatctgtttgcaatcgaccaagaaacaggcaacataacattgatggagaaatgtgatgttacagaccttggtttacacagagtgttggtcaaagctaatgacttaggacagcctgattctctcttcagtgttgtaattgtcaatctgttcgtgaatgagtcagtgaccaatgctacactgattaatgaactggtgcgcaaaagcattgaagcaccagtgaccccaaatactgagatagctgatgtatcctcaccaactagtgactatgtcaagatcctggttgcagctgttgctggcaccataactgtcgttgtagttattttcatcactgctgtagtaagatgtcgccaggcaccacaccttaaggctgctcagaaaaacatgcagaattctgaatgggctaccccaaacccagaaaacaggcagatgataatgatgaagaaaaagaaaaagaagaagaagcattcccctaagaacctgctgcttaatgttgtcactattgaagaaactaaggcagatgatgttgacagtgatggaaacagagtcacactagaccttcctattgatctagaagagcaaacaatgggaaagtacaattgggtaactacacctactactttcaagcctgacagccctgatttggcccgacactacaaatctgcctctccacagcctgccttccaaattcagcctgaaactcccctgaatttgaagcaccacatcatccaagaactgcctctcgataacacctttgtggcctgtgactctatctccaattgttcctcaagcagttcagatccctacagcgtttctgactgtggctatccagtgacaaccttcgaggtacctgtgtccgtacacaccagaccggtaggtatccaagtttctaacacaactttctaactatttttttattattattttcagttgatgtagaactttacaaaatctattgacttcaaagagggatcaaaacaatcatattctacagatgtacccaatagatatatggattcaattaagtttggtagaagatgagaacaaaataactactgatttaggaaaattggatgcagaataataattatagtaggggcaattttgtctgtagatggcagtatgacaattcttgctagaaaatatattgaaaaaaacttcaacacaaagggttgtagcactgtcctcagtaccattgtgggcatgaggatcagaatagtctgggctagatacatcacattaaagcttttcagaatctgataaatagctctaaatactaatgatattgagaagcctagcttcacttgggaaaatctgtggctgttcacagaaattcagcaccaagatattccccccatactctaccaggccttcaggtcctcataaagaaaagtgtcgttttcagattaggaactcaaaattattttggtgcatcaaatctacagtaacacaatataacaagaatgggattagaaaaatgaaagcctactcattctcatctttaagccagagaatgaaatatatatgaggtctctactttagatagctatttaaatatttgcatatttatgcaaggtattttgagcccttcagaagacattct

SEQ ID NO: 172062 - DNA, 4710 bp, Homo sapiens
  Payload ID: 13802
  Gene Symbol: PCDH11Y
  Gene Name: protocadherin 11 Y-linked
  Uniprot ID: Q9BZA8
  ENST ID: ENST00000333703
  CDS Start-End: 514-3627
cccctttctccccctctgttaagtccctccccctcgccattcaaaagggctggctcggcactggctccttgcagtcggcgaactgtctgggcgggaggagccgtgagcagtagctgcactcagctgcccgcgcggcaaagaggaaggcaagccaaacagagtgcgcagagtggcagtgccagcggcgacacaggcagcacaggcagcccgggctgcctgaatagcctcagaaacaacctcagcgactccggctgctctgcggactgcgagctgtggcggtagagcccgctacagcagtcgcagtctccgtggagcgggcggaagccttttttctccctttcgtttacctcttcattctactctaaaggcatcgttattaggaaaatcctgttgtgaataagaaggattccacagatcacataccagagcggttttgcctcagctgctctcaactttgtaatcttgtgaagaagctgacaagcttggctgattgcagtgcactatgaggactgaatgacagtgggttttaattcagatatttcaagtgttgtgcgggttaatacaacaaactgtcacaagtgtttgttgtccgggacgtacattttcgcggtcctgctagtatgcgtggtgttccactctggcgcccaggagaaaaactacaccatccgagaagaaattccagaaaacgtcctgataggcaacttgttgaaagaccttaacttgtcgctgattccaaacaagtccttgacaactactatgcagttcaagctagtgtacaagaccggagatgtgccactgattcgaattgaagaggatactggtgagatcttcactaccggcgctcgcattgatcgtgagaaattatgtgctggtatcccaagggatgagcattgcttttatgaagtggaggttgccattttgccggatgaaatatttagactggttaagatacgttttctgatagaagatataaatgataatgcaccattgttcccagcaacagttatcaacatatcaattccagagaactcggctataaactctaaatatactctcccagcggctgttgatcctgacgtaggcataaacggagttcaaaactacgaactaattaagagtcaaaacatttttggcctcgatgtcattgaaacaccagaaggagacaagatgccacaactgattgttcaaaaggagttagatagggaagagaaggatacctatgtgatgaaagtaaaggttgaagatggtggctttcctcaaagatccagtactgctattttgcaagtaagtgttactgatacaaatgacaaccacccagtctttaaggagacagagattgaagtcagtataccagaaaatgctcctgtaggcacttcagtgacacagctccatgccacagatgctgacataggtgaaaatgccaagatccacttctctttcagcaatctagtctccaacattgccaggagattatttcacctcaatgccaccactggacttatcacaatcaaagaaccactggatagggaagaaacaccaaaccacaagttactggttttggcaagtgatggtggattgatgccagcaagagcaatggtgctggtaaatgttacagatgtcaatgataatgtcccatccattgacataagatacatcgtcaatcctgtcaatgacacagttgttctttcagaaaatattccactcaacaccaaaattgctctcataactgtgacggataaggatgcggaccataatggcagggtgacatgcttcacagatcatgaaattcctttcagattaaggccagtattcagtaatcagttcctcctggagaatgcagcatatcttgactatgagtccacaaaagaatatgccattaaattactggctgcagatgctggcaaacctcctttgaatcagtcagcaatgctcttcatcaaagtgaaagatgaaaatgacaatgctccagttttcacccagtctttcgtaactgtttctattcctgagaataactctcctggcatccagttgatgaaagtaagtgcaacggatgcagacagtgggcctaatgctgagatcaattacctgctaggccctgatgctccacctgaattcagcctggatcgtcgtacaggcatgctgactgtagtgaagaaactagatagagaaaaagaggataaatatttattcacaattctggcaaaagataatggggtaccacccttaaccagcaatgtcacagtctttgtaagcattattgatcagaatgacaatagcccagttttcactcacaatgaatacaaattctatgtcccagaaaaccttccaaggcatggtacagtaggactaatcactgtaactgatcctgattatggagacaattctgcagttacgctctccattttagatgagaatgatgacttcaccattgattcacaaactggtgtcatccgaccaaatatttcatttgatagagaaaaacaagaatcttacactttctatgtaaaggctgaggatggtggtagagtatcacgttcttcaagtgccaaagtaaccataaatgtggttgatgtcaatgacaacaaaccagttttcattgtccctccttacaactattcttatgaattggttctaccgtccactaatccaggcacagtggtctttcaggtaattgctgttgacaatgacactggcatgaatgcagaggttcgttacagcattgtaggaggaaacacaagagatctgtttgcaatcgaccaagaaacaggcaacataacattgatggagaaatgtgatgttacagaccttggtttacacagagtgttggtcaaagctaatgacttaggacagcctgattctctcttcagtgttgtaattgtcaatctgttcgtgaatgagtcagtgaccaatgctacactgattaatgaactggtgcgcaaaagcattgaagcaccagtgaccccaaatactgagatagctgatgtatcctcaccaactagtgactatgtcaagatcctggttgcagctgttgctggcaccataactgtcgttgtagttattttcatcactgctgtagtaagatgtcgccaggcaccacaccttaaggctgctcagaaaaacatgcagaattctgaatgggctaccccaaacccagaaaacaggcagatgataatgatgaagaaaaagaaaaagaagaagaagcattcccctaagaacctgctgcttaatgttgtcactattgaagaaactaaggcagatgatgttgacagtgatggaaacagagtcacactagaccttcctattgatctagaagagcaaacaatgggaaagtacaattgggtaactacacctactactttcaagcctgacagccctgatttggcccgacactacaaatctgcctctccacagcctgccttccaaattcagcctgaaactcccctgaatttgaagcaccacatcatccaagaactgcctctcgataacacctttgtggcctgtgactctatctccaattgttcctcaagcagttcagatccctacagcgtttctgactgtggctatccagtgacaaccttcgaggtacctgtgtccgtacacaccagaccgactgattccaggacatgaactattgaaatctgcagtgagatgtaactttctaggaacaacaaaattccattccccttccaaaaaatttcaatgattgtgatttcaaaattaggctaagatcattaattttgtaatctagatttcccattataaaagcaagcaaaaatcatcttaaaaatgatgtcctagtgaaccttgtgctttctttagctgtaatctggcaatggaaatttaaaatttatggaagagacagtgcagcgcaataacagagtactctcatgctgtttctctgtttgctctgaatcaacagccatgatgtaatataaggctgtcttggtgtatacacttatggttaatatatcagtcatgaaacatgcaattacttgccctgtctgattgttgaataattaaaacattatctccaggagtttggaagtgagctgaactagccaaactactctctgaaaggtatccagggcaagagacatttttaagaccccaaacaaacaaaaaacaaaaccaaaacactctggttcagtgttttgaaaatattgactaacataatattgctgagaaaatcatttttattacccaccactctgcttaaaagttgagtgggccgggcgcggtggctcacgcctgtaattccagcactttgggaggccgaggcgggtggatcacgaggtcaggatattgagaccatcctggctaacatggtgaaaccccatctccactaaaaatacaaaaaattagctgggcgtggtggcgggcgcctgtagtcccagctactcgggaggctgaggcaggagaatggcgtgaacccgggaggcggagcttgcagtgagccgagatggcgccactgcactccagcctgggtgacagagcaagactctgtctcaaaaagaaaaaaatgttcagtgatagaaaataattttactaggtttttatgttgattgtactcatgctgttccactccttttaattattaaaaagttatttttggctgggtgtggtggctcatacctgtaatcccagcactttgggaggccgaggcgggtggatcacctgaggtcaggagttcaagaccagtctggccaacat

SEQ ID NO: 172063 - DNA, 4220 bp, Homo sapiens
  Payload ID: 13802
  Gene Symbol: PCDH11Y
  Gene Name: protocadherin 11 Y-linked
  Uniprot ID: Q9BZA8
  ENST ID: ENST00000362095
  CDS Start-End: 735-3881
ggtggtccagtacctccaaagatatggaatacactcctgaaatatcctgaaaccttttttttttcagaatcctttaataagcagttatgtcaatctgaaagttgcttacttgtactttatattaatagctattcttgtttttcttatccaaagaaaaatcctctaatccccttttcacatgatagttgttaccatgtttaggcgttagtcacatcaacccctctcctctcccaaacttctcttcttcaaatcaaactttattagtccctcctttataatgattccttgcctccttttatccagatcaattttttttcactttgatgcccagagctgaagaaatggactattgtataaattattcattgccaagagaataattgcattttaaacccatgttataacaaagaataatgattatattttgtgatttgtaacaaataccctttattttcccttaactattgaattaaatattttaattatttgtattctctttaactatcttggtatattaaagtattatcttttatatatttatcaatggtggacacttttataggtactctgtgtcatttttgatactgtaggtatcttatttcatttatctttattcttaatgtacgaattcataatatttgattcagaacagatttatcactaattaacagagtgtcaattatgctaacatctcatttactgattttaatttaaaacagtttttgttaacatgcatgtttagggttggcttcttaataatttcttcttcctcttctctctctcctcttcttttggtcagtgttgtgcgggttaatacaacaaactgtcacaagtgtttgttgtccgggacgtacattttcgcggtcctgctagtatgcgtggtgttccactctggcgcccaggagaaaaactacaccatccgagaagaaattccagaaaacgtcctgataggcaacttgttgaaagaccttaacttgtcgctgattccaaacaagtccttgacaactactatgcagttcaagctagtgtacaagaccggagatgtgccactgattcgaattgaagaggatactggtgagatcttcactaccggcgctcgcattgatcgtgagaaattatgtgctggtatcccaagggatgagcattgcttttatgaagtggaggttgccattttgccggatgaaatatttagactggttaagatacgttttctgatagaagatataaatgataatgcaccattgttcccagcaacagttatcaacatatcaattccagagaactcggctataaactctaaatatactctcccagcggctgttgatcctgacgtaggcataaacggagttcaaaactacgaactaattaagagtcaaaacatttttggcctcgatgtcattgaaacaccagaaggagacaagatgccacaactgattgttcaaaaggagttagatagggaagagaaggatacctatgtgatgaaagtaaaggttgaagatggtggctttcctcaaagatccagtactgctattttgcaagtaagtgttactgatacaaatgacaaccacccagtctttaaggagacagagattgaagtcagtataccagaaaatgctcctgtaggcacttcagtgacacagctccatgccacagatgctgacataggtgaaaatgccaagatccacttctctttcagcaatctagtctccaacattgccaggagattatttcacctcaatgccaccactggacttatcacaatcaaagaaccactggatagggaagaaacaccaaaccacaagttactggttttggcaagtgatggtggattgatgccagcaagagcaatggtgctggtaaatgttacagatgtcaatgataatgtcccatccattgacataagatacatcgtcaatcctgtcaatgacacagttgttctttcagaaaatattccactcaacaccaaaattgctctcataactgtgacggataaggatgcggaccataatggcagggtgacatgcttcacagatcatgaaattcctttcagattaaggccagtattcagtaatcagttcctcctggagaatgcagcatatcttgactatgagtccacaaaagaatatgccattaaattactggctgcagatgctggcaaacctcctttgaatcagtcagcaatgctcttcatcaaagtgaaagatgaaaatgacaatgctccagttttcacccagtctttcgtaactgtttctattcctgagaataactctcctggcatccagttgatgaaagtaagtgcaacggatgcagacagtgggcctaatgctgagatcaattacctgctaggccctgatgctccacctgaattcagcctggatcgtcgtacaggcatgctgactgtagtgaagaaactagatagagaaaaagaggataaatatttattcacaattctggcaaaagataatggggtaccacccttaaccagcaatgtcacagtctttgtaagcattattgatcagaatgacaatagcccagttttcactcacaatgaatacaaattctatgtcccagaaaaccttccaaggcatggtacagtaggactaatcactgtaactgatcctgattatggagacaattctgcagttacgctctccattttagatgagaatgatgacttcaccattgattcacaaactggtgtcatccgaccaaatatttcatttgatagagaaaaacaagaatcttacactttctatgtaaaggctgaggatggtggtagagtatcacgttcttcaagtgccaaagtaaccataaatgtggttgatgtcaatgacaacaaaccagttttcattgtccctccttacaactattcttatgaattggttctaccgtccactaatccaggcacagtggtctttcaggtaattgctgttgacaatgacactggcatgaatgcagaggttcgttacagcattgtaggaggaaacacaagagatctgtttgcaatcgaccaagaaacaggcaacataacattgatggagaaatgtgatgttacagaccttggtttacacagagtgttggtcaaagctaatgacttaggacagcctgattctctcttcagtgttgtaattgtcaatctgttcgtgaatgagtcagtgaccaatgctacactgattaatgaactggtgcgcaaaagcattgaagcaccagtgaccccaaatactgagatagctgatgtatcctcaccaactagtgactatgtcaagatcctggttgcagctgttgctggcaccataactgtcgttgtagttattttcatcactgctgtagtaagatgtcgccaggcaccacaccttaaggctgctcagaaaaacatgcagaattctgaatgggctaccccaaacccagaaaacaggcagatgataatgatgaagaaaaagaaaaagaagaagaagcattcccctaagaacctgctgcttaatgttgtcactattgaagaaactaaggcagatgatgttgacagtgatggaaacagagtcacactagaccttcctattgatctagaagagcaaacaatgggaaagtacaattgggtaactacacctactactttcaagcctgacagccctgatttggcccgacactacaaatctgcctctccacagcctgccttccaaattcagcctgaaactcccctgaatttgaagcaccacatcatccaagaactgcctctcgataacacctttgtggcctgtgactctatctccaattgttcctcaagcagttcagatccctacagcgtttctgactgtggctatccagtgacaaccttcgaggtacctgtgtccgtacacaccagaccgactgattccaggacatgaactattgaaatctgcagtgagatgtaactttctaggaacaacaaaattccattccccttccaaaaaatttcaatgattgtgatttcaaaattaggctaagatcattaattttgtaatctagatttcccattataaaagcaagcaaaaatcatcttaaaaatgatgtcctagtgaaccttgtgctttctttagctgtaatctggcaatggaaatttaaaatttatggaagagacagtgcagcgcaataacagagtactctcatgctgtttctctgtttgctctgaatcaacagccatgatgtaatataaggctgtcttggtgtatacacttatggttaat

SEQ ID NO: 172064 - DNA, 9039 bp, Homo sapiens
  Payload ID: 13802
  Gene Symbol: PCDH11Y
  Gene Name: protocadherin 11 Y-linked
  Uniprot ID: Q9BZA8
  ENST ID: ENST00000400457
  CDS Start-End: 735-4757
ggtggtccagtacctccaaagatatggaatacactcctgaaatatcctgaaaccttttttttttcagaatcctttaataagcagttatgtcaatctgaaagttgcttacttgtactttatattaatagctattcttgtttttcttatccaaagaaaaatcctctaatccccttttcacatgatagttgttaccatgtttaggcgttagtcacatcaacccctctcctctcccaaacttctcttcttcaaatcaaactttattagtccctcctttataatgattccttgcctccttttatccagatcaattttttttcactttgatgcccagagctgaagaaatggactattgtataaattattcattgccaagagaataattgcattttaaacccatgttataacaaagaataatgattatattttgtgatttgtaacaaataccctttattttcccttaactattgaattaaatattttaattatttgtattctctttaactatcttggtatattaaagtattatcttttatatatttatcaatggtggacacttttataggtactctgtgtcatttttgatactgtaggtatcttatttcatttatctttattcttaatgtacgaattcataatatttgattcagaacagatttatcactaattaacagagtgtcaattatgctaacatctcatttactgattttaatttaaaacagtttttgttaacatgcatgtttagggttggcttcttaataatttcttcttcctcttctctctctcctcttcttttggtcagtgttgtgcgggttaatacaacaaactgtcacaagtgtttgttgtccgggacgtacattttcgcggtcctgctagtatgcgtggtgttccactctggcgcccaggagaaaaactacaccatccgagaagaaattccagaaaacgtcctgataggcaacttgttgaaagaccttaacttgtcgctgattccaaacaagtccttgacaactactatgcagttcaagctagtgtacaagaccggagatgtgccactgattcgaattgaagaggatactggtgagatcttcactaccggcgctcgcattgatcgtgagaaattatgtgctggtatcccaagggatgagcattgcttttatgaagtggaggttgccattttgccggatgaaatatttagactggttaagatacgttttctgatagaagatataaatgataatgcaccattgttcccagcaacagttatcaacatatcaattccagagaactcggctataaactctaaatatactctcccagcggctgttgatcctgacgtaggcataaacggagttcaaaactacgaactaattaagagtcaaaacatttttggcctcgatgtcattgaaacaccagaaggagacaagatgccacaactgattgttcaaaaggagttagatagggaagagaaggatacctatgtgatgaaagtaaaggttgaagatggtggctttcctcaaagatccagtactgctattttgcaagtaagtgttactgatacaaatgacaaccacccagtctttaaggagacagagattgaagtcagtataccagaaaatgctcctgtaggcacttcagtgacacagctccatgccacagatgctgacataggtgaaaatgccaagatccacttctctttcagcaatctagtctccaacattgccaggagattatttcacctcaatgccaccactggacttatcacaatcaaagaaccactggatagggaagaaacaccaaaccacaagttactggttttggcaagtgatggtggattgatgccagcaagagcaatggtgctggtaaatgttacagatgtcaatgataatgtcccatccattgacataagatacatcgtcaatcctgtcaatgacacagttgttctttcagaaaatattccactcaacaccaaaattgctctcataactgtgacggataaggatgcggaccataatggcagggtgacatgcttcacagatcatgaaattcctttcagattaaggccagtattcagtaatcagttcctcctggagaatgcagcatatcttgactatgagtccacaaaagaatatgccattaaattactggctgcagatgctggcaaacctcctttgaatcagtcagcaatgctcttcatcaaagtgaaagatgaaaatgacaatgctccagttttcacccagtctttcgtaactgtttctattcctgagaataactctcctggcatccagttgatgaaagtaagtgcaacggatgcagacagtgggcctaatgctgagatcaattacctgctaggccctgatgctccacctgaattcagcctggatcgtcgtacaggcatgctgactgtagtgaagaaactagatagagaaaaagaggataaatatttattcacaattctggcaaaagataatggggtaccacccttaaccagcaatgtcacagtctttgtaagcattattgatcagaatgacaatagcccagttttcactcacaatgaatacaaattctatgtcccagaaaaccttccaaggcatggtacagtaggactaatcactgtaactgatcctgattatggagacaattctgcagttacgctctccattttagatgagaatgatgacttcaccattgattcacaaactggtgtcatccgaccaaatatttcatttgatagagaaaaacaagaatcttacactttctatgtaaaggctgaggatggtggtagagtatcacgttcttcaagtgccaaagtaaccataaatgtggttgatgtcaatgacaacaaaccagttttcattgtccctccttacaactattcttatgaattggttctaccgtccactaatccaggcacagtggtctttcaggtaattgctgttgacaatgacactggcatgaatgcagaggttcgttacagcattgtaggaggaaacacaagagatctgtttgcaatcgaccaagaaacaggcaacataacattgatggagaaatgtgatgttacagaccttggtttacacagagtgttggtcaaagctaatgacttaggacagcctgattctctcttcagtgttgtaattgtcaatctgttcgtgaatgagtcagtgaccaatgctacactgattaatgaactggtgcgcaaaagcattgaagcaccagtgaccccaaatactgagatagctgatgtatcctcaccaactagtgactatgtcaagatcctggttgcagctgttgctggcaccataactgtcgttgtagttattttcatcactgctgtagtaagatgtcgccaggcaccacaccttaaggctgctcagaaaaacatgcagaattctgaatgggctaccccaaacccagaaaacaggcagatgataatgatgaagaaaaagaaaaagaagaagaagcattcccctaagaacctgctgcttaatgttgtcactattgaagaaactaaggcagatgatgttgacagtgatggaaacagagtcacactagaccttcctattgatctagaagagcaaacaatgggaaagtacaattgggtaactacacctactactttcaagcctgacagccctgatttggcccgacactacaaatctgcctctccacagcctgccttccaaattcagcctgaaactcccctgaatttgaagcaccacatcatccaagaactgcctctcgataacacctttgtggcctgtgactctatctccaattgttcctcaagcagttcagatccctacagcgtttctgactgtggctatccagtgacaaccttcgaggtacctgtgtccgtacacaccagaccgtcccagcggcgtgtcacatttcacctgccagaaggctctcaggaaagcagcagtgatggtggactgggagaccatgatgcaggcagccttaccagcacatcccatggcctgccccttggctatcctcaggaggagtactttgatcgtgctacacccagcaatcgcactgaaggggatggcaactccgatcctgaatctactttcatacctggactaaagaaagaaataactgttcaaccaactgtggaagaggcctctgacaactgcactcaagaatgtctcatctatggccattctgatgcctgctggatgccggcatctctggatcattccagctcttcacaagcacaggcctctgctctatgccacagcccaccactgtcacaggcctctactcagcaccacagcccaccagtgacacagaccattgttctctgccacagccctccagtgacacagaccatcgcattgtgccacagcccaccaccgatacaggtgtctgctctccaccacagtcctcctctagtgcagggtactgcacttcaccacagcccaccatcagcacaggcctcagccctctgctacagccctcctttagcacaggctgctgcaatcagccacagctcttctctgccacaggttattgccctccatcgtagtcaggcccaatcatcagtcagtttgcagcaaggttgggtgcaaggtgctaatggactatgctctgttgatcagggagtgcaaggtagtgcaacatctcagttttacaccatgtctgaaagacttcatcccagtgatgattcaattaaagtcattcctttgacaaccttcgctccacgccaacaggccagaccgtccagaggtgattcccccattatggaaacacatcccttgtaaagctaaaatagttacttcaaattttcagaaaagatgtatatagtcaaaatttaagatacaattccaatgagtattctgattatcagatttgtaaataactatgtaaatagaaacagataccagaataaatctacagctagacccttagtcaatagttaaccaaaaaattgcaatttgtttaattcagaatgtgtatttaaaaagaaaaggaatttaacaatttgcatccccttgtacagtaaggcttatcatgacagagcgtactatttctgatgtacagtattttttgttgtttttatcatcatgtgcaatattactgatttgtttccatgctgattgtgtggaaccagtatgtagcaaatggaaagcctagaaatatcttattttctaagtttacctttagtttacctaaacttttgttcagataatgttaaaaggtatacgtactctagccttttttggggctttctttttgatttttgtttgtggttttcagtttttttgttgttgttagtgagtctcccttcaaaatacacagtaggtagtgtaaatactgcttgtttgtgtctctctgctgtcatgttttctaccttattccaatactatattgttgataaaatttgtatatacattttcaataaagaatatgtataaactgtacagatctagatctacaacctatttctctactctttagtagagttcgagacacagaagtgcaataactgccctaattaagcaactatttgttaaaaagggcccctttttactttaatagtttagtgtaaagtacatcagaaataaaactgtatctgacattttaagcctgtagtccattattacttgggtctttacttctgggaatttgtatgtaacagcctagaaaattaaaaggaggtggatgcatccaaagcacgagtcacttaaaatatcgacggtaaactactattttgtagagaaactcaggaagatttaaatgttgatttgacagctcaataggctgttaccaaagggtgttcagtaaaaataacaaatacatgtaactgtagataaaaccacatactaaatctataagactaagggatttttgttattctagctcaacttactgaagaaaaccactaataacaacaagaatatcaggaaggaacttttcaagaaatgtaattataaatctacatcaaacagaattttaaggaaaaatgcagagggagaaataaggcacatgactgcttcttgcagtcaagaagaaataccaataacacacacagaacaaaaaccatcaaaatctcatatatgaaataaaatatattcttctaagcaaagaaacagtactattcatagaaaacattagttttctcctgttgtctgttatttccttcttttatcctcttaactggccattatcttgtatgtgcacattttataaatgtacagaaacatcaccaacttgattttcttccatagcaaaactgagaaaataccttgtttcagtataacactaaaccaagagacaattgatgtttaatgggggcggttggggttgggggggagtcaatatctcctattgattaacttagacatagattttgtaatgtataacttgatatttaatttatgattaaactgtaattttgtaacataaactgtggtaattgcataatttcattggtgaggatttcctttgaatattgagaaagtttcttttcatgtgcccagcaggttaagtagcgttttcagaatatacattattcccatccattgtaaagttccttaagtcatatttgactgggcgtgcagaataacttcttaactattaactatcagagtttgattaataaaattaattaattttttttctccttcgtgttgttaatgttccaagggatttggagcatactggttttccaggtgcatgtgaatcccgaaggactgatgatatttgaatgtttattaaattattatcacacaaatgtgttgatattgtggctattgttgatgttgaaaattgtaaacttggggaagattaagaaaagaaccaatagtgacaaaaatcagtgcttccagtagattttagaacattctttgcctcaaaaaacctgcaaagatgatgtgagattttttcttgtgttttaattattttcacattttctctctgcaaacctttagttttctgatgatctacacacacacatacacacacacacacacacacgtgcacacacacacatttaaaggatataaaaagaagaggttgaaagattattaaataacttatcaggcatctcaatggttactatctatgttagtgaaaatcaaataggactcaaagttggatatttgggatttttcttctgacagtataatttattgagttactagggaggttcttaaatcctcatatctggaaacttgtgaagttttgacacctttcctatagatataggaatgaaccaatacgcttttattaccctttctaactctgattttataatcagacttagattgtgtttagaatattaaatgactgggcaccctcttcttggtttttaccagagaggctttgaatggaagcaggctgagagtagccaaagaggcaaggggtattagcccagttattctcccctatgccttctcttcctaagcgtccactaggtctggccttggaaatctgttacttctacggcttcagatctgatgatatctttttcatcacattacaagttatttctttgactgaatagacagtggtataggttgacacagcacacaagtggctattgtgatgtatgatgtatgtagtcccacaactgcaaaacgtcttactgaagcaacaatcgaaaaatggttctgttttaaaaaggattttgtttgatttgaaattaaaacttcaaactgaatgacttatatgagaataatatgttcaatcaaagtagttattctattttgtgtccatattccattagattgtgattattaattttctagctatggtattactatatcacacttgtgagtatgtattcaaatactaagtatcttatatgctacgtgcatacacattcttttcttaaactttacctgtgttttaactaatattgtgtcagtgtattaaaaattagcttttacatatgatatctacaatgtaataaatttagagagtaattttgtgtattcttatttacttaacattttacttttaattatgtaaatttggttagaaaataataataaatggttagtgctattgtgtaatggtagcagttacaaagagcctctgccttcccaaactaatatttatcacacatggtcattaaatgggaaaaaaatagactaaacaaatcacaaattgttcagttcttaaaatgtaattatgtcacacacacaaaaaaatccttttcaatcctgagaaaattaaaggtgttttactcacatggatatttcaacattagttttttttgtttgtttctttttcatggtattactgaaggtgtgtatactccctaatacacatttatgaaaatctacttgtttagacttttatttatactcttctgatttatattttttattataattattatttcttatcttcttttatattttttggaaaccaaatttatagttagtttaggtaaactttttattatgaccattagaaactattttgaatgtttccaactggctcaattggctgggaaaacatgggaacaagagaagctgaaatatatttctgcaagaacctttctatattatgtgccaattaccacaccagatcaattttatgcagaggccttaaaatattctttcacagtagctttcttacactaaccgtcatgtgcttttagtaaatatgatttttaaaagcagttcaagttgacaacagcagaaacagtaacaaaaaaatctgctcagaaaaatgtatgtgcacaaataaaaaaaattaatggcaattgtttagtgactgtaagtgatactttttaaagagtaaactgtgtgaaatttatactatccctgcttaaaatattaagatttttatgaaatatgtatttatgtttgtattgtgggaagattcctcctctgtgatatcatacagcatctgaaagtgaacagtatcccaaagcagttccaagcatgctttggaagtaagaaggttgactattgtatggccaaggatggcagtatgtaatccagaagcaaacttgtattaattgttctatttcaggttctgtattgcatgttttcttattaatatatattaataaaagttatgagaaataaa

SEQ ID NO: 172065 - DNA, 536 bp, Homo sapiens
  Payload ID: 13802
  Gene Symbol: PCDH11Y
  Gene Name: protocadherin 11 Y-linked
  ENST ID: ENST00000621505
  CDS Start-End: 305-536
agtgccagcggcgacacaggcagcacaggcagcccgggctgcctgaatagcctcagaaacaacctcagcgactccggctgctctgcggactgcgagctgtggcggtagagcccgctacagcagtcgcagtctccgtggagcgggcggaagccttttttctccctttcgtttacctcttcattctactctaaaggcatcgttattagttcatcatagagagagcgcggaccgtgtgcgggccgtcttgacgaaagaaccgagagatggatgcgctaagctgattgcagtgcactatgaggactgaatgacagtgggttttaattcagatatttcaagtgttgtgcgggttaatacaacaaactgtcacaagtgtttgttgtccgggacgtacattttcgcggtcctgctagtatgcgtggtgttccactctggcgcccaggagaaaaactacaccatccgagaagaaattccagaaaacgtcctgataggcaacttgttgaaagaccttaacttgtcgctgattccaaacaagtcct

SEQ ID NO: 172066 - DNA, 4824 bp, Homo sapiens
  Payload ID: 13802
  Gene Symbol: PCDH11Y
  Gene Name: protocadherin 11 Y-linked
  Uniprot ID: Q9BZA8
  ENST ID: ENST00000622698
  CDS Start-End: 613-3726
gcagtcggcgaactgtctgggcgggaggagccgtgagcagtagctgcactcagctgcccgcgcggcaaagaggaaggcaagccaaacagagtgcgcagagtggcagtgccagcggcgacacaggcagcacaggcagcccgggctgcctgaatagcctcagaaacaacctcagcgactccggctgctctgcggactgcgagctgtggcggtagagcccgctacagcagtcgcagtctccgtggagcgggcggaagccttttttctccctttcgtttacctcttcattctactctaaaggcatcgttattagagggtgcttaaaaagtacagatcaactggatggatgaatggatggaagaggatggaatatcttaacaaaacacattttccttaagtaaattcatgcatactccaaataaaatacagaatgtgaagtatctctgaactgtgctgttgaatatggtagctactagctacatgaaaatcctgttgtgaataagaaggattccacagatcacataccagagcggttttgcctcagctgctctcaactttgtaatcttgtgaagaagctgacaagcttggctgattgcagtgcactatgaggactgaatgacagtgggttttaattcagatatttcaagtgttgtgcgggttaatacaacaaactgtcacaagtgtttgttgtccgggacgtacattttcgcggtcctgctagtatgcgtggtgttccactctggcgcccaggagaaaaactacaccatccgagaagaaattccagaaaacgtcctgataggcaacttgttgaaagaccttaacttgtcgctgattccaaacaagtccttgacaactactatgcagttcaagctagtgtacaagaccggagatgtgccactgattcgaattgaagaggatactggtgagatcttcactaccggcgctcgcattgatcgtgagaaattatgtgctggtatcccaagggatgagcattgcttttatgaagtggaggttgccattttgccggatgaaatatttagactggttaagatacgttttctgatagaagatataaatgataatgcaccattgttcccagcaacagttatcaacatatcaattccagagaactcggctataaactctaaatatactctcccagcggctgttgatcctgacgtaggcataaacggagttcaaaactacgaactaattaagagtcaaaacatttttggcctcgatgtcattgaaacaccagaaggagacaagatgccacaactgattgttcaaaaggagttagatagggaagagaaggatacctatgtgatgaaagtaaaggttgaagatggtggctttcctcaaagatccagtactgctattttgcaagtaagtgttactgatacaaatgacaaccacccagtctttaaggagacagagattgaagtcagtataccagaaaatgctcctgtaggcacttcagtgacacagctccatgccacagatgctgacataggtgaaaatgccaagatccacttctctttcagcaatctagtctccaacattgccaggagattatttcacctcaatgccaccactggacttatcacaatcaaagaaccactggatagggaagaaacaccaaaccacaagttactggttttggcaagtgatggtggattgatgccagcaagagcaatggtgctggtaaatgttacagatgtcaatgataatgtcccatccattgacataagatacatcgtcaatcctgtcaatgacacagttgttctttcagaaaatattccactcaacaccaaaattgctctcataactgtgacggataaggatgcggaccataatggcagggtgacatgcttcacagatcatgaaattcctttcagattaaggccagtattcagtaatcagttcctcctggagaatgcagcatatcttgactatgagtccacaaaagaatatgccattaaattactggctgcagatgctggcaaacctcctttgaatcagtcagcaatgctcttcatcaaagtgaaagatgaaaatgacaatgctccagttttcacccagtctttcgtaactgtttctattcctgagaataactctcctggcatccagttgatgaaagtaagtgcaacggatgcagacagtgggcctaatgctgagatcaattacctgctaggccctgatgctccacctgaattcagcctggatcgtcgtacaggcatgctgactgtagtgaagaaactagatagagaaaaagaggataaatatttattcacaattctggcaaaagataatggggtaccacccttaaccagcaatgtcacagtctttgtaagcattattgatcagaatgacaatagcccagttttcactcacaatgaatacaaattctatgtcccagaaaaccttccaaggcatggtacagtaggactaatcactgtaactgatcctgattatggagacaattctgcagttacgctctccattttagatgagaatgatgacttcaccattgattcacaaactggtgtcatccgaccaaatatttcatttgatagagaaaaacaagaatcttacactttctatgtaaaggctgaggatggtggtagagtatcacgttcttcaagtgccaaagtaaccataaatgtggttgatgtcaatgacaacaaaccagttttcattgtccctccttacaactattcttatgaattggttctaccgtccactaatccaggcacagtggtctttcaggtaattgctgttgacaatgacactggcatgaatgcagaggttcgttacagcattgtaggaggaaacacaagagatctgtttgcaatcgaccaagaaacaggcaacataacattgatggagaaatgtgatgttacagaccttggtttacacagagtgttggtcaaagctaatgacttaggacagcctgattctctcttcagtgttgtaattgtcaatctgttcgtgaatgagtcagtgaccaatgctacactgattaatgaactggtgcgcaaaagcattgaagcaccagtgaccccaaatactgagatagctgatgtatcctcaccaactagtgactatgtcaagatcctggttgcagctgttgctggcaccataactgtcgttgtagttattttcatcactgctgtagtaagatgtcgccaggcaccacaccttaaggctgctcagaaaaacatgcagaattctgaatgggctaccccaaacccagaaaacaggcagatgataatgatgaagaaaaagaaaaagaagaagaagcattcccctaagaacctgctgcttaatgttgtcactattgaagaaactaaggcagatgatgttgacagtgatggaaacagagtcacactagaccttcctattgatctagaagagcaaacaatgggaaagtacaattgggtaactacacctactactttcaagcctgacagccctgatttggcccgacactacaaatctgcctctccacagcctgccttccaaattcagcctgaaactcccctgaatttgaagcaccacatcatccaagaactgcctctcgataacacctttgtggcctgtgactctatctccaattgttcctcaagcagttcagatccctacagcgtttctgactgtggctatccagtgacaaccttcgaggtacctgtgtccgtacacaccagaccgactgattccaggacatgaactattgaaatctgcagtgagatgtaactttctaggaacaacaaaattccattccccttccaaaaaatttcaatgattgtgatttcaaaattaggctaagatcattaattttgtaatctagatttcccattataaaagcaagcaaaaatcatcttaaaaatgatgtcctagtgaaccttgtgctttctttagctgtaatctggcaatggaaatttaaaatttatggaagagacagtgcagcgcaataacagagtactctcatgctgtttctctgtttgctctgaatcaacagccatgatgtaatataaggctgtcttggtgtatacacttatggttaatatatcagtcatgaaacatgcaattacttgccctgtctgattgttgaataattaaaacattatctccaggagtttggaagtgagctgaactagccaaactactctctgaaaggtatccagggcaagagacatttttaagaccccaaacaaacaaaaaacaaaaccaaaacactctggttcagtgttttgaaaatattgactaacataatattgctgagaaaatcatttttattacccaccactctgcttaaaagttgagtgggccgggcgcggtggctcacgcctgtaattccagcactttgggaggccgaggcgggtggatcacgaggtcaggatattgagaccatcctggctaacatggtgaaaccccatctccactaaaaatacaaaaaattagctgggcgtggtggcgggcgcctgtagtcccagctactcgggaggctgaggcaggagaatggcgtgaacccgggaggcggagcttgcagtgagccgagatggcgccactgcactccagcctgggtgacagagcaagactctgtctcaaaaagaaaaaaatgttcagtgatagaaaataattttactaggtttttatgttgattgtactcatgctgttccactccttttaattattaaaaagttatttttggctgggtgtggtggctcatacctgtaatcccagcactttgggaggccgaggcgggtggatcacctgaggtcaggagttcaagaccagtctggccaacatggcgaaaccccgtct

SEQ ID NO: 172067 - DNA, 6562 bp, Homo sapiens
  Payload ID: 13803
  Gene Symbol: PCDH12
  Gene Name: protocadherin 12
  Uniprot ID: Q9NPG4
  ENST ID: ENST00000231484
  CDS Start-End: 1212-4766
gggaagcgggaggagagccacacggtcaagttgcacaggttcttgcagcttctggaatcaagaccatgggcaccctcataagtcagtgtgggcagggactgccccagggccaatccaagatccagaggtagccatagggtgtgacaagttgtgcagattacaacactcaccccttgcaataacgtcactgcctgtgactcggggccaggcccaggccaaagcccttcctacatcatttcgtttaatcctcacagtttcctgctgaaagggctactattcttactcccatccccactctacagatgaggtaatggaggcccaggaaagttaagtgacttgtcccagatgacaccgctggtaagttgcaaagtcagaatttgaactcaggcagtttacctctgatggctgctctgttaatcacagctgctttccagtgagacaaaaacgggtgatcagggcagagtcaagacagagaggtaaacaagattgggaaaaagacaggaatgagaggggaacaatgggggaaaagataggaacaaagagagttggggaaggggagagaaacaggaaacatgacttgcccgggaggggcatcagtccacgtgcaagcaggtggaggctcaagttttctgctcacttggtgatgcagaggctccctttccctcagcagccgccttgctgcgtggacagcagcttcccatctggcctgtccccggagccccggcctcatcctcctcagcggcaggccacttagcttcacaggaaatgctctttctctaattggcattgaaactcacagccctcccttttcctgtaggtggggtttccataggaaaaagctgcttctctgtttccccagcctagcaactgtttggcagtcagagtcccacatcctgctcaactgggtcaggtccctcttagaccagctcttgtccatcatttgctgaagtggaccaactagttccccagtagggggtctcccctggcaattcttgatcggcgtttggacatctcagatcgcttccaatgaagatggccttgccttggggtcctgcttgtttcataatcatctaactatgggacaaggttgtgccggcagctctgggggaaggagcacggggctgatcaagccatccaggaaacactggaggacttgtccagccttgaaagaactctagtggtttctgaatctagcccacttggcggtaagcatgatgcaacttctgcaacttctgctggggcttttggggccaggtggctacttatttcttttaggggattgtcaggaggtgaccactctcacggtgaaataccaagtgtcagaggaagtgccatctggtacagtgatcgggaagctgtcccaggaactgggccgggaggagaggcggaggcaagctggggctgccttccaggtgttgcagctgcctcaggcgctccccattcaggtggactctgaggaaggcttgctcagcacaggcaggcggctggatcgagagcagctgtgccgacagtgggatccctgcctggtttcctttgatgtgcttgccacaggggatttggctctgatccatgtggagatccaagtgctggacatcaatgaccaccagccacggtttcccaaaggcgagcaggagctggaaatctctgagagcgcctctctgcgaacccggatccccctggacagagctcttgacccagacacaggccctaacaccctgcacacctacactctgtctcccagtgagcactttgccttggatgtcattgtgggccctgatgagaccaaacatgcagaactcatagtggtgaaggagctggacagggaaatccattcattttttgatctggtgttaactgcctatgacaatgggaacccccccaagtcaggtaccagcttggtcaaggtcaacgtcttggactccaatgacaatagccctgcgtttgctgagagttcactggcactggaaatccaagaagatgctgcacctggtacgcttctcataaaactgaccgccacagaccctgaccaaggccccaatggggaggtggagttcttcctcagtaagcacatgcctccagaggtgctggacaccttcagtattgatgccaagacaggccaggtcattctgcgtcgacctctagactatgaaaagaaccctgcctacgaggtggatgttcaggcaagggacctgggtcccaatcctatcccagcccattgcaaagttctcatcaaggttctggatgtcaatgacaacatcccaagcatccacgtcacatgggcctcccagccatcactggtgtcagaagctcttcccaaggacagttttattgctcttgtcatggcagatgacttggattcaggacacaatggtttggtccactgctggctgagccaagagctgggccacttcaggctgaaaagaactaatggcaacacatacatgttgctaaccaatgccacactggacagagagcagtggcccaaatataccctcactctgttagcccaagaccaaggactccagcccttatcagccaagaaacagctcagcattcagatcagtgacatcaacgacaatgcacctgtgtttgagaaaagcaggtatgaagtctccacgcgggaaaacaacttaccctctcttcacctcattaccatcaaggctcatgatgcagacttgggcattaatggaaaagtctcataccgcatccaggactccccagttgctcacttagtagctattgactccaacacaggagaggtcactgctcagaggtcactgaactatgaagagatggccggctttgagttccaggtgatcgcagaggacagcgggcaacccatgcttgcatccagtgtctctgtgtgggtcagcctcttggatgccaatgataatgccccagaggtggtccagcctgtgctcagcgatggaaaagccagcctctccgtgcttgtgaatgcctccacaggccacctgctggtgcccatcgagactcccaatggcttgggcccagcgggcactgacacacctccactggccactcacagctcccggccattccttttgacaaccattgtggcaagagatgcagactcgggggcaaatggagagcccctctacagcatccgcagtggaaatgaagcccacctcttcatcctcaaccctcatacggggcagctgttcgtcaatgtcaccaatgccagcagcctcattgggagtgagtgggagctggagatagtagtagaggaccagggaagcccccccttacagacccgagccctgttgagggtcatgtttgtcaccagtgtggaccacctgagggactcagcccgcaagcctggggccttgagcatgtcgatgctgacggtgatctgcctggctgtactgttgggcatcttcgggttgatcctggctttgttcatgtccatctgccggacagaaaagaaggacaacagggcctacaactgtcgggaggccgagtccacctaccgccagcagcccaagaggccccagaaacacattcagaaggcagacatccacctcgtgcctgtgctcaggggtcaggcaggtgagccttgtgaagtcgggcagtcccacaaagatgtggacaaggaggcgatgatggaagcaggctgggacccctgcctgcaggcccccttccacctcaccccgaccctgtacaggacgctgcgtaatcaaggcaaccagggagcaccggcggagagccgagaggtgctgcaagacacggtcaacctccttttcaaccatcccaggcagaggaatgcctcccgggagaacctgaaccttcccgagccccagcctgccacaggccagccacgttccaggcctctgaaggttgcaggcagccccacagggaggctggctggagaccagggcagtgaggaagccccacagaggccaccagcctcctctgcaaccctgagacggcagcgacatctcaatggcaaagtgtcccctgagaaagaatcagggccccgtcagatcctgcggagcctggtccggctgtctgtggctgccttcgccgagcggaaccccgtggaggagctcactgtggattctcctcctgttcagcaaatctcccagctgctgtccttgctgcatcagggccaattccagcccaaaccaaaccaccgaggaaataagtacttggccaagccaggaggcagcaggagtgcaatcccagacacagatggcccaagtgcaagggctggaggccagacagacccagaacaggaggaagggcctttggatcctgaagaggacctctctgtgaagcaactgctagaagaagagctgtcaagtctgctggaccccagcacaggtctggccctggaccggctgagcgcccctgacccggcctggatggcgagactctctttgcccctcaccaccaactaccgtgacaatgtgatctccccggatgctgcagccacggaggagccaaggaccttccagacgttcggcaaggcagaggcaccagagctgagcccaacaggcacgaggctggccagcacctttgtctcggagatgagctcactgctggagatgctgctggaacagcgctccagcatgcccgtggaggccgcctccgaggcgctgcggcggctctcggtctgcgggaggaccctcagtttagacttggccaccagtgcagcctcaggcatgaaagtgcaaggggacccaggtggaaagacggggactgagggcaagagcagaggcagcagcagcagcagcaggtgcctgtgaacatacctcagacgcctctggatccaagaaccaggggcctgaggatctgtggacaagagctggtttctaaaatcttgtaactcactagctagcggcggcctgagaactttagggtgactgatgctacccccacagaggaggcaagagccccaggactaacagctgactgaccaaagcagccccttgtaagcagctctgagtcttttggaggacagggacggtttgtggctgagataagtgtttcctggcaaaacatatgtggagcacaaagggtcagtcctctggcagaacagatgccacggagtatcacaggcaggaaagggtggccttcttgggtagcaggagtcagggggctgtaccctgggggtgccaggaaatgctctctgacctatcaataaaggaaaagcagtgattcattctcctgtttgcacctgtcaagagggagaagggaagagtaatagagtggggtttatttgtcatccaatccctggcaagaccgtcacactgggcctggacaggagtggggcaccttggtacacagtaacaggtacacaaatagcagacatgtgtgctcttacccctgttcccctatcactatgttaccaactaatctgcttctcagctgcaaaattagagctaagaaagcacaactatttataaagcatttacatgagccaggcaccaggctttacaataggatttaatttgattttccaacaatcctgggagggaggtattattaaccccatttcacagacacggatatggggcttggagaggtcaagtggctttcccaagatcaagcagggagtagagccagagccaggatttggacccaggctgggccaacaccaaaacccatgccttcaaccttgacaccagcctgccaaccaaagacaggagaagggaaggccctggaggtgagctgttggcagcagtgaacttgctcgagctccctcgggaaacactgttgaaaggaacatttccaaagccatccaggcccgcacctctctacattcccaagcacaaggcaaaaggaacttggatctgaactgatgcagacccgttctttcccaacaagtagctcttcaagtgcggatgtcatctttcccaaccccatttgcgggtaaaccttcctctgtcattgcaggttcaggcttgtgaatcccagaggacgctgtgtgaactgggtctatgaaatcggcactgacagcagccagccttccaggggatgggggagggaagaaacagcagatattttcccaaggttcagctttataattttcttggaaatttccgagcagccaatcagctagcttctaaatagtgtgggtctctcctggacactgcaggcaaaagttcctctatctgctcctctttttgtcctttcttggagctcagtgctcatgttcactgttcaagaaatgggccaatcatactcccaactagggataatgtgcatcatacatacttggaatacagtgtggtatcattattccattttacagatgaagaaaatgaggctccccaaagttatgagtttcaggggcagagtttctcctcacctcactctaggccagagtgatctccttacagaatctgtgattttcaggctggatcacagaactgttgggttctgtgggccagtgagagaaactgggggatatcaagcaggcaggcagggtctccagcctgaccagccaggtgcctgctacaaagcaacacttgatgaatagctgttgaatggatgtatgaatgaataaatgtgtcaataaatgcttcagaggcccctttta

SEQ ID NO: 172068 - DNA, 572 bp, Homo sapiens
  Payload ID: 13803
  Gene Symbol: PCDH12
  Gene Name: protocadherin 12
  ENST ID: ENST00000510041
  CDS Start-End: 502-572
acagtttcctgctgaaagggctactattcttactcccatccccactctacagatgaggtaatggaggcccaggaaagttaagtgacttgtcccagatgacaccgctggtggggtttccataggaaaaagctgcttctctgtttccccagcctagcaactgtttggcagtcagagtcccacatcctgctcaactgggtcaggtccctcttagaccagctcttgtccatcatttgctgaagtggaccaactagttccccagtagggggtctcccctggcaattcttgatcggcgtttggacatctcagatcgcttccaatgaagatggccttgccttggggtcctgcttgtttcataatcatctaactatgggacaaggttgtgccggcagctctgggggaaggagcacggggctgatcaagccatccaggaaacactggaggacttgtccagccttgaaagaactctagtggtttctgaatctagcccacttggcggtaagcatgatgcaacttctgcaacttctgctggggcttttggggccaggtggctacttatttcttttaggggattg

SEQ ID NO: 172069 - DNA, 8232 bp, Homo sapiens
  Payload ID: 13804
  Gene Symbol: PCDH17
  Gene Name: protocadherin 17
  Uniprot ID: O14917
  ENST ID: ENST00000377918
  CDS Start-End: 736-4215
agatgcagtccgccgccgccgctgcctcagccagcaatgcaagattagatctctaaatgcagcaaaacactgcctgaaaacagaccggcccgcgcagcaagcagacatttcacggtgcgctggggaagcttcaaaatatatctgtgactctgtcttcgttgctcttcatccccatcaatttcatcacgggaggcgagcagcaagtaagaatttcactttcggatctgcctagagacacacctccctgctccctcccccactcgatgtgaagagtattccggagtctccgggcgggagtagatttgcagcaccctagcgggagcgaggaaaacctactgattctttagctcattatcatctctcccagacgagatttccttcttatcgcctgcctcatcgctcaagtttgagcctcccgaagtccgggcgggagagacgaaacccctggctcacccccagccgcaggaagccaccgccttgctccaagcccctgcagctctgctgcaccgcagcttctcacccagtgcggatgctgtagatcaacaggttcagggaacttgagcagaataaggagagaccaccgggtgccgcagctcgggtgcagagggaaaaaaggacccatagacttgtggctcgcgtcgcgcgcgcacgctgcgccagggccccaggctggcgcgcactccctctctggctcctccagtccgattgctcctgcccccaccttacaggtctgggatgtacctttccatctgttgctgctttcttctatgggcccctgccctcactctcaagaacctcaactactccgtgccggaggagcaaggggccggcacggtgatcgggaacatcggcagggatgctcgactgcagcctgggcttccgcctgcagagcgcggcggcggagggcgcagcaagtcgggtagctaccgggtgctggagaactccgcaccgcacctgctggacgtggacgcagacagcgggctcctctacaccaagcagcgcatcgaccgcgagtccctgtgccgccacaatgccaagtgccagctgtccctcgaggtgttcgccaacgacaaggagatctgcatgatcaaggtagagatccaggacatcaacgacaacgcgccctccttctcctcggaccagatcgaaatggacatctcggagaacgctgctccgggcacccgcttccccctcaccagcgcacatgaccccgacgccggcgagaatgggctccgcacctacctgctcacgcgcgacgatcacggcctctttggactggacgttaagtcccgcggcgacggcaccaagttcccagaactggtcatccagaaggctctggaccgcgagcaacagaatcaccatacgctcgtgctgactgccctggacggtggcgagcctccacgttccgccaccgtacagatcaacgtgaaggtgattgactccaacgacaacagcccggtcttcgaggcgccatcctacttggtggaactgcccgagaacgctccgctgggtacagtggtcatcgatctgaacgccaccgacgccgatgaaggtcccaatggtgaagtgctctactctttcagcagctacgtgcctgaccgcgtgcgggagctcttctccatcgaccccaagaccggcctaatccgtgtgaagggcaatctggactatgaggaaaacgggatgctggagattgacgtgcaggcccgagacctggggcctaaccctatcccagcccactgcaaagtcacggtcaagctcatcgaccgcaacgacaatgcgccgtccatcggtttcgtctccgtgcgccagggggcgctgagcgaggccgcccctcccggcaccgtcatcgccctggtgcgggtcactgaccgggactctggcaagaacggacagctgcagtgtcgggtcctaggcggaggagggacgggcggcggcgggggcctgggcgggcccgggggttccgtccccttcaagcttgaggagaactacgacaacttctacacggtggtgactgaccgcccgctggaccgcgagacacaagacgagtacaacgtgaccatcgtggcgcgggacgggggctctcctcccctcaactccaccaagtcgttcgcgatcaagattctagacgagaacgacaacccgcctcggttcaccaaagggctctacgtgcttcaggtgcacgagaacaacatcccgggagagtacctgggctctgtgctcgcccaggatcccgacctgggccagaacggcaccgtatcctactctatcctgccctcgcacatcggcgacgtgtctatctacacctatgtgtctgtgaatcccacgaacggggccatctacgccctgcgctcctttaacttcgagcagaccaaggcttttgagttcaaggtgcttgctaaggactcgggggcgcccgcgcacttggagagcaacgccacggtgagggtgacagtgctagacgtgaatgacaacgcgccagtgatcgtgctccccacgctgcagaacgacaccgcggagctgcaggtgccgcgcaacgctggcctgggctatctggtgagcactgtgcgcgccctagacagcgacttcggcgagagcgggcgtctcacctacgagatcgtggacggcaacgacgaccacctgtttgagatcgacccgtccagcggcgagatccgcacgctgcaccctttctgggaggacgtgacgcccgtggtggagctggtggtgaaggtgaccgaccacggcaagcctaccctgtccgcagtggccaagctcatcatccgctcggtgagcggatcccttcccgagggggtaccacgggtgaatggcgagcagcaccactgggacatgtcgctgccgctcatcgtgactctgagcactatctccatcatcctcctagcggccatgatcaccatcgccgtcaagtgcaagcgcgagaacaaggagatccgcacttacaactgccgcatcgccgagtacagccacccgcagctgggtgggggcaagggcaagaagaagaagatcaacaaaaatgatatcatgctggtgcagagcgaagtggaggagaggaacgccatgaacgtcatgaacgtggtgagcagcccctccctggccacctcccccatgtacttcgactaccagacccgcctgcccctcagctcgccccggtcggaggtgatgtatctcaaaccggcctccaacaacctgactgtccctcaggggcacgcgggctgccacaccagcttcaccggacaagggactaatgcaagcgagacccctgccactcggatgtccataattcagacagacaattttcccgcagagcccaattacatgggcagcaggcagcagtttgttcaaagtagctccacgtttaaggacccagaaagagccagcctgagagacagtgggcacggggacagtgatcaggctgacagtgaccaagacactaacaaaggctcctgctgtgacatgtctgttagggaggcactcaagatgaaaactacttcaactaaaagccaaccacttgaacaagaaccagaagagtgtgttaattgcacagatgaatgccgagtgcttggtcattctgacaggtgctggatgccacagttccctgcagccaatcaggctgaaaatgcagattaccgcacaaatctctttgtacctacagttgaagctaatgttgagactgagacttacgaaactgtgaatcccactgggaaaaagactttttgtacatttggaaaagacaagcgagagcacactattctcattgccaacgttaaaccttatttaaaagccaaacgtgccctgagccctctcctccaagaggtcccctcagcatcaagcagcccaaccaaggcgtgcatcgagccttgcacctcaacaaaaggctccctggatggctgtgaagcaaaaccaggagccctggctgaagcaagcagtcagtacttgcccactgacagtcaatatctgtcacctagtaagcaaccaagagaccctcccttcatggcttccgatcagatggcaagggtctttgcagatgtgcattccagagccagccgggattccagtgagatgggtgctgttcttgagcagcttgaccaccccaacagggatctgggcagagagtctgtggatgcagaggaagttgtgagagaaattgataagcttttgcaagactgccggggaaacgaccctgtggctgtgagaaagtgaaaaaagaaaaaaaaaaaggcattggcattttcttgtctcttctgttgatttaaaaatgatccctcctggtgataacccattttacagggatgaagaaagaccaatgctgctttaaggcttttagtgaacatctgaagtgcccacaagtatgttctttccactgctgatttctttttcagagataacaatggtttcgttttgaccaaacttgtattaggacagaattaatgatgcttaaagagaaaagaaaaaaagagagaagaaaaaggagagatgaaaaaggaggatgaggagaagaattaccttttgacaatctgttaggaaggtatgcagtgtgagaactgaagtatttctgatcactctcagactgtcctccgtgatttatgctgacttaactgtttacctataaaccccatacaaagcagggtcataatttgtgatctgtggtggatttctagcagtcatcacaggcttctactgaaagtcctgaaaagaccttgcagtagtccaagctacaccaaacattaacacatatttgtggtaaacatttctgtataaagttacctgacacacatataaacacaaggaacattccatatcattagtcgaaaacaaaaacaaaaaaaaaacctttggtcatttgtaagacatctcatgtcatataaaagttaaatgtaaaaagatacagtccattttgtcctgcacacacgtagactaattcacgtcattaaagaagaagaaaacttaaagatttaaaatgcctatttagcattttagtgtccaacaaagatttaaacaatgatgaatatgttttaaatttgacatagaaaagttctaaaaaatagttaccattgagtggtaagattcagagaaaattaacttgattaatatgttttattcatttgtggacactaaaatagctcaggaaagtgaaaatgtcttagacatacgcaagtcacatgaccatttaaatgtgcaaatgtaagaagattcaatgtgtttacatcaaatgacatattttattgatttattgcagattcagtgcatatgagccaaattgttgagtgtgtaagagctatattgtgtattttattaaattaatatatagttgtgttgcaaaaatatttgggcttatattgtaaatggcaagtgttgccttggtagctgtcgaactctatgagttttgttttttcctgcttccttttccccatggagtgtgggaagcagtgcctcagagcaaagtctcttgtttaatgtatagtctaccaagtactacagtacataatctgttcaaaatgtgtttgagtgagctgatggagctaactgaaaggtcaaaaattacatccatcagtcatggttatgtgcaagtccttgtagaagcttttattaaagtcatgctaaatcacaagaattgacatttgtaccaatatctgaaacttcttcatgttttttcaataacatacagcttctgcctgtgtagatattatgccatcagttggttctcaaaagtattttaagtgcttcagatgtgtgttcccattatattttgaaaacatgaaaaatgctttaatgcatgtatgtaccagcagtggttacttgcattgtgtagtgtttttcaagaggtctgggtcttaacaaaatgttttcctttatctcagtgctcttctgcctctttttgttggtgtcctttgagaacaatacaccttctattccttcatttggttacacctttccttgtgacatttagcgagtttcaaacttacttccatatgaggctaagaaacctcaaatttcaggaattgggaaaaataaaattagcacttgcagaagtagcagcagatgggaaaatgccttgattgacattttctttcagcatttaaaatttttggcattttacagcttcatgacaaacagttttgtgcccataccttagaaaatgtggtgctgagttaaataaaggctgtttgagcactggagcagaaaaatgcattatttgcaaactggtggataattttgtgccttctcttctggccaccaagccagtgtagaaacagcaaaaatgtcataaaaattcttatatttaaaacaaaaacaaaagcaaaaacaaacattgaattaaattaagttttgtaattttaaactttaaaaacttctactgaaaatatttccgccaaatgccatcaatattttagactgtacctcgtttgcaaaactgctttgagagggaagagtggacaactcccatcagccttattctcttgagaactatattttggttcctagtaacagcctttccaaagctctactcttggtttttattactcataaatgtttaaattagaaaagaagggaccttgtacatgtgaaacctaattgactctctatattttggacaatttatgtatctgaaatgtgttgtctctgttatatgatgttatttttgccaggagactacaggttgatttagcttgatagctgaaatttgatggaaaactgatttccatttagtcttaccaagtgttgcttctctcttactagacagatatccacttagtaaaatctaaagcagtatgtaaatgaaaccagcaaagagagtagggtttattttataaacattcttaatgctaagtaaccagttgttcaatttattatatgtgtctgaggacattaaaacaccataaggttgtaataattggttgtgccaatgtgtgagggatttacctttaggctctctgtcaccagtgatttactagtgttagctgtttaacacattatctgtatttagtagtgattatttatttacaagttggtggtaattcagcagtcaggactctaagcttttatagttgaattgaggaaatctcgcttttattcatttagctggcaactgcctttattgcagacctctggtgcttggctttcaaggaagcctatgagatgccaaaatcacacctttagagagcaccttgctctaataggtgatgcatgagcaaacagtgagatttgaaggggttttaacataatttagaatgtgaaaaaaatatcaattcatatctttcaagtactaacccctcaaaaaagcccacacatacaaaatatgtgatgtgataccactttgtcttttaggtctttaagtaactgaagttaagcacagaaaaaaaaatcacttcatggaaatttcagtaagaaacccaaacttctaaaaattgcttgcagatgagctaaaaaaaaaaaaaaaaaaaaaaagcaacaaaataaccttttcatcagagttaaaagtagtgagaatctgttagttatacgtataccaaagtaaacattaaagagacatatcatgcaatttcaaagaattctttcatgctatttcttaacctgacatttctaactttattgcaggcaatatacaaagattggctcactactccataggttaattgaattcctggttgagaaactaacttgttttgttttccaaaattagctgaaatcttgtaaaacatgacttccctttaaaggatctagatattgttcaatttaaaatatggcaccataaaaaagtcatgtagtaatagagcatatgcttttttagaaccaggttaaaagctgtttgttatctaatagagtaaaagttactgaggtcaacagatagacaggtctggcataatatatgcccagtcataatagtctaattatattcttttgacaacagacagcattcatcagagcactaattcgaatgagagttttggctatcaagatgtgttgattctaaatattattgaatgagacctgattaaagtctgactttcctggccccagtgttttgcaggttggctatttccattatcagcccatcactccataaagttcttagctgcaccaagtgattggtgaacaaggacaacaacaaaagcagcatacattgtatggatttatctcaacgctattgtttaatggctgtgtttaatgtgatctatctggaaaatgaggactccgaataaaaagctattactaata

SEQ ID NO: 172070 - DNA, 4471 bp, Homo sapiens
  Payload ID: 13804
  Gene Symbol: PCDH17
  Gene Name: protocadherin 17
  Uniprot ID: O14917
  ENST ID: ENST00000484979
  CDS Start-End: 738-3407
gtagatgcagtccgccgccgccgctgcctcagccagcaatgcaagattagatctctaaatgcagcaaaacactgcctgaaaacagaccggcccgcgcagcaagcagacatttcacggtgcgctggggaagcttcaaaatatatctgtgactctgtcttcgttgctcttcatccccatcaatttcatcacgggaggcgagcagcaagtaagaatttcactttcggatctgcctagagacacacctccctgctccctcccccactcgatgtgaagagtattccggagtctccgggcgggagtagatttgcagcaccctagcgggagcgaggaaaacctactgattctttagctcattatcatctctcccagacgagatttccttcttatcgcctgcctcatcgctcaagtttgagcctcccgaagtccgggcgggagagacgaaacccctggctcacccccagccgcaggaagccaccgccttgctccaagcccctgcagctctgctgcaccgcagcttctcacccagtgcggatgctgtagatcaacaggttcagggaacttgagcagaataaggagagaccaccgggtgccgcagctcgggtgcagagggaaaaaaggacccatagacttgtggctcgcgtcgcgcgcgcacgctgcgccagggccccaggctggcgcgcactccctctctggctcctccagtccgattgctcctgcccccaccttacaggtctgggatgtacctttccatctgttgctgctttcttctatgggcccctgccctcactctcaagaacctcaactactccgtgccggaggagcaaggggccggcacggtgatcgggaacatcggcagggatgctcgactgcagcctgggcttccgcctgcagagcgcggcggcggagggcgcagcaagtcgggtagctaccgggtgctggagaactccgcaccgcacctgctggacgtggacgcagacagcgggctcctctacaccaagcagcgcatcgaccgcgagtccctgtgccgccacaatgccaagtgccagctgtccctcgaggtgttcgccaacgacaaggagatctgcatgatcaaggtagagatccaggacatcaacgacaacgcgccctccttctcctcggaccagatcgaaatggacatctcggagaacgctgctccgggcacccgcttccccctcaccagcgcacatgaccccgacgccggcgagaatgggctccgcacctacctgctcacgcgcgacgatcacggcctctttggactggacgttaagtcccgcggcgacggcaccaagttcccagaactggtcatccagaaggctctggaccgcgagcaacagaatcaccatacgctcgtgctgactgccctggacggtggcgagcctccacgttccgccaccgtacagatcaacgtgaaggtgattgactccaacgacaacagcccggtcttcgaggcgccatcctacttggtggaactgcccgagaacgctccgctgggtacagtggtcatcgatctgaacgccaccgacgccgatgaaggtcccaatggtgaagtgctctactctttcagcagctacgtgcctgaccgcgtgcgggagctcttctccatcgaccccaagaccggcctaatccgtgtgaagggcaatctggactatgaggaaaacgggatgctggagattgacgtgcaggcccgagacctggggcctaaccctatcccagcccactgcaaagtcacggtcaagctcatcgaccgcaacgacaatgcgccgtccatcggtttcgtctccgtgcgccagggggcgctgagcgaggccgcccctcccggcaccgtcatcgccctggtgcgggtcactgaccgggactctggcaagaacggacagctgcagtgtcgggtcctaggcggaggagggacgggcggcggcgggggcctgggcgggcccgggggttccgtccccttcaagcttgaggagaactacgacaacttctacacggtggtgactgaccgcccgctggaccgcgagacacaagacgagtacaacgtgaccatcgtggcgcgggacgggggctctcctcccctcaactccaccaagtcgttcgcgatcaagattctagacgagaacgacaacccgcctcggttcaccaaagggctctacgtgcttcaggtgcacgagaacaacatcccgggagagtacctgggctctgtgctcgcccaggatcccgacctgggccagaacggcaccgtatcctactctatcctgccctcgcacatcggcgacgtgtctatctacacctatgtgtctgtgaatcccacgaacggggccatctacgccctgcgctcctttaacttcgagcagaccaaggcttttgagttcaaggtgcttgctaaggactcgggggcgcccgcgcacttggagagcaacgccacggtgagggtgacagtgctagacgtgaatgacaacgcgccagtgatcgtgctccccacgctgcagaacgacaccgcggagctgcaggtgccgcgcaacgctggcctgggctatctggtgagcactgtgcgcgccctagacagcgacttcggcgagagcgggcgtctcacctacgagatcgtggacggcaacgacgaccacctgtttgagatcgacccgtccagcggcgagatccgcacgctgcaccctttctgggaggacgtgacgcccgtggtggagctggtggtgaaggtgaccgaccacggcaagcctaccctgtccgcagtggccaagctcatcatccgctcggtgagcggatcccttcccgagggggtaccacgggtgaatggcgagcagcaccactgggacatgtcgctgccgctcatcgtgactctgagcactatctccatcatcctcctagcggccatgatcaccatcgccgtcaagtgcaagcgcgagaacaaggagatccgcacttacaactgccgcatcgccgagtacagccacccgcagctgggtgggggcaagggcaagaagaagaagatcaacaaaaatgatatcatgctggtgcagagcgaagtggaggagaggaacgccatgaacgtcatgaacgtggtgagcagcccctccctggccacctcccccatgtacttcgactaccagacccgcctgcccctcagctcgccccggtcggaggtgatgtatctcaaaccggcctccaacaacctgactgtccctcaggggcacgcgggctgccacaccagcttcaccggacaagggactaatgcaagcgagacccctgccactcggatgtccataattcagacagacaattttcccgcagagcccaattacatgggcagcaggcagcagtttgttcaaagtatttcagtagctccacgtttaaggacccagaaagagccagcctgagagacagtgggcacggggacagtgatcaggctgacagtgaccaagacactaacaaaggctcctgctgtgacatgtctgttagggaggcactcaagatgaaaactacttcaactaaaagccaaccacttgaacaagaaccagaagagtgtgttaattgcacagatgaatgccgagtgcttggtcattctgacaggtgctggatgccacagttccctgcagccaatcaggctgaaaatgcagattaccgcacaaatctctttgtacctacagttgaagctaatgttgagactgagacttacgaaactgtgaatcccactgggaaaaagactttttgtacatttggaaaagacaagcgagagcacactattctcattgccaacgttaaaccttatttaaaagccaaacgtgccctgagccctctcctccaagaggtcccctcagcatcaagcagcccaaccaaggcgtgcatcgagccttgcacctcaacaaaaggctccctggatggctgtgaagcaaaaccaggagccctggctgaagcaagcagtcagtacttgcccactgacagtcaatatctgtcacctagtaagcaaccaagagaccctcccttcatggcttccgatcagatggcaagggtctttgcagatgtgcattccagagccagccgggattccagtgagatgggtgctgttcttgagcagcttgaccaccccaacagggatctgggcagagagtctgtggatgcagaggaagttgtgagagaaattgataagcttttgcaagactgccggggaaacgaccctgtggctgtgagaaagtgaaaaaagaaaaaaaaaaaggcattggcattttcttgtctcttctgttgatttaaaaatgatccctcctggtgataacccattttacagggatgaagaaagaccaatgctgctttaaggcttttagtgaacatctgaagtgcccacaagtatgttctttccactgctgatttctttttcagagataacaatggtttcgttttgaccaaacttgtattaggacagaattaatgatgcttaaagagaaaa

SEQ ID NO: 172071 - DNA, 1640 bp, Homo sapiens
  Payload ID: 13804
  Gene Symbol: PCDH17
  Gene Name: protocadherin 17
  ENST ID: ENST00000612954
  CDS Start-End: 1-1640
ctagacagcgacttcggcgagagcgggcgtctcacctacgagatcgtggacggcaacgacgaccacctgtttgagatcgacccgtccagcggcgagatccgcacgctgcaccctttctgggaggacgtgacgcccgtggtggagctggtggtgaaggtgaccgaccacggcaagcctaccctgtccgcagtggccaagctcatcatccgctcggtgagcggatcccttcccgagggggtaccacgggtgaatggcgagcagcaccactgggacatgtcgctgccgctcatcgtgactctgagcactatctccatcatcctcctagcggccatgatcaccatcgccgtcaagtgcaagcgcgagaacaaggagatccgcacttacaactgccgcatcgccgagtacagccacccgcagctgggtgggggcaagggcaagaagaagaagatcaacaaaaatgatatcatgctggtgcagagcgaagtggaggagaggaacgccatgaacgtcatgaacgtggtgagcagcccctccctggccacctcccccatgtacttcgactaccagacccgcctgcccctcagctcgccccggtcggaggtgatgtatctcaaaccggcctccaacaacctgactgtccctcaggggcacgcgggctgccacaccagcttcaccggacaagggactaatgcaagcgagacccctgccactcggatgtccataattcagacagacaattttcccgcagagcccaattacatgggcagcaggcagcagtttgttcaaagctccacgtttaaggacccagaaagagccagcctgagagacagtgggcacggggacagtgatcaggctgacagtgaccaagacactaacaaaggctcctgctgtgacatgtctgttagggaggcactcaagatgaaaactacttcaactaaaagccaaccacttgaacaagaaccagaagagtgtgttaattgcacagatgaatgccgagtgcttggtcattctgacaggtgctggatgccacagttccctgcagccaatcaggctgaaaatgcagattaccgcacaaatctctttgtacctacagttgaagctaatgttgagactgagacttacgaaactgtgaatcccactgggaaaaagactttttgtacatttggaaaagacaagcgagagcacactattctcattgccaacgttaaaccttatttaaaagccaaacgtgccctgagccctctcctccaagaggtcccctcagcatcaagcagcccaaccaaggcgtgcatcgagccttgcacctcaacaaaaggctccctggatggctgtgaagcaaaaccaggagccctggctgaagcaagcagtcagtacttgcccactgacagtcaatatctgtcacctagtaagcaaccaagagaccctcccttcatggcttccgatcagatggcaagggtctttgcagatgtgcattccagagccagccgggattccagtgagatgggtgctgttcttgagcagcttgaccaccccaacagggatctgggcagagagtctgtggatgcagaggaagttgtgagagaaattgataagcttttgcaagactgccggggaaacgaccctgtggctgtgagaaagtg

SEQ ID NO: 172072 - DNA, 552 bp, Homo sapiens
  Payload ID: 13804
  Gene Symbol: PCDH17
  Gene Name: protocadherin 17
  ENST ID: ENST00000615375
  CDS Start-End: 1-552
ctgactgtccctcaggggcacgcgggctgccacaccagcttcaccggacaagggactaatgcaagcgagacccctgccactcggatgtccataattcagacagacaattttcccgcagagcccaattacatgggcagcaggcagcagtttgttcaaagtagctccacgtttaaggacccagaaagagccagcctgagagacagtgggcacggggacagtgatcaggctgacagtgaccaagacactaacaaaggctcctgctgtgacatgtctgttagggaggcactcaagatgaaaactacttcaactaaaagccaaccacttgaacaagcattcccgactttgctttcctttgctatcctcaccctacacaccatcacaagtagacttcagtctgttgatctgcttcctccagaaccagaagagtgtgttaattgcacagatgaatgccgagtgcttggtcattctgacaggtgctggatgccacagttccctgcagccaatcaggctgaaaatgcagattaccgcacaaatctctttgtacctacagtt

SEQ ID NO: 172073 - DNA, 5906 bp, Homo sapiens
  Payload ID: 13805
  Gene Symbol: PCDH18
  Gene Name: protocadherin 18
  Uniprot ID: Q9HCL0
  ENST ID: ENST00000344876
  CDS Start-End: 388-3795
gcaatcacgggtgtttagtctgcagccgagcagctaaagggagaaagaatcgctcaggaaagacacactgcagactccaccggcaccctgcaatagatggattccgactacacaagggagaaaacgcggaggtgacactctcctgcctggaaagaggacgaacgaccaaacaaacgcaaggactggactccatgccgaaggtatctggaagtcgtgacacggtgtgtataaaacaaaagtttgcgagctgttaattgctgtgctgtgttattaagagacgctttcaagtttcaagtaccaaatgtagctttacgttgccaaaggaagttgaggcaattgctttgctgttttaacttgctctgtgagggaaatctcataaactgaccaatgcaccaaatgaatgctaaaatgcactttaggtttgtttttgcacttctgatagtatctttcaaccacgatgtactgggcaagaatttgaaatacaggatttatgaggaacagagggttggatcagtaattgcaagactatcagaggatgtggctgatgttttattgaagcttcctaatccttctactgttcgatttcgagccatgcagaggggaaattctcctctacttgtagtaaacgaggataatggggaaatcagcataggggctacaattgaccgtgaacaactgtgccagaaaaacttgaactgttccatagagtttgatgtgatcactctacccacagagcatctgcagcttttccatattgaagttgaagtgctggatattaatgacaattctccccagttttcaagatctctcatacctattgagatatctgagagtgcagcagttgggactcgcattcccctggacagtgcatttgatccagatgttggggaaaattccctccacacatactcgctctctgccaatgatttttttaatatcgaggttcggaccaggactgatggagccaagtatgcagaactcatagtggtcagagagttagatcgggagctgaagtcaagctacgagcttcagctcactgcctcagacatgggagtacctcagaggtctggctcatccatactaaaaataagcatttcagactccaatgacaacagccctgcttttgagcagcaatcttatataatacaactcttagaaaactccccggttggcactttgctcttagatctgaatgccacggatccagatgagggcgctaatgggaaaattgtatattccttcagcagtcatgtgtctcccaaaattatggagacttttaaaattgattctgaaagaggacatttgactcttttcaagcaagtggattatgaaatcaccaaatcctatgagattgatgttcaggctcaagatttgggtccaaattcaatcccagcccattgcaaaattataattaaggttgtggatgttaatgacaataaacctgaaattaacatcaacctcatgtcccctggaaaagaagaaatatcttatatttttgaaggggatcctattgatacatttgttgctttggtcagagttcaggacaaggattctgggctgaatggagaaatagtttgtaagcttcatggacatggtcactttaaacttcagaagacatatgaaaacaattatttaatcttaactaatgccacactggatagagaaaagagatctgagtatagtttgactgtaatcgctgaggacagggggacacccagtctctctacagtgaaacattttacagttcaaatcaatgatatcaatgacaatccaccccacttccagagaagccgatatgaatttgtaatttcagaaaataactcaccaggggcatatatcaccactgttacagccacagatcctgatcttggagaaaatgggcaagtgacatacaccatcttggagagttttattctaggaagttccataactacatatgtaaccattgacccatctaatggagccatctatgccctcagaatctttgatcatgaagaagtgagtcagatcacttttgtggtagaagcaagagatggaggaagcccgaagcaactggtaagcaataccacagttgtgctcaccatcattgacgaaaatgacaacgttcctgtggttatagggcctgcattgcgtaataatacggcagaaatcaccattcccaaaggggctgaaagtggctttcatgtcacaagaataagggcaattgacagagactctggtgtgaatgctgaactcagctgcgccatagtagcaggtaatgaggagaatatcttcataattgatccacgatcatgtgacatccataccaacgttagcatggattctgttccctacacagaatgggagctgtcagttatcattcaggacaaaggcaatcctcagctacataccaaagtccttctgaagtgcatgatctttgaatatgcagagtcggtgacaagtacagcaatgacttcagtaagccaggcatccttggatgtctccatgataataattatttccttaggagcaatttgtgcagtgttgctggttattatggtgctatttgcaactaggtgtaaccgcgagaagaaagacactagatcctataactgcagggtggccgaatcaacttaccagcaccacccaaaaaggccatcccggcagattcacaaaggggacatcacattggtgcctaccataaatggcactctgcccatcagatctcatcacagatcgtctccatcttcatctcctaccttagaaagagggcagatgggcagccggcagagtcacaacagtcaccagtcactcaacagtttggtgacaatctcatcaaaccacgtgccagagaatttctcattagaactcacccacgccactcctgctgttgagcaggtctctcagcttctttcaatgcttcaccaggggcaatatcagccaagaccaagttttcgaggaaacaaatattccaggagctacagatatgcccttcaagacatggacaaatttagcttgaaagacagtggccgtggtgacagtgaggcaggagacagtgattatgatttggggcgagattctccaatagataggctgttgggtgaaggattcagcgacctgtttctcacagatggaagaattccagcagctatgagactctgcacggaggagtgcagggtcctgggacactctgaccagtgctggatgccaccactgccctcaccgtcttctgattataggagtaacatgttcattccaggggaagaattcccaacgcaaccccagcagcagcatccacatcagagtcttgaggatgacgctcagcctgcagattccggtgaaaagaagaagagtttttccacctttggaaaggactccccaaacgatgaggacactggggataccagcacatcatctctgctctcggaaatgagcagtgtgttccagcgtctcttaccgccttccctggacacctattctgaatgcagtgaggtggatcggtccaactccctggagcgcaggaagggacccttgccagccaaaactgtgggttacccacagggggtagcggcatgggcagccagtacgcattttcaaaatcccaccaccaactgtgggccgccacttggaactcactccagtgtgcagccttcttcaaaatggctgccagccatggaggagatccctgaaaattatgaggaagatgattttgacaatgtgctcaaccacctcaatgatgggaaacacgaactcatggatgccagtgaactggtggcagagattaacaaactgcttcaagatgtccgccagagctaggagattttagcgaagcatttttgtttccatgtatatggaaatagggaacaacaacaacaacaaaaaaccctgaaagaactggcattgccaaatagttgcatttatcataaatgtgtctgtgtatattgaatattaaatactgtattttcgtatgtacacaatgcaagtgtgattattttaatctgtattttaaaaatacatttgtaccttatatttatgtgtaatttaacaaacaaattttatttttttactcccatgacagacatgtttttcctagtcgtgtagaaactagccactgttcaaatctgatacactattcaaccacaaagtgtaaaggcactgcttagattagttttgttggggaagaattattatgttgtatgaacaaccccactgaagcattatacaattcttaattccattaagtgatcccactttttttcaataactttttagaaattaagaatcattaaaattgttaagctattttattgttattttctctactttctactagccccaatagttgaactcttataggaaaatcgaaagataaagtgaaagtttatttcaggactgagaaatatcttgaaggttatttattagatgactatctcaaatgaactttttatagacaatgatgaaaacagaattaaagtcaatgtttcctgactcccaggcccctactattccaggccatcacactggcctgttccggagaatatttctctcacaatattattatctacttataattatggtaaacaataaattttattccatccttgtagtatgaaacatgctccaaggaaatggaatctgtcctttaaatggataacagtatgtgttctaatggcataaaatattactggataaaaacagttgtgtcagtgtctctcctaaggtagtaaatataattgacttattctgaacccattctattttgaatctcccctttcctctcacaatacttgaacattttaatcttttggaatattgtctttctttgttataactattcatttttagcttttgtctccagtgcatgatctcatatttttgcttttatttttagtataagaacatttataaaatcatatttttgttactgcaattgttttatttgttgtgtggcaaatgagaaatcctttatttattgtgctgtgatctctctgtgtggaatgccttggtgagagagatgcttattatgactattatcatttctgaccaagcttctattaatgttatttctaataatacactatcttgattgtactctccagaaaatttttctgtcagtgaaaataaaagaaaaattaaagtaaagctaaggaactgtctataagtcagagtcctgttcctacatatttgttcaaaagcttggcatgcagcaggcccttcctgagcgggtgattcagtgttgagtttcaaataataaacaggcagcattcagttggctgggcgaacaagaaaaacacaatggaaaaggaatgagtttgagacttgtaatgggaatgaaagtagtaagccatattccagctaaataagttaaatgcatttggggaataaagaaaaaagagtaagcaagcaataattgcttgaatatttttcaaattacaacaaaaaaaaatactttcttaggacattttgtattaaattgtgcaggataaaaaggtatccttacaatgtttccaggaggcaagaatattatcgtccctggcttgctagtcaggaattgaaacactgggaaagttaagtaactgaaaagtgactaaaattcagatatttgaattctcaaatgagtaccacattaaatagaatatattacctctttcaacaggcacattttcctttataggagagattgcaattacaagtgaaatttcagtatatttttcagtagattacacacacaaacgctaaccatatttaaatgcattctgcctttcaacttcacttcctttcagtatatattaccattaagaaaaagacttttatatcctcactgttcttaatttaaagcaccagcagtaatatgggaagctatgctgaaaaccgctattttgaataatgtgaaataaataaaatgcaatatttcattcaacacaaaa

SEQ ID NO: 172074 - DNA, 5102 bp, Homo sapiens
  Payload ID: 13805
  Gene Symbol: PCDH18
  Gene Name: protocadherin 18
  Uniprot ID: Q9HCL0
  ENST ID: ENST00000412923
  CDS Start-End: 372-3776
agtctgcagccgagcagctaaagggagaaagaatcgctcaggaaagacacactgcagactccaccggcaccctgcaatagatggattccgactacacaagggagaaaacgcggaggtgacactctcctgcctggaaagaggacgaacgaccaaacaaacgcaaggactggactccatgccgaaggtatctggaagtcgtgacacggtgtgtataaaacaaaagtttgcgagctgttaattgctgtgctgtgttattaagagacgctttcaagtttcaagtaccaaatgtagctttacgttgccaaaggaagttgaggcaattgctttgctgttttaacttgctctgtgagggaaatctcataaactgaccaatgcaccaaatgaatgctaaaatgcactttaggtttgtttttgcacttctgatagtatctttcaaccacgatgtactgggcaagaatttgaaatacaggatttatgaggaacagagggttggatcagtaattgcaagactatcagaggatgtggctgatgttttattgaagcttcctaatccttctactgttcgatttcgagccatgcagaggggaaattctcctctacttgtagtaaacgaggataatggggaaatcagcataggggctacaattgaccgtgaacaactgtgccagaaaaacttgaactgttccatagagtttgatgtgatcactctacccacagagcatctgcagcttttccatattgaagttgaagtgctggatattaatgacaattctccccagttttcaagatctctcatacctattgagatatctgagagtgcagcagttgggactcgcattcccctggacagtgcatttgatccagatgttggggaaaattccctccacacatactcgctctctgccaatgatttttttaatatcgaggttcggaccaggactgatggagccaagtatgcagaactcatagtggtcagagagttagatcgggagctgaagtcaagctacgagcttcagctcactgcctcagacatgggagtacctcagaggtctggctcatccatactaaaaataagcatttcagactccaatgacaacagccctgcttttgagcagcaatcttatataatacaactcttagaaaactccccggttggcactttgctcttagatctgaatgccacggatccagatgagggcgctaatgggaaaattgtatattccttcagcagtcatgtgtctcccaaaattatggagacttttaaaattgattctgaaagaggacatttgactcttttcaagcaagtggattatgaaatcaccaaatcctatgagattgatgttcaggctcaagatttgggtccaaattcaatcccagcccattgcaaaattataattaaggttgtggatgttaatgacaataaacctgaaattaacatcaacctcatgtcccctggaaaagaagaaatatcttatatttttgaaggggatcctattgatacatttgttgctttggtcagagttcaggacaaggattctgggctgaatggagaaatagtttgtaagcttcatggacatggtcactttaaacttcagaagacatatgaaaacaattatttaatcttaactaatgccacactggatagagaaaagagatctgagtatagtttgactgtaatcgctgaggacagggggacacccagtctctctacagtgaaacattttacagttcaaatcaatgatatcaatgacaatccaccccacttccagagaagccgatatgaatttgtaatttcagaaaataactcaccaggggcatatatcaccactgttacagccacagatcctgatcttggagaaaatgggcaagtgacatacaccatcttggagagttttattctaggaagttccataactacatatgtaaccattgacccatctaatggagccatctatgccctcagaatctttgatcatgaagaagtgagtcagatcacttttgtggtagaagcaagagatggaggaagcccgaagcaactggtaagcaataccacagttgtgctcaccatcattgacgaaaatgacaacgttcctgtggttatagggcctgcattgcgtaataatacggcagaaatcaccattcccaaaggggctgaaagtggctttcatgtcacaagaataagggcaattgacagagactctggtgtgaatgctgaactcagctgcgccatagtagcaggtaatgaggagaatatcttcataattgatccacgatcatgtgacatccataccaacgttagcatggattctgttccctacacagaatgggagctgtcagttatcattcaggacaaaggcaatcctcagctacataccaaagtccttctgaagtgcatgatctttgaatatgcagagtcggtgacaagtacagcaatgacttcagtaagccaggcatccttggatgtctccatgataataattatttccttaggagcaatttgtgcagtgttgctggttattatggtgctatttgcaactaggtgtaaccgcgagaagaaagacactagatcctataactgcagggtggccgaatcaacttaccagcaccacccaaaaaggccatcccggcagattcacaaaggggacatcacattggtgcctaccataaatggcactctgcccatcagatctcatcacagatcgtctccatcttcatctcctaccttagaaagagggcagatgggcagccggcagagtcacaacagtcaccagtcactcaacagtttggtgacaatctcatcaaaccacgtgccagagaatttctcattagaactcacccacgccactcctgctgttgaggtctctcagcttctttcaatgcttcaccaggggcaatatcagccaagaccaagttttcgaggaaacaaatattccaggagctacagatatgcccttcaagacatggacaaatttagcttgaaagacagtggccgtggtgacagtgaggcaggagacagtgattatgatttggggcgagattctccaatagataggctgttgggtgaaggattcagcgacctgtttctcacagatggaagaattccagcagctatgagactctgcacggaggagtgcagggtcctgggacactctgaccagtgctggatgccaccactgccctcaccgtcttctgattataggagtaacatgttcattccaggggaagaattcccaacgcaaccccagcagcagcatccacatcagagtcttgaggatgacgctcagcctgcagattccggtgaaaagaagaagagtttttccacctttggaaaggactccccaaacgatgaggacactggggataccagcacatcatctctgctctcggaaatgagcagtgtgttccagcgtctcttaccgccttccctggacacctattctgaatgcagtgaggtggatcggtccaactccctggagcgcaggaagggacccttgccagccaaaactgtgggttacccacagggggtagcggcatgggcagccagtacgcattttcaaaatcccaccaccaactgtgggccgccacttggaactcactccagtgtgcagccttcttcaaaatggctgccagccatggaggagatccctgaaaattatgaggaagatgattttgacaatgtgctcaaccacctcaatgatgggaaacacgaactcatggatgccagtgaactggtggcagagattaacaaactgcttcaagatgtccgccagagctaggagattttagcgaagcatttttgtttccatgtatatggaaatagggaacaacaacaacaacaaaaaaccctgaaagaactggcattgccaaatagttgcatttatcataaatgtgtctgtgtatattgaatattaaatactgtattttcgtatgtacacaatgcaagtgtgattattttaatctgtattttaaaaatacatttgtaccttatatttatgtgtaatttaacaaacaaattttatttttttactcccatgacagacatgtttttcctagtcgtgtagaaactagccactgttcaaatctgatacactattcaaccacaaagtgtaaaggcactgcttagattagttttgttggggaagaattattatgttgtatgaacaaccccactgaagcattatacaattcttaattccattaagtgatcccactttttttcaataactttttagaaattaagaatcattaaaattgttaagctattttattgttattttctctactttctactagccccaatagttgaactcttataggaaaatcgaaagataaagtgaaagtttatttcaggactgagaaatatcttgaaggttatttattagatgactatctcaaatgaactttttatagacaatgatgaaaacagaattaaagtcaatgtttcctgactcccaggcccctactattccaggccatcacactggcctgttccggagaatatttctctcacaatattattatctacttataattatggtaaacaataaattttattccatccttgtagtatgaaacatgctccaaggaaatggaatctgtcctttaaatggataacagtatgtgttctaatggcataaaatattactggataaaaacagttgtgtcagtgtctctcctaaggtagtaaatataattgacttattctgaacccattctattttgaatctcccctttcctctcacaatacttgaacattttaatcttttggaatattgtctttctttgttataactattcatttttagcttttgtctccagtgcatgatctcatatttttgcttttatttttagtataagaacatttataaaatcatatttttgttactgcaattgttttatttgttgtgtggcaaatgagaaatcctttatttattgtgctgtgatctctctgtgtggaatgccttggtgagagagatgcttattatgactattatcatttctgaccaagcttctattaatgttatttctaataatacactatcttgattgtactctccagaaaatttttctgtcagtgaaaataaaagaaaaattaaagtaaa

SEQ ID NO: 172075 - DNA, 1483 bp, Homo sapiens
  Payload ID: 13805
  Gene Symbol: PCDH18
  Gene Name: protocadherin 18
  ENST ID: ENST00000510305
  CDS Start-End: 252-1292
agattttagactggagtcagcaatcacgggtgtttagtctgcagccgagcagctaaagggagaaagaatcgctcaggaaagacacactgcagactccaccggcaccctgcaatagatggattccgactacacaagggagaaaacgcggaggtgacactctcctgcctggaaagaggacgaacgaccaaacaaacgcaaggactggactccatgccgaaggtatctggaagtcgtgacacgaaagagggcagatgggcagccggcagagtcacaacagtcaccagtcactcaacagtttggtgacaatctcatcaaaccacgtgccagagaatttctcattagaactcacccacgccactcctgctgttgagcaggtctctcagcttctttcaatgcttcaccaggggcaatatcagccaagaccaagttttcgaggaaacaaatattccaggagctacagatatgcccttcaagacatggacaaatttagcttgaaagacagtggccgtggtgacagtgaggcaggagacagtgattatgatttggggcgagattctccaatagataggctgttgggtgaaggattcagcgacctgtttctcacagatggaagaattccagcagctatgagactctgcacggaggagtgcagggtcctgggacactctgaccagtgctggatgccaccactgccctcaccgtcttctgattataggagtaacatgttcattccaggggaagaattcccaacgcaaccccagcagcagcatccacatcagagtcttgaggatgacgctcagcctgcagattccggtgaaaagaagaagagtttttccacctttggaaaggactccccaaacgatgaggacactggggataccagcacatcatctctgctctcggaaatgagcagtgtgttccagcgtctcttaccgccttccctggacacctattctgaatgcagtgaggtggatcggtccaactccctggagcgcaggaagggacccttgccagccaaaactgtgggttacccacagggggtagcggcatgggcagccagtacgcattttcaaaatcccaccaccaactgtgggccgccacttggaactcactccagtgtgcagccttcttcaaaatggctgccagccatggaggagatccctgaaaattatgaggaagatgattttgacaatgtgctcaaccacctcaatgatgggaaacacgaactcatggatgccagtgaactggtggcagagattaacaaactgcttcaagatgtccgccagagctaggagattttagcgaagcatttttgtttccatgtatatggaaatagggaacaacaacaacaacaaaaaaccctgaaagaactggcattgccaaatagttgcatttatcataaatgtgtctgtgtatattgaatattaaatactgtattttcgtatgtacacaatgcaagtgtgattattttaatctgtatttt

SEQ ID NO: 172076 - DNA, 1331 bp, Homo sapiens
  Payload ID: 13805
  Gene Symbol: PCDH18
  Gene Name: protocadherin 18
  ENST ID: ENST00000511115
  CDS Start-End: 193-1140
agcaatcacgggtgtttagtctgcagccgagcagctaaagggagaaagaatcgctcaggaaagacacactgcagactccaccggcaccctgcaatagatggattccgactacacaagggagaaaacgcggaggtgacactctcctgcctggaaagaggacgaacgaccaaacaaacgcaaggactggactccatgccgaaggtatctggaagtcgtgacacggtctctcagcttctttcaatgcttcaccaggggcaatatcagccaagaccaagttttcgaggaaacaaatattccaggagctacagatatgcccttcaagacatggacaaatttagcttgaaagacagtggccgtggtgacagtgaggcaggagacagtgattatgatttggggcgagattctccaatagataggctgttgggtgaaggattcagcgacctgtttctcacagatggaagaattccagcagctatgagactctgcacggaggagtgcagggtcctgggacactctgaccagtgctggatgccaccactgccctcaccgtcttctgattataggagtaacatgttcattccaggggaagaattcccaacgcaaccccagcagcagcatccacatcagagtcttgaggatgacgctcagcctgcagattccggtgaaaagaagaagagtttttccacctttggaaaggactccccaaacgatgaggacactggggataccagcacatcatctctgctctcggaaatgagcagtgtgttccagcgtctcttaccgccttccctggacacctattctgaatgcagtgaggtggatcggtccaactccctggagcgcaggaagggacccttgccagccaaaactgtgggttacccacagggggtagcggcatgggcagccagtacgcattttcaaaatcccaccaccaactgtgggccgccacttggaactcactccagtgtgcagccttcttcaaaatggctgccagccatggaggagatccctgaaaattatgaggaagatgattttgacaatgtgctcaaccacctcaatgatgggaaacacgaactcatggatgccagtgaactggtggcagagattaacaaactgcttcaagatgtccgccagagctaggagattttagcgaagcatttttgtttccatgtatatggaaatagggaacaacaacaacaacaaaaaaccctgaaagaactggcattgccaaatagttgcatttatcataaatgtgtctgtgtatattgaatattaaatactgtattttcgtatgtacacaatgcaagtgtgattattttaatctgtatttt

SEQ ID NO: 172077 - DNA, 4625 bp, Homo sapiens
  Payload ID: 13805
  Gene Symbol: PCDH18
  Gene Name: protocadherin 18
  ENST ID: ENST00000507846
  CDS Start-End: 555-3299
agattttagactggagtcagcaatcacgggtgtttagtctgcagccgagcagctaaagggagaaagaatcgctcaggaaagacacactgcagactccaccggcaccctgcaatagatggattccgactacacaagggagaaaacgcggaggtgacactctcctgcctggaaagaggacgaacgaccaaacaaacgcaaggactggactccatgccgaaggtatctggaagtcgtgacacgagcatctgcagcttttccatattgaagttgaagtgctggatattaatgacaattctccccagttttcaagatctctcatacctattgagatatctgagagtgcagcagttgggactcgcattcccctggacagtgcatttgatccagatgttggggaaaattccctccacacatactcgctctctgccaatgatttttttaatatcgaggttcggaccaggactgatggagccaagtatgcagaactcatagtggtcagagagttagatcgggagctgaagtcaagctacgagcttcagctcactgcctcagacatgggagtacctcagaggtctggctcatccatactaaaaataagcatttcagactccaatgacaacagccctgcttttgagcagcaatcttatataatacaactcttagaaaactccccggttggcactttgctcttagatctgaatgccacggatccagatgagggcgctaatgggaaaattgtatattccttcagcagtcatgtgtctcccaaaattatggagacttttaaaattgattctgaaagaggacatttgactcttttcaagcaagtggattatgaaatcaccaaatcctatgagattgatgttcaggctcaagatttgggtccaaattcaatcccagcccattgcaaaattataattaaggttgtggatgttaatgacaataaacctgaaattaacatcaacctcatgtcccctggaaaagaagaaatatcttatatttttgaaggggatcctattgatacatttgttgctttggtcagagttcaggacaaggattctgggctgaatggagaaatagtttgtaagcttcatggacatggtcactttaaacttcagaagacatatgaaaacaattatttaatcttaactaatgccacactggatagagaaaagagatctgagtatagtttgactgtaatcgctgaggacagggggacacccagtctctctacagtgaaacattttacagttcaaatcaatgatatcaatgacaatccaccccacttccagagaagccgatatgaatttgtaatttcagaaaataactcaccaggggcatatatcaccactgttacagccacagatcctgatcttggagaaaatgggcaagtgacatacaccatcttggagagttttattctaggaagttccataactacatatgtaaccattgacccatctaatggagccatctatgccctcagaatctttgatcatgaagaagtgagtcagatcacttttgtggtagaagcaagagatggaggaagcccgaagcaactggtaagcaataccacagttgtgctcaccatcattgacgaaaatgacaacgttcctgtggttatagggcctgcattgcgtaataatacggcagaaatcaccattcccaaaggggctgaaagtggctttcatgtcacaagaataagggcaattgacagagactctggtgtgaatgctgaactcagctgcgccatagtagcaggtaatgaggagaatatcttcataattgatccacgatcatgtgacatccataccaacgttagcatggattctgttccctacacagaatgggagctgtcagttatcattcaggacaaaggcaatcctcagctacataccaaagtccttctgaagtgcatgatctttgaatatgcagagtcggtgacaagtacagcaatgacttcagtaagccaggcatccttggatgtctccatgataataattatttccttaggagcaatttgtgcagtgttgctggttattatggtgctatttgcaactaggtgtaaccgcgagaagaaagacactagatcctataactgcagggtggccgaatcaacttaccagcaccacccaaaaaggccatcccggcagattcacaaaggggacatcacattggtgcctaccataaatggcactctgcccatcagatctcatcacagatcgtctccatcttcatctcctaccttagaaagagggcagatgggcagccggcagagtcacaacagtcaccagtcactcaacagtttggtgacaatctcatcaaaccacgtgccagagaatttctcattagaactcacccacgccactcctgctgttgaggtctctcagcttctttcaatgcttcaccaggggcaatatcagccaagaccaagttttcgaggaaacaaatattccaggagctacagatatgcccttcaagacatggacaaatttagcttgaaagacagtggccgtggtgacagtgaggcaggagacagtgattatgatttggggcgagattctccaatagataggctgttgggtgaaggattcagcgacctgtttctcacagatggaagaattccagcagctatgagactctgcacggaggagtgcagggtcctgggacactctgaccagtgctggatgccaccactgccctcaccgtcttctgattataggagtaacatgttcattccaggggaagaattcccaacgcaaccccagcagcagcatccacatcagagtcttgaggatgacgctcagcctgcagattccggtgaaaagaagaagagtttttccacctttggaaaggactccccaaacgatgaggacactggggataccagcacatcatctctgctctcggaaatgagcagtgtgttccagcgtctcttaccgccttccctggacacctattctgaatgcagtgaggtggatcggtccaactccctggagcgcaggaagggacccttgccagccaaaactgtgggttacccacagggggtagcggcatgggcagccagtacgcattttcaaaatcccaccaccaactgtgggccgccacttggaactcactccagtgtgcagccttcttcaaaatggctgccagccatggaggagatccctgaaaattatgaggaagatgattttgacaatgtgctcaaccacctcaatgatgggaaacacgaactcatggatgccagtgaactggtggcagagattaacaaactgcttcaagatgtccgccagagctaggagattttagcgaagcatttttgtttccatgtatatggaaatagggaacaacaacaacaacaaaaaaccctgaaagaactggcattgccaaatagttgcatttatcataaatgtgtctgtgtatattgaatattaaatactgtattttcgtatgtacacaatgcaagtgtgattattttaatctgtattttaaaaatacatttgtaccttatatttatgtgtaatttaacaaacaaattttatttttttactcccatgacagacatgtttttcctagtcgtgtagaaactagccactgttcaaatctgatacactattcaaccacaaagtgtaaaggcactgcttagattagttttgttggggaagaattattatgttgtatgaacaaccccactgaagcattatacaattcttaattccattaagtgatcccactttttttcaataactttttagaaattaagaatcattaaaattgttaagctattttattgttattttctctactttctactagccccaatagttgaactcttataggaaaatcgaaagataaagtgaaagtttatttcaggactgagaaatatcttgaaggttatttattagatgactatctcaaatgaactttttatagacaatgatgaaaacagaattaaagtcaatgtttcctgactcccaggcccctactattccaggccatcacactggcctgttccggagaatatttctctcacaatattattatctacttataattatggtaaacaataaattttattccatccttgtagtatgaaacatgctccaaggaaatggaatctgtcctttaaatggataacagtatgtgttctaatggcataaaatattactggataaaaacagttgtgtcagtgtctctcctaaggtagtaaatataattgacttattctgaacccattctattttgaatctcccctttcctctcacaatacttgaacattttaatcttttggaatattgtctttctttgttataactattcatttttagcttttgtctccagtgcatgatctcatatttttgcttttatttttagtataagaacatttataaaatcatatttttgttactgcaattgttttatttgttgtgtggcaaatgagaaatcctttatttattgtgctgtgatctctctgtgtggaatgccttggtgagagagatgcttattatgactattatcatttctgaccaagcttctattaatgttatttctaataatacactatcttgattgtactctccagaaaatttttctgtcagtgaaaataaaagaaaaattaaagtaaa

SEQ ID NO: 172078 - DNA, 819 bp, Homo sapiens
  Payload ID: 13805
  Gene Symbol: PCDH18
  Gene Name: protocadherin 18
  ENST ID: ENST00000611581
  CDS Start-End: 211-501
agattttagactggagtcagcaatcacgggtgtttagtctgcagccgagcagctaaagggagaaagaatcgctcaggaaagacacactgcagactccaccggcaccctgcaatagatggattccgactacacaagggagaaaacgcggaggtgacactctcctgcctggaaagaggacgaacgaccaaacaaacgcaaggactggactccatgccgaaggtatctggaagtcgtgacacggtctctcagcttctttcaatgcttcaccaggggcaatatcagccaagaccaagttttcgaggaaacaaatattccaggagctacagatatgcccttcaagacatggacaaatttagcttgaaagacagtggccgtggtgacagtgaggcaggagacagtgattatgatttggggcgagattctccaatagataggctgttgggtgaaggattcagcgacctgtttctcacagatggaagaattccagcagtgcagctatgagactctgcacggaggagtgcagggtcctgggacactctgaccagtgctggatgccaccactgccctcaccgtcttctgattataggagtaacatgttcattccaggggaagaattcccaacgcaaccccagcagcagcatccacatcagagtcttgaggatgacgctcagcctgcagattccggtgaaaagaagaagagtttttccacctttggaaaggactccccaaacgatgaggacactggggataccagcacatcatctctgctctcggaaatgagcagtgtgttccagcgtctcttaccgccttccctggaca

SEQ ID NO: 172079 - DNA, 7937 bp, Homo sapiens
  Payload ID: 13806
  Gene Symbol: PCDH19
  Gene Name: protocadherin 19
  Uniprot ID: Q8TAB3
  ENST ID: ENST00000255531
  CDS Start-End: 1-3306
atggagtcgctcctgctgccggtgctgctgctgctggccatactgtggacgcaggctgccgccctcattaatctcaagtactcggtagaagaggagcagcgcgccgggacggtgattgccaacgtggccaaagacgcgcgagaggcgggcttcgcgctggacccccggcaggcttcagcctttcgcgtggtgtccaactcggctccacacctagtggacatcaatcccagctctggcctgctggtcaccaagcagaagattgaccgtgatctgctgtgccgccagagccccaagtgcatcatctcgctcgaggtcatgtccagctcaatggaaatctgcgtgataaaggtggagatcaaggacctgaacgacaatgcgcccagtttcccggcagcacagatcgagctggagatctcggaggcagccagccctggcacgcgcatcccgctggacagcgcttacgatccagactcaggaagctttggcgtgcagacttacgagctcacgcccaacgagctgttcggcctggagatcaagacgcgcggcgacggctcccgctttgccgaactcgtggtggaaaagagcctggaccgcgagacgcagtcgcactacagcttccgaatcactgcgctagacggtggcgacccgccgcgcctgggcaccgttggccttagtatcaaggtgaccgactccaatgacaacaacccggtgtttagcgagtccacctacgcggtgagcgtgccagaaaactcgcctcccaacacacccgtcatccgcctcaacgccagcgatccagacgagggcaccaacggccaggtggtctactccttctatggctacgtcaacgaccgcacgcgcgagctctttcagatcgacccgcacagtggcctggtcactgtcactggcgctttagactacgaagaggggcacgtgtacgaactggacgtgcaggctaaggacttggggcccaattccatcccggcacactgcaaggtcaccgtcagcgtgctggacaccaatgacaatccgccggtcatcaacctgctgtcagtcaacagtgagcttgtggaggtcagcgagagcgcccccccgggctacgtgatcgccttggtgcgggtgtctgatcgcgactcaggcctcaatggacgtgtgcagtgccgtttgctgggcaatgtgccctttcgactgcaggaatatgagagcttctccactattctggtggacggacggctggaccgcgagcagcacgaccaatacaacctcacaattcaggcacgcgacggcggcgtgcccatgctgcagagtgccaagtcctttaccgtgctcatcactgacgaaaatgacaaccacccgcacttttccaagccctactaccaggtcattgtgcaggagaacaacacgcctggcgcctatctgctctctgtgtctgctcgcgaccccgacctgggtctcaacggcagtgtctcctaccagatcgtgccgtcgcaggtgcgggacatgcctgtcttcacctatgtctccatcaatcccaactcaggcgacatctacgcgctgcgatcctttaaccacgagcagaccaaggcgttcgaattcaaggtgctggccaaggacggcggccttccctcactgcaaagcaacgctacggtgcgggtcatcatcctcgacgtcaacgacaacaccccggtcatcacagccccacctctgattaacggcactgccgaggtctacataccccgcaactctggcataggctacctggtgactgttgtcaaggcagaagactacgatgagggcgaaaatggccgagtcacctacgacatgaccgagggcgaccgcggcttctttgaaatagaccaggtcaatggcgaagtcagaaccacccgcaccttcggggagagctccaagtcctcctatgagcttatcgtggtggctcacgaccacggcaagacatctctctctgcctctgctctcgtcctaatctacttgtcccctgctctcgatgcccaagagtcaatgggctctgtgaacttgtccttgattttcattattgccctgggctccattgcgggcatcctctttgtaactatgatcttcgtggcaatcaagtgcaagcgagacaacaaagagatccggacctacaactgcagaattgctgagtactcctatgggcatcaaaagaaatcaagcaagaagaaaaaaatcagtaagaatgacatccgcctggtaccccgggatgtggaggagacagacaagatgaacgttgtcagttgctcttccctgacctcctccctcaactattttgactaccaccagcagacgctgcccctgggctgccgccgctctgagagcactttcctgaatgtggagaaccagaatacccgcaacaccagtgctaaccacatctaccatcactctttcaacagccaggggccccagcagcctgacctgattatcaacggtgtgcctctgcctgagactgaaaactattcttttgactccaactacgtgaatagccgagcccatttaatcaagagcagctccaccttcaaggacttagagggcaacagcctgaaggatagtggacatgaggagagtgaccaaactgacagtgagcatgatgtccagcggagcctgtattgtgatactgctgtcaacgatgtgctgaacaccagtgtgacctccatgggatctcagatgcctgatcatgatcagaatgaaggatttcattgccgggaagaatgccggattcttggccactctgacaggtgctggatgccccggaaccccatgcccatccgttccaagtcccctgagcatgtgaggaacatcatcgcgctgtctattgaagctactgctgctgatgtcgaggcttatgacgactgcggccccaccaaacggactttcgcaacctttgggaaagatgtcagcgaccacccggctgaggagaggcctaccctgaaaggcaagaggactgtcgatgtgaccatctgcagccccaaggtcaacagcgttatccgggaggcaggcaatggctgtgaggcgattagccctgtcacctcccccctccacctcaagagctctctgcccaccaagccttccgtgtcttacaccattgccctggctcccccagcccgtgatctggagcagtatgtcaacaatgtcaacaatggccctactcgtccctctgaagctgagccccgtggagctgatagcgagaaagtcatgcatgaggtcagccccattctgaaggaaggtcgcaacaaagagtcccctggtgtgaagcgtctgaaggatatcgttctctaaaccagtctccaggaagaagagaaagaaaccacactggctagtgaagaagcaggagcttcttgttttaattgctcaccaatggttggttcttgagtggctatatttcagagcttttcctaaatgtattgtttataggtgattatcattctgtgacagtcccttgtttcaacaggcagcaggggtgttcagttggagcaaattagctttggcttgagttgttcatggggccttgatgttggggaaacagagacaaattcagttgtgaaaagtattatgtattaagtgtttgaatttatatatttttctatgtcaaaattataatataaattaccattgtttgtggaggattacatttaaaaaagcaaaaagtgaaaaaaaaaagctctggacacctttaataagctcgccactgttttttgtagtgtagacaagttaatggtcatttattgtgtactattcattgattcagtgatgtgaaattgagcccccaaaaggttgtttctgaagctcgagtacttcccaatgccgctactttgctgtggacacccctgctttaaaaacccttttgctagctgtgctattgttgtatttgatattgcaaattgctatgtgtgtggtgatggcaaaaggcttttaaaagttggtgttttctttttcttaaaaaaataataaaactacagacaaaaacaaagtgcaaacaactgagacagcaaatgaatgagcaacaccatgcatatagattgagtacttggagaatactcacgttttttaactcatgtagtgattgctcaccactttgcaaagtatttttcctgcctttcagtggtctgcccaggtccatgatagatcattgcagaaagtcatttttggataggctgctatctaatttgcagttgtcagaaatactgtgctgaaagttttatgacatccatcttttaaattttcaggccctgaacaggaaagttgctcctgaagttatgtttccaggcttagaaattccctctctccaatcatctaaaattgaagatgactgaatctattttaagatctaaattagcatctcttcagacacacacttcctgattcagtgtttcccaatcatgattagaattagactgcaaagcacgtcatgggctgggattgagaactccatgttgctctgtatcttaggcttatatacgtagggatagagtaagcagtacaaagtgtatattttggaaaagacaggtaacaggtaacagcatcgctaatccaattactgtgccttctaaacggagacactcagacacttgaactcatctttttatgactaatagttttttgattaaaaatgtgaacaagaaaatactaaaataaaaatcctttcgatttagccaactctttttgctgtaggctaggaatacaccctttttaaattaacacactgtagatcctttttttctgttttaacattcctctaactcccccatttatcttttgtctattaatattcactagccaacatagtatttttgcagcctaagagttcattatttaaaaataaactaaagaaatatgtcacctttgttctgccttggtcttaagagagttgtttctagagaaacaagttttatggttctgttttcatttgtttcattttttgaaattcaggaatacacagagagaaggcctagaggttagagcactagaatgcaaaagaggatttattttcttaagtttaggtagataagtcagctcttttgaatgttttacttatttttgcctgagttcctagctttacgcattactaggaatattttcttttacaggagggagaagggttttgagggagggggtgggtaaggcagtagggatggggttaggtaggggagaacatttctgaaaaagaacttataatgaagctacaaatccatccttatttcttattcagtgctgaatactacctcatgcaaaatattggtgtggctgcaaatttccctctgaagctgacacaattaaggatgaattaccataacatcttcatttttcctcatttcattgcctctcatacagttttctccctctgatttatttcattttggtagtggattttgaattaagtatttatttctctttgcaagtgactatttgattaacacattaaaaattttttaaaaatttcccctttaagttatgatggctgcctatagaatttagactgtttctcaccctgatccatcctgatattatgttattagctacgatttcaaggtcactttgaagtcagacttcacagttttctacaggtgtatttcttgctatgctcagtgggaaccagggagcagaaaagattgtggaaagtgggaacattaattgtcacgtggctgttgagccagagaggccactggctgccatgcctcttaccagccaagttttaaatggttagagtggcattggcattgattttgcttttctcttgggttttcttcatttcttttcataattcatcttcaagctatagatccatccttcttccctatccaaatactttgttctcagtgggcagtcagatttttttggcttccaaacctcactgagcatgttcagagaattcctctcattaaggaaatatttttccccacaattgtctgatgtatgagtcctctcagaagcacaagtgcatactaggaaggctttgtaaactggttttgtaggcaggctgtacctgcaaataggcattctgagcaaggatcctaaatttccctttggctcatgtcccccccgccccaccccaccttctcctttttggcatgtctggtgaaaagctacaaggttcacagggccaaatattctcccttttgttctctaaacatgttgcacacataaactcaagggagtgatttcggttcctaagtcctagggagttctattccatttattctgatgtcccttttaaggaggagttggtgttgaagtgtgacatgctttaatgataactgctttggcaattccccagacaggtatacttcttcatccaaaattgcacctaaggtgttcatttagacaaaattgttcgcttagtgatccactgatctctaatcagaaatatttttaaaaaatacaatttagatctctgaaaattggaaccactcaagagtatcatcttgatagtgttacttcagcatatgactgactgattttatgaagggagtttagctgacttttccctgtagccctatcatattaaaaacaaaaagtggtccacttgaagcagcaaggacaaagggcagtttagggagaggcagggtgaaggggatagctcgattgggcatccagagtggaaaaggattattattgtacataatagcagttctggctggaattccaatccactttctggggatcattttgatgttgaatgttcccccaaagcattctgacaagtttggtccacttggctctttaccccgggtaataagacccttattgactttgaaaaactggcataaatgagcttaagaaatccattgtatacagtcctagtgtttgccttcttggtaaaattacatttaaggatgtcatttcatgagtcaaattgtatctgctgacactgaagtgtattgagatgttgttctttagtttaagtatgtaacaaagtaatattcaaaggggatgtttgggggtggggctgggaccgggtggctttatattgataatgaaatattccagagcaaaacacattgtcctaatgaagttgttgcagctctcttcgttttcttgtgccgctggaattggcttgtgggtcacttgttgtgcaaaagtgaattaatttcaaataggaatcatattgcttttgtgaaacaaagaaaatttaccaccttgtctgatacatagattggaaggcgctcttggtaaagaataacccacaaacacctgatcttgattggaaagcattgtaggtcattagggaaaactgatgatgctgactgttgctccagctgtgttggcaattcaagatgaccttgttactaactgaaagttgctgtcaaccttagcaaacaaaccagctaacaccattacagcactggttaagtagatttttactggcactggctggcgttcagctgaggaaggctaggatacagactttaatgaccaagagccagactagctcgagctagaaatcagcaacaaatacctccttgtgctatttgaatgctaaggtattagttgcaataggcttacgccttcgctcctctagtgaggggaatgagcctgatgacactattactgtttacctgtcaaaccagggtggaaatttagagggatgcaagtacagtatgtctcattaagcagtctctgttgctgattatatgaagataaaattgttgtatatgctgatctgtatgttatgtacattttcacagtgattgaatcattgtaaaaagaaaaaagacaaaaaagaatcaccactgtctattttatgaagatgataaagcagctttattaaattattacagttatgtttcaaatggtgttatctgccacattgtttccttttatctggtggttctctgtttccccctttaaatgtgttttctctgcttcaaaaatttaatgcattttagtattaaaggctattatggaaaaag

SEQ ID NO: 172080 - DNA, 9756 bp, Homo sapiens
  Payload ID: 13806
  Gene Symbol: PCDH19
  Gene Name: protocadherin 19
  Uniprot ID: Q8TAB3
  ENST ID: ENST00000373034
  CDS Start-End: 1677-5123
agtagtttgcggcatccggaggagcagcagcagcagtagcggcggcggctggcgcagcgcggagacggacgagcgggcacagacggcagcacagctcccgtgcaccatgcctggcttgcccgggaggcactggcacccgcgtccctagcccggcgctggcccttggcgcgttgcgctccgcagcattccggctgagcgatttcatccgaaatcctaaacctcctaccccaaacccattgcctcctgcttgctcatactccacactcacactccccacaccacacactcactcttcctctctctctcacacattcacacacagcccgagacagacagagaaagcgagacagacctcccgagtgcgcgagcgcccgggaggaagggagcccaacgcagcgcggccagcgcctctccgggaagatgaaatcaagacgctcctgcaagtaaacttcggcggcgacaaaatcgtcgactgtggcagctgctgaggcggaccccagcgacgtgcaactgagctaggagggcttcctcccgcggcggcggcggcggcggcggcggcggcggaccttggagcgacaccccagcccaaacggagagaagagaagcacccggtacccacggcggcggccccgcctctcctggccggtactgttgttgcctccccttccctcttccccattccccgccacccccggccattagaaagaccggggctttgattttcttggacaaattgccatctccccgtttccacaaacttgacgtggagggtcggactgcgttgttaactttgatttcctagacgaaaacgcccgcagaccctcaactgctctgtggggggaactccgctcccacctcggatcctggacagacgcgcccccaagcccttcgaagccagccttagcgcgagggagcgcgctcaagctctggcagcctctctcccctcccccttcctctgctggccccgggaccgccatccgactcaaccctataaccgggtgcccgcggcgcttgccagtaactgactcccgtctgcgacaccccctttctcccgaacaggcctcgaagaggccagtgtggcccccccagaccccggagggcgcattccaagcgggtactctctccgcagtgaactgggagcgctggggggaggtctttgcgcatgccaggtgcacagacagcgagttcgccagcctcagtgccggtgcaccgcggcgggccgggcagtgcctgaaaggctgcgcctcctccgccctctttaccttcgcctcaagtactgtccggactcagcggtgcgtcctccaggccgcgcagacgccgcccgacccgcagccctgggcggctgccgacagtcgcgcccggctaactttgaaggggtaaaactgagtagccgggctggagggagggggctcggggccgcgcggcgctcccttggcccctcggagcccccggggcccccgcgagcccccgccgcgtccgccgcaacctcagcattggagccgccgcgggtgtcccccgcgcgccgccgggccgccctgggcgggacttctcccgcggcctccggggccacggggcgcgcgcaacaggcggcccgagccggcgggaagctggagcgccgacggcgtcggtctcggaggggtgtggagaggcgaggccaggcagagccccgtgcagccatggagtcgctcctgctgccggtgctgctgctgctggccatactgtggacgcaggctgccgccctcattaatctcaagtactcggtagaagaggagcagcgcgccgggacggtgattgccaacgtggccaaagacgcgcgagaggcgggcttcgcgctggacccccggcaggcttcagcctttcgcgtggtgtccaactcggctccacacctagtggacatcaatcccagctctggcctgctggtcaccaagcagaagattgaccgtgatctgctgtgccgccagagccccaagtgcatcatctcgctcgaggtcatgtccagctcaatggaaatctgcgtgataaaggtggagatcaaggacctgaacgacaatgcgcccagtttcccggcagcacagatcgagctggagatctcggaggcagccagccctggcacgcgcatcccgctggacagcgcttacgatccagactcaggaagctttggcgtgcagacttacgagctcacgcccaacgagctgttcggcctggagatcaagacgcgcggcgacggctcccgctttgccgaactcgtggtggaaaagagcctggaccgcgagacgcagtcgcactacagcttccgaatcactgcgctagacggtggcgacccgccgcgcctgggcaccgttggccttagtatcaaggtgaccgactccaatgacaacaacccggtgtttagcgagtccacctacgcggtgagcgtgccagaaaactcgcctcccaacacacccgtcatccgcctcaacgccagcgatccagacgagggcaccaacggccaggtggtctactccttctatggctacgtcaacgaccgcacgcgcgagctctttcagatcgacccgcacagtggcctggtcactgtcactggcgctttagactacgaagaggggcacgtgtacgaactggacgtgcaggctaaggacttggggcccaattccatcccggcacactgcaaggtcaccgtcagcgtgctggacaccaatgacaatccgccggtcatcaacctgctgtcagtcaacagtgagcttgtggaggtcagcgagagcgcccccccgggctacgtgatcgccttggtgcgggtgtctgatcgcgactcaggcctcaatggacgtgtgcagtgccgtttgctgggcaatgtgccctttcgactgcaggaatatgagagcttctccactattctggtggacggacggctggaccgcgagcagcacgaccaatacaacctcacaattcaggcacgcgacggcggcgtgcccatgctgcagagtgccaagtcctttaccgtgctcatcactgacgaaaatgacaaccacccgcacttttccaagccctactaccaggtcattgtgcaggagaacaacacgcctggcgcctatctgctctctgtgtctgctcgcgaccccgacctgggtctcaacggcagtgtctcctaccagatcgtgccgtcgcaggtgcgggacatgcctgtcttcacctatgtctccatcaatcccaactcaggcgacatctacgcgctgcgatcctttaaccacgagcagaccaaggcgttcgaattcaaggtgctggccaaggacggcggccttccctcactgcaaagcaacgctacggtgcgggtcatcatcctcgacgtcaacgacaacaccccggtcatcacagccccacctctgattaacggcactgccgaggtctacataccccgcaactctggcataggctacctggtgactgttgtcaaggcagaagactacgatgagggcgaaaatggccgagtcacctacgacatgaccgagggcgaccgcggcttctttgaaatagaccaggtcaatggcgaagtcagaaccacccgcaccttcggggagagctccaagtcctcctatgagcttatcgtggtggctcacgaccacggcaagacatctctctctgcctctgctctcgtcctaatctacttgtcccctgctctcgatgcccaagagtcaatgggctctgtgaacttgtccttgattttcattattgccctgggctccattgcgggcatcctctttgtaactatgatcttcgtggcaatcaagtgcaagcgagacaacaaagagatccggacctacaactgcagtaattgtttaaccatcacttgtctcctcggctgttttataaaaggacaaaacagcaagtgtctgcattgcatctcggtttctcccattagcgaggagcaagacaaaaagacagaggagaaagtgagcctaaggggaaagagaattgctgagtactcctatgggcatcaaaagaaatcaagcaagaagaaaaaaatcagtaagaatgacatccgcctggtaccccgggatgtggaggagacagacaagatgaacgttgtcagttgctcttccctgacctcctccctcaactattttgactaccaccagcagacgctgcccctgggctgccgccgctctgagagcactttcctgaatgtggagaaccagaatacccgcaacaccagtgctaaccacatctaccatcactctttcaacagccaggggccccagcagcctgacctgattatcaacggtgtgcctctgcctgagactgaaaactattcttttgactccaactacgtgaatagccgagcccatttaatcaagagcagctccaccttcaaggacttagagggcaacagcctgaaggatagtggacatgaggagagtgaccaaactgacagtgagcatgatgtccagcggagcctgtattgtgatactgctgtcaacgatgtgctgaacaccagtgtgacctccatgggatctcagatgcctgatcatgatcagaatgaaggatttcattgccgggaagaatgccggattcttggccactctgacaggtgctggatgccccggaaccccatgcccatccgttccaagtcccctgagcatgtgaggaacatcatcgcgctgtctattgaagctactgctgctgatgtcgaggcttatgacgactgcggccccaccaaacggactttcgcaacctttgggaaagatgtcagcgaccacccggctgaggagaggcctaccctgaaaggcaagaggactgtcgatgtgaccatctgcagccccaaggtcaacagcgttatccgggaggcaggcaatggctgtgaggcgattagccctgtcacctcccccctccacctcaagagctctctgcccaccaagccttccgtgtcttacaccattgccctggctcccccagcccgtgatctggagcagtatgtcaacaatgtcaacaatggccctactcgtccctctgaagctgagccccgtggagctgatagcgagaaagtcatgcatgaggtcagccccattctgaaggaaggtcgcaacaaagagtcccctggtgtgaagcgtctgaaggatatcgttctctaaaccagtctccaggaagaagagaaagaaaccacactggctagtgaagaagcaggagcttcttgttttaattgctcaccaatggttggttcttgagtggctatatttcagagcttttcctaaatgtattgtttataggtgattatcattctgtgacagtcccttgtttcaacaggcagcaggggtgttcagttggagcaaattagctttggcttgagttgttcatggggccttgatgttggggaaacagagacaaattcagttgtgaaaagtattatgtattaagtgtttgaatttatatatttttctatgtcaaaattataatataaattaccattgtttgtggaggattacatttaaaaaagcaaaaagtgaaaaaaaaaagctctggacacctttaataagctcgccactgttttttgtagtgtagacaagttaatggtcatttattgtgtactattcattgattcagtgatgtgaaattgagcccccaaaaggttgtttctgaagctcgagtacttcccaatgccgctactttgctgtggacacccctgctttaaaaacccttttgctagctgtgctattgttgtatttgatattgcaaattgctatgtgtgtggtgatggcaaaaggcttttaaaagttggtgttttctttttcttaaaaaaataataaaactacagacaaaaacaaagtgcaaacaactgagacagcaaatgaatgagcaacaccatgcatatagattgagtacttggagaatactcacgttttttaactcatgtagtgattgctcaccactttgcaaagtatttttcctgcctttcagtggtctgcccaggtccatgatagatcattgcagaaagtcatttttggataggctgctatctaatttgcagttgtcagaaatactgtgctgaaagttttatgacatccatcttttaaattttcaggccctgaacaggaaagttgctcctgaagttatgtttccaggcttagaaattccctctctccaatcatctaaaattgaagatgactgaatctattttaagatctaaattagcatctcttcagacacacacttcctgattcagtgtttcccaatcatgattagaattagactgcaaagcacgtcatgggctgggattgagaactccatgttgctctgtatcttaggcttatatacgtagggatagagtaagcagtacaaagtgtatattttggaaaagacaggtaacaggtaacagcatcgctaatccaattactgtgccttctaaacggagacactcagacacttgaactcatctttttatgactaatagttttttgattaaaaatgtgaacaagaaaatactaaaataaaaatcctttcgatttagccaactctttttgctgtaggctaggaatacaccctttttaaattaacacactgtagatcctttttttctgttttaacattcctctaactcccccatttatcttttgtctattaatattcactagccaacatagtatttttgcagcctaagagttcattatttaaaaataaactaaagaaatatgtcacctttgttctgccttggtcttaagagagttgtttctagagaaacaagttttatggttctgttttcatttgtttcattttttgaaattcaggaatacacagagagaaggcctagaggttagagcactagaatgcaaaagaggatttattttcttaagtttaggtagataagtcagctcttttgaatgttttacttatttttgcctgagttcctagctttacgcattactaggaatattttcttttacaggagggagaagggttttgagggagggggtgggtaaggcagtagggatggggttaggtaggggagaacatttctgaaaaagaacttataatgaagctacaaatccatccttatttcttattcagtgctgaatactacctcatgcaaaatattggtgtggctgcaaatttccctctgaagctgacacaattaaggatgaattaccataacatcttcatttttcctcatttcattgcctctcatacagttttctccctctgatttatttcattttggtagtggattttgaattaagtatttatttctctttgcaagtgactatttgattaacacattaaaaattttttaaaaatttcccctttaagttatgatggctgcctatagaatttagactgtttctcaccctgatccatcctgatattatgttattagctacgatttcaaggtcactttgaagtcagacttcacagttttctacaggtgtatttcttgctatgctcagtgggaaccagggagcagaaaagattgtggaaagtgggaacattaattgtcacgtggctgttgagccagagaggccactggctgccatgcctcttaccagccaagttttaaatggttagagtggcattggcattgattttgcttttctcttgggttttcttcatttcttttcataattcatcttcaagctatagatccatccttcttccctatccaaatactttgttctcagtgggcagtcagatttttttggcttccaaacctcactgagcatgttcagagaattcctctcattaaggaaatatttttccccacaattgtctgatgtatgagtcctctcagaagcacaagtgcatactaggaaggctttgtaaactggttttgtaggcaggctgtacctgcaaataggcattctgagcaaggatcctaaatttccctttggctcatgtcccccccgccccaccccaccttctcctttttggcatgtctggtgaaaagctacaaggttcacagggccaaatattctcccttttgttctctaaacatgttgcacacataaactcaagggagtgatttcggttcctaagtcctagggagttctattccatttattctgatgtcccttttaaggaggagttggtgttgaagtgtgacatgctttaatgataactgctttggcaattccccagacaggtatacttcttcatccaaaattgcacctaaggtgttcatttagacaaaattgttcgcttagtgatccactgatctctaatcagaaatatttttaaaaaatacaatttagatctctgaaaattggaaccactcaagagtatcatcttgatagtgttacttcagcatatgactgactgattttatgaagggagtttagctgacttttccctgtagccctatcatattaaaaacaaaaagtggtccacttgaagcagcaaggacaaagggcagtttagggagaggcagggtgaaggggatagctcgattgggcatccagagtggaaaaggattattattgtacataatagcagttctggctggaattccaatccactttctggggatcattttgatgttgaatgttcccccaaagcattctgacaagtttggtccacttggctctttaccccgggtaataagacccttattgactttgaaaaactggcataaatgagcttaagaaatccattgtatacagtcctagtgtttgccttcttggtaaaattacatttaaggatgtcatttcatgagtcaaattgtatctgctgacactgaagtgtattgagatgttgttctttagtttaagtatgtaacaaagtaatattcaaaggggatgtttgggggtggggctgggaccgggtggctttatattgataatgaaatattccagagcaaaacacattgtcctaatgaagttgttgcagctctcttcgttttcttgtgccgctggaattggcttgtgggtcacttgttgtgcaaaagtgaattaatttcaaataggaatcatattgcttttgtgaaacaaagaaaatttaccaccttgtctgatacatagattggaaggcgctcttggtaaagaataacccacaaacacctgatcttgattggaaagcattgtaggtcattagggaaaactgatgatgctgactgttgctccagctgtgttggcaattcaagatgaccttgttactaactgaaagttgctgtcaaccttagcaaacaaaccagctaacaccattacagcactggttaagtagatttttactggcactggctggcgttcagctgaggaaggctaggatacagactttaatgaccaagagccagactagctcgagctagaaatcagcaacaaatacctccttgtgctatttgaatgctaaggtattagttgcaataggcttacgccttcgctcctctagtgaggggaatgagcctgatgacactattactgtttacctgtcaaaccagggtggaaatttagagggatgcaagtacagtatgtctcattaagcagtctctgttgctgattatatgaagataaaattgttgtatatgctgatctgtatgttatgtacattttcacagtgattgaatcattgtaaaaagaaaaaagacaaaaaagaatcaccactgtctattttatgaagatgataaagcagctttattaaattattacagttatgtttcaaatggtgttatctgccacattgtttccttttatctggtggttctctgtttccccctttaaatgtgttttctctgcttcaaaaatttaatgcattttagtattaaaggctattatggaaaaagta

SEQ ID NO: 172081 - DNA, 7936 bp, Homo sapiens
  Payload ID: 13806
  Gene Symbol: PCDH19
  Gene Name: protocadherin 19
  Uniprot ID: Q8TAB3
  ENST ID: ENST00000420881
  CDS Start-End: 1-3303
atggagtcgctcctgctgccggtgctgctgctgctggccatactgtggacgcaggctgccgccctcattaatctcaagtactcggtagaagaggagcagcgcgccgggacggtgattgccaacgtggccaaagacgcgcgagaggcgggcttcgcgctggacccccggcaggcttcagcctttcgcgtggtgtccaactcggctccacacctagtggacatcaatcccagctctggcctgctggtcaccaagcagaagattgaccgtgatctgctgtgccgccagagccccaagtgcatcatctcgctcgaggtcatgtccagctcaatggaaatctgcgtgataaaggtggagatcaaggacctgaacgacaatgcgcccagtttcccggcagcacagatcgagctggagatctcggaggcagccagccctggcacgcgcatcccgctggacagcgcttacgatccagactcaggaagctttggcgtgcagacttacgagctcacgcccaacgagctgttcggcctggagatcaagacgcgcggcgacggctcccgctttgccgaactcgtggtggaaaagagcctggaccgcgagacgcagtcgcactacagcttccgaatcactgcgctagacggtggcgacccgccgcgcctgggcaccgttggccttagtatcaaggtgaccgactccaatgacaacaacccggtgtttagcgagtccacctacgcggtgagcgtgccagaaaactcgcctcccaacacacccgtcatccgcctcaacgccagcgatccagacgagggcaccaacggccaggtggtctactccttctatggctacgtcaacgaccgcacgcgcgagctctttcagatcgacccgcacagtggcctggtcactgtcactggcgctttagactacgaagaggggcacgtgtacgaactggacgtgcaggctaaggacttggggcccaattccatcccggcacactgcaaggtcaccgtcagcgtgctggacaccaatgacaatccgccggtcatcaacctgctgtcagtcaacagtgagcttgtggaggtcagcgagagcgcccccccgggctacgtgatcgccttggtgcgggtgtctgatcgcgactcaggcctcaatggacgtgtgcagtgccgtttgctgggcaatgtgccctttcgactgcaggaatatgagagcttctccactattctggtggacggacggctggaccgcgagcagcacgaccaatacaacctcacaattcaggcacgcgacggcggcgtgcccatgctgcagagtgccaagtcctttaccgtgctcatcactgacgaaaatgacaaccacccgcacttttccaagccctactaccaggtcattgtgcaggagaacaacacgcctggcgcctatctgctctctgtgtctgctcgcgaccccgacctgggtctcaacggcagtgtctcctaccagatcgtgccgtcgcaggtgcgggacatgcctgtcttcacctatgtctccatcaatcccaactcaggcgacatctacgcgctgcgatcctttaaccacgagcagaccaaggcgttcgaattcaaggtgctggccaaggacggcggccttccctcactgcaaagcaacgctacggtgcgggtcatcatcctcgacgtcaacgacaacaccccggtcatcacagccccacctctgattaacggcactgccgaggtctacataccccgcaactctggcataggctacctggtgactgttgtcaaggcagaagactacgatgagggcgaaaatggccgagtcacctacgacatgaccgagggcgaccgcggcttctttgaaatagaccaggtcaatggcgaagtcagaaccacccgcaccttcggggagagctccaagtcctcctatgagcttatcgtggtggctcacgaccacggcaagacatctctctctgcctctgctctcgtcctaatctacttgtcccctgctctcgatgcccaagagtcaatgggctctgtgaacttgtccttgattttcattattgccctgggctccattgcgggcatcctctttgtaactatgatcttcgtggcaatcaagtgcaagcgagacaacaaagagatccggacctacaactgcagaattgctgagtactcctatgggcatcaaaagaaatcaagcaagaagaaaaaaatcagtaagaatgacatccgcctggtaccccgggatgtggaggagacagacaagatgaacgttgtcagttgctcttccctgacctcctccctcaactattttgactaccaccagcagacgctgcccctgggctgccgccgctctgagagcactttcctgaatgtggagaaccagaatacccgcaacaccagtgctaaccacatctaccatcactctttcaacagccaggggccccagcagcctgacctgattatcaacggtgtgcctctgcctgagactgaaaactattcttttgactccaactacgtgaatagccgagcccatttaatcaagagctccaccttcaaggacttagagggcaacagcctgaaggatagtggacatgaggagagtgaccaaactgacagtgagcatgatgtccagcggagcctgtattgtgatactgctgtcaacgatgtgctgaacaccagtgtgacctccatgggatctcagatgcctgatcatgatcagaatgaaggatttcattgccgggaagaatgccggattcttggccactctgacaggtgctggatgccccggaaccccatgcccatccgttccaagtcccctgagcatgtgaggaacatcatcgcgctgtctattgaagctactgctgctgatgtcgaggcttatgacgactgcggccccaccaaacggactttcgcaacctttgggaaagatgtcagcgaccacccggctgaggagaggcctaccctgaaaggcaagaggactgtcgatgtgaccatctgcagccccaaggtcaacagcgttatccgggaggcaggcaatggctgtgaggcgattagccctgtcacctcccccctccacctcaagagctctctgcccaccaagccttccgtgtcttacaccattgccctggctcccccagcccgtgatctggagcagtatgtcaacaatgtcaacaatggccctactcgtccctctgaagctgagccccgtggagctgatagcgagaaagtcatgcatgaggtcagccccattctgaaggaaggtcgcaacaaagagtcccctggtgtgaagcgtctgaaggatatcgttctctaaaccagtctccaggaagaagagaaagaaaccacactggctagtgaagaagcaggagcttcttgttttaattgctcaccaatggttggttcttgagtggctatatttcagagcttttcctaaatgtattgtttataggtgattatcattctgtgacagtcccttgtttcaacaggcagcaggggtgttcagttggagcaaattagctttggcttgagttgttcatggggccttgatgttggggaaacagagacaaattcagttgtgaaaagtattatgtattaagtgtttgaatttatatatttttctatgtcaaaattataatataaattaccattgtttgtggaggattacatttaaaaaagcaaaaagtgaaaaaaaaaagctctggacacctttaataagctcgccactgttttttgtagtgtagacaagttaatggtcatttattgtgtactattcattgattcagtgatgtgaaattgagcccccaaaaggttgtttctgaagctcgagtacttcccaatgccgctactttgctgtggacacccctgctttaaaaacccttttgctagctgtgctattgttgtatttgatattgcaaattgctatgtgtgtggtgatggcaaaaggcttttaaaagttggtgttttctttttcttaaaaaaataataaaactacagacaaaaacaaagtgcaaacaactgagacagcaaatgaatgagcaacaccatgcatatagattgagtacttggagaatactcacgttttttaactcatgtagtgattgctcaccactttgcaaagtatttttcctgcctttcagtggtctgcccaggtccatgatagatcattgcagaaagtcatttttggataggctgctatctaatttgcagttgtcagaaatactgtgctgaaagttttatgacatccatcttttaaattttcaggccctgaacaggaaagttgctcctgaagttatgtttccaggcttagaaattccctctctccaatcatctaaaattgaagatgactgaatctattttaagatctaaattagcatctcttcagacacacacttcctgattcagtgtttcccaatcatgattagaattagactgcaaagcacgtcatgggctgggattgagaactccatgttgctctgtatcttaggcttatatacgtagggatagagtaagcagtacaaagtgtatattttggaaaagacaggtaacaggtaacagcatcgctaatccaattactgtgccttctaaacggagacactcagacacttgaactcatctttttatgactaatagttttttgattaaaaatgtgaacaagaaaatactaaaataaaaatcctttcgatttagccaactctttttgctgtaggctaggaatacaccctttttaaattaacacactgtagatcctttttttctgttttaacattcctctaactcccccatttatcttttgtctattaatattcactagccaacatagtatttttgcagcctaagagttcattatttaaaaataaactaaagaaatatgtcacctttgttctgccttggtcttaagagagttgtttctagagaaacaagttttatggttctgttttcatttgtttcattttttgaaattcaggaatacacagagagaaggcctagaggttagagcactagaatgcaaaagaggatttattttcttaagtttaggtagataagtcagctcttttgaatgttttacttatttttgcctgagttcctagctttacgcattactaggaatattttcttttacaggagggagaagggttttgagggagggggtgggtaaggcagtagggatggggttaggtaggggagaacatttctgaaaaagaacttataatgaagctacaaatccatccttatttcttattcagtgctgaatactacctcatgcaaaatattggtgtggctgcaaatttccctctgaagctgacacaattaaggatgaattaccataacatcttcatttttcctcatttcattgcctctcatacagttttctccctctgatttatttcattttggtagtggattttgaattaagtatttatttctctttgcaagtgactatttgattaacacattaaaaattttttaaaaatttcccctttaagttatgatggctgcctatagaatttagactgtttctcaccctgatccatcctgatattatgttattagctacgatttcaaggtcactttgaagtcagacttcacagttttctacaggtgtatttcttgctatgctcagtgggaaccagggagcagaaaagattgtggaaagtgggaacattaattgtcacgtggctgttgagccagagaggccactggctgccatgcctcttaccagccaagttttaaatggttagagtggcattggcattgattttgcttttctcttgggttttcttcatttcttttcataattcatcttcaagctatagatccatccttcttccctatccaaatactttgttctcagtgggcagtcagatttttttggcttccaaacctcactgagcatgttcagagaattcctctcattaaggaaatatttttccccacaattgtctgatgtatgagtcctctcagaagcacaagtgcatactaggaaggctttgtaaactggttttgtaggcaggctgtacctgcaaataggcattctgagcaaggatcctaaatttccctttggctcatgtcccccccgccccaccccaccttctcctttttggcatgtctggtgaaaagctacaaggttcacagggccaaatattctcccttttgttctctaaacatgttgcacacataaactcaagggagtgatttcggttcctaagtcctagggagttctattccatttattctgatgtcccttttaaggaggagttggtgttgaagtgtgacatgctttaatgataactgctttggcaattccccagacaggtatacttcttcatccaaaattgcacctaaggtgttcatttagacaaaattgttcgcttagtgatccactgatctctaatcagaaatatttttaaaaaatacaatttagatctctgaaaattggaaccactcaagagtatcatcttgatagtgttacttcagcatatgactgactgattttatgaagggagtttagctgacttttccctgtagccctatcatattaaaaacaaaaagtggtccacttgaagcagcaaggacaaagggcagtttagggagaggcagggtgaaggggatagctcgattgggcatccagagtggaaaaggattattattgtacataatagcagttctggctggaattccaatccactttctggggatcattttgatgttgaatgttcccccaaagcattctgacaagtttggtccacttggctctttaccccgggtaataagacccttattgactttgaaaaactggcataaatgagcttaagaaatccattgtatacagtcctagtgtttgccttcttggtaaaattacatttaaggatgtcatttcatgagtcaaattgtatctgctgacactgaagtgtattgagatgttgttctttagtttaagtatgtaacaaagtaatattcaaaggggatgtttgggggtggggctgggaccgggtggctttatattgataatgaaatattccagagcaaaacacattgtcctaatgaagttgttgcagctctcttcgttttcttgtgccgctggaattggcttgtgggtcacttgttgtgcaaaagtgaattaatttcaaataggaatcatattgcttttgtgaaacaaagaaaatttaccaccttgtctgatacatagattggaaggcgctcttggtaaagaataacccacaaacacctgatcttgattggaaagcattgtaggtcattagggaaaactgatgatgctgactgttgctccagctgtgttggcaattcaagatgaccttgttactaactgaaagttgctgtcaaccttagcaaacaaaccagctaacaccattacagcactggttaagtagatttttactggcactggctggcgttcagctgaggaaggctaggatacagactttaatgaccaagagccagactagctcgagctagaaatcagcaacaaatacctccttgtgctatttgaatgctaaggtattagttgcaataggcttacgccttcgctcctctagtgaggggaatgagcctgatgacactattactgtttacctgtcaaaccagggtggaaatttagagggatgcaagtacagtatgtctcattaagcagtctctgttgctgattatatgaagataaaattgttgtatatgctgatctgtatgttatgtacattttcacagtgattgaatcattgtaaaaagaaaaaagacaaaaaagaatcaccactgtctattttatgaagatgataaagcagctttattaaattattacagttatgtttcaaatggtgttatctgccacattgtttccttttatctggtggttctctgtttccccctttaaatgtgttttctctgcttcaaaaatttaatgcattttagtattaaaggctattatggaaaaagta

SEQ ID NO: 172082 - DNA, 329 bp, Homo sapiens
  Payload ID: 13806
  Gene Symbol: PCDH19
  Gene Name: protocadherin 19
  ENST ID: ENST00000464981
  CDS Start-End: 1-24
cgtctgaaggatatcgttctctaaaccagtctccaggaagaagagaaagaaaccacactggctagtgaagaagcaggagcttcttgttttaattgctcaccaatgtgattgaatcattgtaaaaagaaaaaagacaaaaaagaatcaccactgtctattttatgaagatgataaagcagctttattaaattattacagttatgtttcaaatggtgttatctgccacattgtttccttttatctggtggttctctgtttccccctttaaatgtgttttctctgcttcaaaaatttaatgcattttagtattaaaggctattatggaaaaa

SEQ ID NO: 172083 - DNA, 4778 bp, Homo sapiens
  Payload ID: 13807
  Gene Symbol: PCDH20
  Gene Name: protocadherin 20
  Uniprot ID: Q8N6Y1
  ENST ID: ENST00000409204
  CDS Start-End: 365-3220
tttattttaattctccctctcttgctagcaacctgtggacttggcatctgactggtgcggcaaggaaggaggctggtaggtaagcgctactgtgcccaaccccgagctgcctcttcgcagtcttcaggagcaagtcccccattccagctcctctggcagagtatggagttacctgcgtccggggcaggaaaccatgaatgtgcccttctgccctcttgcctttctgccactctttgagttcccgtccttaattgaagagccagtgactattggctgaagttcccccagcgatttgcatgaaccgagagggagtgtcttctgccgccctcccttcaagagcgctctgactgcagcctcccagggaatgcgcggccgagggaatgcgcgcagctcacaggccctgggagtgagctggtgcccggcgacctggcacccgcgcctggatatggggcgtctacatcgtcccaggagcagcaccagctacaggaacctgccgcatctgtttctgtttttcctcttcgtgggacccttcagctgcctcgggagttacagccgggccaccgagcttctgtacagcctaaacgagggactacccgcgggggtgctcatcggcagcctggccgaggacctgcggctgctgcccaggtctgcagggaggccggacccgcagtcgcagctgccagagcgcaccggtgctgagtggaacccccctctctccttcagcctggcctcccggggactgagtggccagtacgtgaccctagacaaccgctctggggagctgcacacttcagctcaggagatcgacagggaggccctgtgtgttgaagggggtggagggactgcgtggagcggcagcgtttccatctcctcctctccttctgactcttgtcttttgctgctggatgtgcttgtcctgcctcaggaatacttcaggtttgtgaaggtgaagatcgccatcagagacatcaatgacaacgccccgcagttccctgtttcccagatctcggtgtgggtcccggaaaatgcacctgtaaacacccgactggccatagagcatcctgctgtggacccagatgtaggcattaatggggtacagacctatcgcttactggactaccatggtatgttcaccctggacgtggaggagaatgagaatggggagcgcaccccctacctaattgtcatgggtgctttggacagggaaacccaggaccagtatgtgagcatcatcatagctgaggatggtgggtctccaccacttttgggcagtgccactctcaccattggcatcagtgacattaatgacaattgccctctcttcacagactcacaaatcaatgtcactgtgtatgggaatgctacagtgggcaccccaattgcagctgtccaggctgtggataaagacttggggaccaatgctcaaattacttattcttacagtcagaaagttccacaagcatctaaggatttatttcacctggatgaaaacactggagtcattaaacttttcagtaagattggaggaagtgttctggagtcccacaagctcaccatccttgctaatggaccaggctgcatccctgctgtaatcactgctcttgtgtccattattaaagttattttcagaccccctgaaattgtccctcgttacatagcaaacgagatagatggtgtggtttatctgaaagaactggaacccgttaacactcccattgcgtttttcaccataagagatccagaaggtaaatacaaggttaactgctacctggatggtgaagggccgtttaggttatcaccttacaaaccatacaataatgaatatttactagagaccacaaaacctatggactatgagctacagcagttctatgaagtagctgtggtggcttggaactctgagggatttcatgtcaaaagggtcattaaagtgcaacttttagatgacaatgataatgctccaattttccttcaacccttaatagaactaaccatcgaagagaacaactcacccaatgcctttttgactaagctgtatgctacagatgccgacagcgaggagagaggccaagtttcatattttctgggacctgatgctccatcatatttttccttagacagtgtcacaggaattctgacagtttctactcagctggaccgagaagagaaagaaaagtacagatacactgtcagagctgttgactgtgggaagccacccagagaatcagtagccactgtggccctcacagtgttggataaaaatgacaacagtcctcggtttatcaacaaggacttcagcttttttgtgcctgaaaactttccaggctatggtgagattggagtaattagtgtaacagatgctgacgctggacgaaatggatgggtcgccctctctgtggtgaaccagagtgatatttttgtcatagatacaggaaagggtatgctgagggctaaagtctctttggacagagagcagcaaagctcctatactttgtgggttgaagctgttgatgggggtgagcctgccctctcctctacagcaaaaatcacaattctccttctagatatcaatgacaaccctcctcttgttttgtttcctcagtctaatatgtcttatctgttagtactgccttctactctgccaggctccccggttacagaagtctatgctgtcgacaaagacacaggcatgaatgctgtcatagcttacagcatcatagggagaagaggtcctaggcctgagtccttcaggattgaccctaaaactggcaacattactttggaagaggcattgctgcagacagattatgggctccatcgcttactggtgaaagtgagtgatcatggttatcccgagcctctccactccacagtcatggtgaacctatttgtcaatgacactgtcagtaatgagagttacattgagagtcttttaagaaaagaaccagagattaatatagaggagaaagaaccacaaatctcaatagaaccgactcataggaaggtagaatctgtgtcttgtatgcccaccttagtagctctgtctgtaataagcttgggttccatcacactggtcacagggatgggcatatacatctgtttaaggaaaggggaaaagcatcccagggaagatgaaaatttggaagtacagattccactgaaaggaaaaattgacttgcatatgcgagagagaaagccaatggatatttctaatatttgatatttcatggtggaataacacagagaaatgttttaactgactttggatcttcatcacctaaaaaagagtgtgttgatggcagttccaatgaaggacaactaatttataacttgttctatattgtaaatagctgtttacaggtttttaaatttaaattcagaggttataaaatgtgtacagcatttttaagtgaaaattagtactaacagctataggacttgtatttaaaaaaaaaaaaaaagcttggacatggtttgcagctttcatacaccaagcagatgattgataaaacctgggagtaaggtaagaaaaatggaacaaatttttatctaaaaattcctgtcaccacaagagggcatcagctgctcctttgcaggaaactggggtattgtacttggcagttgtacatgaaattaatgaaagagtatattttaaatatattgtttttaacattaaacaaatatgaaattaaagtaaattaaatttcaccctatttaaacatatgataaaaaaagaaatgcacttgtaaacagaatgtttattacctcataagtgcatatatagtgtgaaagagaaggcattaaaaagaagtgcaattcctttttagcaaggataaaatcattgccttgtgttacagattcagcctgctgaagagtattccactttctgtgtactcgaattgctttctgtttgctttaccactgcacttgttattattacaagggaaatagatttatacatacatatatatattcttcattacaggaaatgtaactagatattgtgcccaagaaaaacagccagaagcaaagaaatgcttcaatctttagttgcttcataggcattcatgacattttagtgctttcacaacttgttggtcgtactttatacttgggttatatattagacttttataggcttgaaatcatccatcacataagaaaatagaaatcatattaaaagtgaattcttctagaggcttgtgtacactactggttgttttagttgggccttttatatgaaagttatactgtacttatctttttgttgttgtttaggtttgttgactaccatttctggcttcctttctttggttttggattaaatccaacagtttatttgtaagccctgcagcagatttctttgataatttagcttttactgaatctcttgcaatgaagaaagctatttcatcagtgatttatcactttcaattcattgtgtgagctggaaatattattttatatgagagctatagcaaaataatctgtataaacaaggaatgtgttagcttaaactggatcattttactttttggcatcatgcatctgtactgtaccaaaagtgtttatatgtctgcaaattaaaggtatatattttcataatttctttctcacttttagcattttatatttgaacatgggcttgttatttcactgaagtgcctgtcatttgtttgtttttagggttaaatgtgggtaacctgtagtattctgctatactaaagtttatattaaatgaattcattactcaattaaacattgggtaaattattaaa

SEQ ID NO: 172084 - DNA, 6403 bp, Homo sapiens
  Payload ID: 13808
  Gene Symbol: PCDH7
  Gene Name: protocadherin 7
  Uniprot ID: O60245
  ENST ID: ENST00000361762
  CDS Start-End: 1009-4218
gaatgcaggtgagaaaaggcacggactctgcggctgcgaacccaaacttgggcaccgcacggtgcgcactgctcagccttcgcccccgtgggcgaaaggctgctgcggtttcaggcggctgcttcgtgactaatgaccttgcgcagagttgttaagaaaaaagagaaacccgcgctctccggggtgagaagggactgactctgggcgtctctgaagatggctcgggcttctctttggcgcgccggggggaccctgacactgaccgctctgtgacgcgagtagtctcccctgcaccgtgcccgaagcgacgtgccgggggatttttcattctcgatctgttgactggctcccccgctgcatgagcagagtcggagttgagactggcttgttgctggccccagcgcctggtgcaggaagcgactcacgtttgtctgggtggccggagccggagcagagcctgggtttggagtgagtgcctggaacgtgaattggactcaactcgagtagcagcaaagaccagcgggctggcaggcgggggaggctgcaggctcattccccacctcttcccagccccactgcccgtctgccggagcggttctggccccttccgacagagcggggactagagccggggattctccgcccgctgaggggatgactctgggttgggggagcgccgaacccgcggcgcgcagtgtcccgtgaactgtgagtactgcgactgaacggcggcaggcgagcgggcgattagcacccattgcatgaattatgaaacaataactttcggaagaagcaggaggaaaaaaagaagcatctatcgctgccctcccacccccattcccggccaactctccacgccgcttttgccccctccctcccctccctctcgctccttcctttccgggagaggggagaggactcgggggagggcaggcggccggccccggaggaggggggcgccgagggggctgtggttagaaggagcagtagcagcagcagcaggagaagatgctgaggatgcggaccgcgggatgggcgcgcggctggtgcttgggctgctgcctcctcctgccgctctcgctcagcctggcggccgccaagcagctcctccggtaccggctggccgaggagggccccgccgacgtccgcatcggcaacgtggcttcagacctgggcatcgtgaccggatcgggtgaggtgactttcagcctggagtccggttccgagtacctgaagatcgacaacctcactggcgagctgagcacgagcgagcggcgcatcgaccgcgagaagctgccccagtgtcagatgatcttcgacgagaacgagtgcttcctggacttcgaggtgtcggtgatcgggccctcgcagagctgggtggacctgtttgagggtcaggtcatcgtgcttgacatcaacgacaacacgcccaccttcccgtcgcccgtgctcacgctcacggtggaggagaatcggccggtgggcacactttacctgctgcccacagccaccgaccgcgacttcggccgcaacggcatcgagcgctacgagctgctccaggagcccggaggcggcggcagcggcggcgagagccggcgcgccggggcggccgacagcgccccctaccccgggggcggcgggaacggcgcgagcggcggcggctcgggaggctccaagcggcggctggacgcatcagagggcggcggcggcaccaaccccggcggccgcagcagcgtgttcgagctgcaggtggcggacaccccggacggcgagaagcagccgcagctgatcgtgaagggggcgctggaccgcgagcagcgcgactcctacgagctgaccctgcgagtgcgcgacggcggcgacccgcctcgctcctcgcaggccatcctacgggtcctcatcaccgacgtgaacgacaacagcccccgcttcgagaagagcgtgtacgaggccgacttggctgagaacagcgccccggggacccccatcctgcaactgcgcgcagccgacttggacgtgggggtcaacgggcagatcgaatacgtgttcggggcggccaccgagtcggtgaggcggctgctgcgccttgacgagacgtccggctggctcagcgtcctgcaccggatcgaccgcgaggaggtgaaccagctgcgcttcacggtcatggcccgcgaccgcgggcagccccccaagaccgacaaggccaccgtggtccttaacatcaaagacgagaacgacaacgtgccgtccattgaaatccgcaagattgggcgcatccccctcaaggacggggtggccaacgtggccgaggacgttctggtcgacacccccatcgctctggtgcaggtgtccgaccgagaccaaggcgagaacggggtggtcacctgcaccgtggtgggcgacgtgcccttccagctcaagccagccagcgacaccgagggcgaccagaacaagaaaaagtacttcttgcacacctcgacccctctggactatgaggccacccgggagttcaacgtggtcatcgtggcggtggactcaggcagccccagcctctcgagcaacaactccctgattgtcaaggtgggagacaccaacgacaacccgcccatgttcggccagtcggtggtggaggtttacttccctgagaacaacatcccgggcgagagggtggccacggtgctggcgacagacgcagacagcggtaagaacgccgagatcgcctactcgctggactcctctgtgatggggatctttgccatcgatcccgattctggggacatcctggtcaataccgtgctggaccgcgagcagactgacaggtatgagtttaaagttaacgccaaagacaaaggcatccccgtgctgcagggcagcactacggtgattgtgcaggtggctgataaaaatgacaatgaccctaagtttatgcaggacgtcttcaccttttatgtgaaagaaaacttgcagcccaacagccctgtggggatggtcaccgtgatggatgctgacaaggggcggaatgcagagatgagcctgtacatagaggagaacaataacattttttctattgaaaatgacacggggaccatttactccacaatgtcttttgaccgggaacatcagaccacatacactttcagagtcaaggctgtggatgggggagatcctcccagatctgccacagctacagtctcgctttttgtgatggatgaaaatgacaatgctcccacagttacccttcccaaaaacatttcctacactttactgccaccttcgagtaatgtcaggacagtagtagctacagtgttggcaacagacagtgatgatggcatcaatgcagacctgaactacagcattgtgggaggaaatcccttcaagctgtttgaaattgatcccactagtggtgtggtttccttagtgggaaaactcacccaaaagcattatggcttgcacaggttggtggtgcaagtgaatgacagtgggcagccttcccagtccaccacgactctggtgcacgtgtttgtcaatgaaagtgtttctaatgcaactgcgattgactcccagatagctagaagtttgcacatcccactcacccaggatatagctggtgacccaagctatgaaattagcaaacagagactcagtattgtcattggcgtggttgctggcattatgacggtgattctaatcatcttaattgtagtgatggcaaggtactgcaggtccaaaaataaaaatggctatgaagccggcaaaaaagatcacgaagacttttttacaccccaacagcatgacaaatctaaaaagcctaaaaaggacaagaaaaacaaaaaatctaagcagcctctctacagcagcattgtcactgtggaggcttctaagccaaatggacagaggtatgatagtgtcaatgagaagctgtcagacagcccaagcatggggcgatacaggtccgttaatggtgggcccggcagtcctgacctggcaaggcattacaaatctagttccccattgcctactgttcagcttcatccccagtcaccaactgcaggaaaaaaacaccaggccgtacaagatctaccaccagccaacacatttgtgggagcaggagacaacatttcaattggatcagatcactgctctgagtacagctgtcaaaccaataacaagtacagcaaacagatgcgtctacatccatacattactgtgtttggctgaattccactctaatatgatgctccattatgcaccatactgtgatgacctttctactccgaaacctgctggagcctgcccttggccgtggggtgtcagccaatcactgcttgttccacttgttgtacattttatttttgagtctttttctttctcatatacagaaaaatagtatgaaaataaaataaatgtatgaaacagtattaatgcagaaatgtgctactaatggatgtctgagtcaccagaaattccattcttaaagaggcggttagcacctattagacgtaacagtgatgtcttttaaaaaatccaaaagcatattgcaacaataagtttgagactttgtgtgaacaaagggaaattcagcctcttatgtctttgtctttaatacattaaatactgattttgaataaaaatctaaattgatcaatatttttaagtgccatgtaatcacaggcctgtcagatagttttgttagagtgaaggataatatcttttgctcattctgtgtgtgtatttttaaatgctgttttgtgtgtttgtgtgtgtttccatatatgtgtgtgtgtgtgtgtgtatatatatatatatgctggaactttgagcaatatttataaaaatattgtctgtaaaacaagtttgagaaattaattttttatatttataatgggcactgtaatggattgatttttttcttaatcttgaaatagtgaccaagatatttatatcatttttgaatttattttttaattctttaagaaaatttagaacttttcactttcatttgctaaagtcactgtagtcacattcggaaggaatatgtggctttctgttctttatggactacgtttatcagaagtccatatttattaaacatcctatttgatgtcagataacgtaaactcaagcagcttcaaagagttcagcatgttacatattattgagagagcaagtgactgaattttagttgtataagcaatattataggtaggtcagggagtcctctggatggcccctctacctctttatgtttgtatgtttatgtctttatttgttatgtcgtatgtgtttatgagcctagaaaatagcctagaaaataagtgttccatatgtaaagtttaataattttgtaatacatttaccacgctgtctgccctattaaaattttccacaaatttgggaactaagaatgccaaattctcaagattttttggtgaatcactctcaatataatagccacttaagaaaaataaataaataaatattggaaggccattggaagtgataggaaatgcactgtaacccctgtgaatctctaatgtatacctgaggattttcattttataagctgtgtatttaatcttgcaaaagggaaattttcagaaacatcactgcaagtacagtaagatttctgtataaaacttaattatcctcaacctctcattttgttttgaacacaaggactagtgtaagaaactggtgaaaggaaccttaccaatctctgcttcttgaaaatgctgttttcctcattccaaatagtaaacgtcactagatattcttcaaatgtaaatcccgtaacaagtcatatcaactcaaaaacaaattacagaaaaatcaaagtctagaattttgggttaatttaatgtgcaatcacatagaagtgatatttatgaataccttcacaaagaagaacattgtaagttagcattttctaaacaggttgcaacacactcttgaggtatgaatcaatttattgagtctctaccacaattagaaaagtacaaaataaaatagaaaaattcagagtacatcacccatagtaagagtaaatattgacttgtgcaatttttgtttcagttgtgtttgtgtggaggtgtgtgtttctgttctcggttgctatgttaaaaatatatcttattgtggaagcagttgaaaaggtttgagaaccagcactctagactggggtaggaagttatggctatttactattatgactggaaaaacatagtaaatcaaagcaagaaaaaaaaatgctgacactctcaaggattttagtgtactattaagctgaatcagaatgatcaacagcatactgattacagcaacatttatcaacagtaaaaagcttttgagaagtctattaccattcctctactattcttgtgattaaaaacaaaaaatctttgaa

SEQ ID NO: 172085 - DNA, 6769 bp, Homo sapiens
  Payload ID: 13808
  Gene Symbol: PCDH7
  Gene Name: protocadherin 7
  ENST ID: ENST00000511884
  CDS Start-End: 1-2813
gcgtgtacgaggccgacttggctgagaacagcgccccggggacccccatcctgcaactgcgcgcagccgacttggacgtgggggtcaacgggcagatcgaatacgtgttcggggcggccaccgagtcggtgaggcggctgctgcgccttgacgagacgtccggctggctcagcgtcctgcaccggatcgaccgcgaggaggtgaaccagctgcgcttcacggtcatggcccgcgaccgcgggcagccccccaagaccgacaaggccaccgtggtccttaacatcaaagacgagaacgacaacgtgccgtccattgaaatccgcaagattgggcgcatccccctcaaggacggggtggccaacgtggccgaggacgttctggtcgacacccccatcgctctggtgcaggtgtccgaccgagaccaaggcgagaacggggtggtcacctgcaccgtggtgggcgacgtgcccttccagctcaagccagccagcgacaccgagggcgaccagaacaagaaaaagtacttcttgcacacctcgacccctctggactatgaggccacccgggagttcaacgtggtcatcgtggcggtggactcaggcagccccagcctctcgagcaacaactccctgattgtcaaggtgggagacaccaacgacaacccgcccatgttcggccagtcggtggtggaggtttacttccctgagaacaacatcccgggcgagagggtggccacggtgctggcgacagacgcagacagcggtaagaacgccgagatcgcctactcgctggactcctctgtgatggggatctttgccatcgatcccgattctggggacatcctggtcaataccgtgctggaccgcgagcagactgacaggtatgagtttaaagttaacgccaaagacaaaggcatccccgtgctgcagggcagcactacggtgattgtgcaggtggctgataaaaatgacaatgaccctaagtttatgcaggacgtcttcaccttttatgtgaaagaaaacttgcagcccaacagccctgtggggatggtcaccgtgatggatgctgacaaggggcggaatgcagagatgagcctgtacatagaggagaacaataacattttttctattgaaaatgacacggggaccatttactccacaatgtcttttgaccgggaacatcagaccacatacactttcagagtcaaggctgtggatgggggagatcctcccagatctgccacagctacagtctcgctttttgtgatggatgaaaatgacaatgctcccacagttacccttcccaaaaacatttcctacactttactgccaccttcgagtaatgtcaggacagtagtagctacagtgttggcaacagacagtgatgatggcatcaatgcagacctgaactacagcattgtgggaggaaatcccttcaagctgtttgaaattgatcccactagtggtgtggtttccttagtgggaaaactcacccaaaagcattatggcttgcacaggttggtggtgcaagtgaatgacagtgggcagccttcccagtccaccacgactctggtgcacgtgtttgtcaatgaaagtgtttctaatgcaactgcgattgactcccagatagctagaagtttgcacatcccactcacccaggatatagctggtgacccaagctatgaaattagcaaacagagactcagtattgtcattggcgtggttgctggcattatgacggtgattctaatcatcttaattgtagtgatggcaaggtactgcaggtccaaaaataaaaatggctatgaagccggcaaaaaagatcacgaagacttttttacaccccaacagcatgacaaatctaaaaagcctaaaaaggacaagaaaaacaaaaaatctaagcagcctctctacagcagcattgtcactgtggaggcttctaagccaaatggacagaggtatgatagtgtcaatgagaagctgtcagacagcccaagcatggggcgatacaggtccgttaatggtgggcccggcagtcctgacctggcaaggcattacaaatctagttccccattgcctactgttcagcttcatccccagtcaccaactgcaggaaaaaaacaccaggccgtacaagatctaccaccagccaacacatttgtgggagcaggagacaacatttcaattggatcagatcactgctctgagtacagctgtcaaaccaataacaagtacagcaaacagccatttcgtagagtgacgttttctgttgtgagtcagcctcaggacccacatcaggggtcactgcagagttgctatgacagcgggctggaggagtcagaaacaccaagcagtaagagttcatcagggccaagactgggtgcgcttccactcccagaggacaactatgaaaggaccacgccggatggcagtgttgattcaaggcctcttccagatgtagccctgactgggaagtgcactcgtgagtgtgatgagtatggccactcagactcctgctggatgccggtccgcacttctccggagaggaagaagagccagcctaaactgtccactttcatgcctgttgatgaacgaggaagccaggaaaagctggccaatggggaggccgccatcatgggtgaccgcaacagaaacctcctgaacaaaaagttgacctcatcctatgagaccttcagtgcagctagtttcagcaaaaatgaggaagccaaccctgaggatattccccttacaaaaacaggggaatataagccatctcctgtcaatactctcactagaagagaagtttacctgtaggctataaaggagcaacagcaaagttctttacatgtatgaaaaggagaataaggggcaaaaaccttacaaagcaaaacgtttaatcacaaagagggggctaccaaagagacaaagctttgcctgccacttctgcctccagatcaggcctttagtgatactgttagcctgattctactgtacaatgtagaaaccatccttgttacttgcatgtctaaccccttcactgattcccaacactcactttctcttccccacccctctccaaaaaaaaaaaaacaaaaagaaaagaaaaaaaaagggggatagttgcaagtttctttcacagtaactgtacgaagcctgattagcagaacacaacacaccctcattatccctaagctgaagcatgattttagtcactttgattttgttcgagtgtcatctggctggtcaaaaataagcaggacagataaaatgtatttcagacataccatcagaaaatggtttatcaccatcaaaggcaatcctttgaaagtgatagagtccctctaaaggtacagtccttagaaagagggactgtattaaaaagtattttgggaatatcaaagctttaatattccaacaaagactaagagaaaaacaatactcagtgggtgattgcagtcctaaattgtcatatgttgttattttcaggtcaagagcatcaacttcaattccatacattcaccaaatattctcagtatacacacagtcttgattacatgtatcaatttcaccagttatgacttctaaaaattatatatattttttcagaacaagaccactattattaactaacttgaacaattgtatcatccaaaggccaaagatcatatggcagatcagggaagtcatgaagttgatttggtcttgacgtggaaaaccattaaacaacaaaagcaactgaacccatgtatgcacagaaacaatcaaacactagttcattttatagtgcccaggaaaatgttccttcttttaaaatggattttatttgaaagcgcagaaaatgaaaactagtgagatatatttttggtattataataggcaattggttgaggttcaagtttagtttcaggtaatattatcagggaagattccatgttttaaaatagtatttatggatcatgggtaggttaagaaagatgcattggcatatagtcttgatagttaagtccacgattatcattttagaatccaggctatgcttgctgctctttttatccacattttaaattacaattgcattttttacttgttcagtgcacactttgatgcaccacaagtgcattaattttgaatcgtgtgcaatatagaaatattttgagactcacaacattgaaacaaggtgacaccctagttgactttatcactaatgtgatttgaacattatttaaacaaatctagactgaacatgaaagaaaggagttttgggcagtgacatttttcacagaatgtatatctcaaaggtgaaagcagagtttttccagtgcaataaaaagaaacagaatatgcagattttgagctactcactctatagaggataacctaacacggctgaaaattgagctgggacattcagacgaaagtgacaatccatggacagaatagggaataacaggtgtgaagagaacaaacttatcactgaatgtttgcaagctggttaaggcatagccttgatggctctctagcaaactgtagaaacaatgtagctttgggtagtttcatgctttgcagaatttcttagactataaagtgacacagcctggaatataggttgataattcactataggtcttcaaaatacttatctttgaaaaccgcttctctgtttggtggggtacaatttgggggtcatttccttatgctctttcttaaatggagttttcattttgatgttagtttatgtataataggtaggatgcaaaaagatatgtaattgaaacaaaaaacattggactaaaatatcagtaattgaacatgtttatgtttgattattatttacactatggaaagatgcaattctagtactttgttaggaaactgcattaaagcagttctgccttgtataatctgtaagtacctattaagacaaaatacttctaaagatacttatgaaatgtatacacattttttcttgcacgttacaaagaaaatactcaattgcataacacggatgtttgacaaacttttttttttttaatgcatttctttctttcatgagacattgaaaccactgatagctcatttcaccctatcttaaacccttctcttgtctataaaactaatacgggtcacaccggaccttcggattaattggatccacattccccaatgatgtttgcaccccattcaagatagccatgccattgtcatttaactcgtgaacctctctttaaaactaaaatggatgtgaaagaataaaattcagtgtactgtaagtattcacagtaattctagtagaattagctgtcataacatgtttattatataatgagctggcatgacacagaaatatattttgtgtttgtatgacttttattttaaataggttaaatctggtgccactccatatatagagtgcttttgaaaaaaaatcaataaaaagaaacaaaaaaaataaatgagtgaatgcaaaataagcaactgtgccttttatacctgttgttacggtaaaaaaacggttgttgggtttggacaatgaggggaaatgggctattcccaacttttttgatcctgtatatttgtccatgtttattttctgaacataataaataatatattaaaaatttgccttctgacaaactcagataatggaccagtcttaaatattgttatgtcataaagcaaagttaaggcattaatatgggctgcttaaatctgactagaagatgaaagcgtttattgtaagtgtaacacagagatactatcaggagtgaaatcagtccatttggcaaggtaaaatactgatttagagttttattctttatttcttttttgttgtgtttctttcagctatggtttcattttggttgtacagtatataaaccatatttgttttctgtacacaagactctcaagtgaattttgcatgcattatacattaggacacatttataaattaatgagtaactatataaatttatgtgtattaaaacgtctgtagcttcaatctaaaatctactgctctttctgaatctccagatatcatttctgtatggtttctgactggcctgctgcctgagtttcagaaaacaagggaggcattatttttatgggaggaggaactaagatggtactgaggatgtctgactgaaacactaccctaggaagctgtcttgtaggaaaatagaataaaacacacagaccagaagaaattgtcaagaagcaaacagccatccaaaaacagtcatgagaaatctaaagacctaaataatcttaggtatatgctctcagtgagaaataagaaaatgtgtccttaagcaaaaataaataaataaataaataaataaataaataataaaaagtgagcatgatcatgaatatagtaaatcttgtgagttgtgacctaggtgaaggtgtaatgataacatctggaggaagcatcatttgttcagctacctagggtttactttcagacttttcctacagtttaaagcacttgcgttcagtgtggtacgatctgtttgtaatgttaatcattgactattgttctgctacttggatgttgatagtgaagcagagaacaatttatcatcgtttattatgagtcactatgcacgcaactatgcttaacatggcgaaatgtattaaacactcgtccaactatttatgaaatactttgcataatttaatttgcttttgtacagttttatgtaaataaattgcttgtcatttttgtctctgcaaattaaaatataacatggtcaaatggtttcaca

SEQ ID NO: 172086 - DNA, 4457 bp, Homo sapiens
  Payload ID: 13808
  Gene Symbol: PCDH7
  Gene Name: protocadherin 7
  Uniprot ID: O60245
  ENST ID: ENST00000543491
  CDS Start-End: 571-3789
gccggagccggagcagagcctgggtttggagtgagtgcctggaacgtgaattggactcaactcgagtagcagcaaagaccagcgggctggcaggcgggggaggctgcaggctcattccccacctcttcccagccccactgcccgtctgccggagcggttctggccccttccgacagagcggggactagagccggggattctccgcccgctgaggggatgactctgggttgggggagcgccgaacccgcggcgcgcagtgtcccgtgaactgtgagtactgcgactgaacggcggcaggcgagcgggcgattagcacccattgcatgaattatgaaacaataactttcggaagaagcaggaggaaaaaaagaagcatctatcgctgccctcccacccccattcccggccaactctccacgccgcttttgccccctccctcccctccctctcgctccttcctttccgggagaggggagaggactcgggggagggcaggcggccggccccggaggaggggggcgccgagggggctgtggttagaaggagcagtagcagcagcagcaggagaagatgctgaggatgcggaccgcgggatgggcgcgcggctggtgcttgggctgctgcctcctcctgccgctctcgctcagcctggcggccgccaagcagctcctccggtaccggctggccgaggagggccccgccgacgtccgcatcggcaacgtggcttcagacctgggcatcgtgaccggatcgggtgaggtgactttcagcctggagtccggttccgagtacctgaagatcgacaacctcactggcgagctgagcacgagcgagcggcgcatcgaccgcgagaagctgccccagtgtcagatgatcttcgacgagaacgagtgcttcctggacttcgaggtgtcggtgatcgggccctcgcagagctgggtggacctgtttgagggtcaggtcatcgtgcttgacatcaacgacaacacgcccaccttcccgtcgcccgtgctcacgctcacggtggaggagaatcggccggtgggcacactttacctgctgcccacagccaccgaccgcgacttcggccgcaacggcatcgagcgctacgagctgctccaggagcccggaggcggcggcagcggcggcgagagccggcgcgccggggcggccgacagcgccccctaccccgggggcggcgggaacggcgcgagcggcggcggctcgggaggctccaagcggcggctggacgcatcagagggcggcggcggcaccaaccccggcggccgcagcagcgtgttcgagctgcaggtggcggacaccccggacggcgagaagcagccgcagctgatcgtgaagggggcgctggaccgcgagcagcgcgactcctacgagctgaccctgcgagtgcgcgacggcggcgacccgcctcgctcctcgcaggccatcctacgggtcctcatcaccgacgtgaacgacaacagcccccgcttcgagaagagcgtgtacgaggccgacttggctgagaacagcgccccggggacccccatcctgcaactgcgcgcagccgacttggacgtgggggtcaacgggcagatcgaatacgtgttcggggcggccaccgagtcggtgaggcggctgctgcgccttgacgagacgtccggctggctcagcgtcctgcaccggatcgaccgcgaggaggtgaaccagctgcgcttcacggtcatggcccgcgaccgcgggcagccccccaagaccgacaaggccaccgtggtccttaacatcaaagacgagaacgacaacgtgccgtccattgaaatccgcaagattgggcgcatccccctcaaggacggggtggccaacgtggccgaggacgttctggtcgacacccccatcgctctggtgcaggtgtccgaccgagaccaaggcgagaacggggtggtcacctgcaccgtggtgggcgacgtgcccttccagctcaagccagccagcgacaccgagggcgaccagaacaagaaaaagtacttcttgcacacctcgacccctctggactatgaggccacccgggagttcaacgtggtcatcgtggcggtggactcaggcagccccagcctctcgagcaacaactccctgattgtcaaggtgggagacaccaacgacaacccgcccatgttcggccagtcggtggtggaggtttacttccctgagaacaacatcccgggcgagagggtggccacggtgctggcgacagacgcagacagcggtaagaacgccgagatcgcctactcgctggactcctctgtgatggggatctttgccatcgatcccgattctggggacatcctggtcaataccgtgctggaccgcgagcagactgacaggtatgagtttaaagttaacgccaaagacaaaggcatccccgtgctgcagggcagcactacggtgattgtgcaggtggctgataaaaatgacaatgaccctaagtttatgcaggacgtcttcaccttttatgtgaaagaaaacttgcagcccaacagccctgtggggatggtcaccgtgatggatgctgacaaggggcggaatgcagagatgagcctgtacatagaggagaacaataacattttttctattgaaaatgacacggggaccatttactccacaatgtcttttgaccgggaacatcagaccacatacactttcagagtcaaggctgtggatgggggagatcctcccagatctgccacagctacagtctcgctttttgtgatggatgaaaatgacaatgctcccacagttacccttcccaaaaacatttcctacactttactgccaccttcgagtaatgtcaggacagtagtagctacagtgttggcaacagacagtgatgatggcatcaatgcagacctgaactacagcattgtgggaggaaatcccttcaagctgtttgaaattgatcccactagtggtgtggtttccttagtgggaaaactcacccaaaagcattatggcttgcacaggttggtggtgcaagtgaatgacagtgggcagccttcccagtccaccacgactctggtgcacgtgtttgtcaatgaaagtgtttctaatgcaactgcgattgactcccagatagctagaagtttgcacatcccactcacccaggatatagctggtgacccaagctatgaaattagcaaacagagactcagtattgtcattggcgtggttgctggcattatgacggtgattctaatcatcttaattgtagtgatggcaaggtactgcaggtccaaaaataaaaatggctatgaagccggcaaaaaagatcacgaagacttttttacaccccaacagcatgacaaatctaaaaagcctaaaaaggacaagaaaaacaaaaaatctaagcagcctctctacagcagcattgtcactgtggaggcttctaagccaaatggacagaggtatgatagtgtcaatgagaagctgtcagacagcccaagcatggggcgatacaggtccgttaatggtgggcccggcagtcctgacctggcaaggcattacaaatctagttccccattgcctactgttcagcttcatccccagtcaccaactgcaggaaaaaaacaccaggccgtacaagatctaccaccagccaacacatttgtgggagcaggagacaacatttcaattggatcagatcactgctctgagtacagctgtcaaaccaataacaagtacagcaaacaggtaagatgtatcccaaatatatttaaatatcccagggagggctaataactctgagacagattatcttctgtaaagttttgtcttctcgtttttaaagttattaaaattttaacagtaggaatttaatgttaatttttgcaccattaatttagcaaaggccatctacaagaggtataccactgtattttgcaaattagaattaaggttcactaaactactgaaagaagtattcagagtaggcagtgtttggcagttctctttgcacttgacatccctaattcatactacatttttttgtttccagaataaatatgtgtgtattacttagatggttagttttcacctgaaattattttcttctgtggcaactaagtggataattacatccagagaaaaagtttctaaagttactactggtgtctatgcaaattggattccatagaagttttagctatgttatttacaatgcaggattttacagataaatagatgctgattcatgcagatgtagtactaagtctgagatattgaaatactgactactttgatgaaactgctggtttaaaaatatttactgatatgcaaatgtcatgcaaaactccactttcaatcttttatatctataataatcgatacctataacaattagtgttctataatgatatgcaattaccatttgcattctttctgtttggtattaaaagtttgcaaac

SEQ ID NO: 172087 - DNA, 865 bp, Homo sapiens
  Payload ID: 13808
  Gene Symbol: PCDH7
  Gene Name: protocadherin 7
  ENST ID: ENST00000509759
  CDS Start-End: 1-376
caacatttcaattggatcagatcactgctctgagtacagctgtcaaaccaataacaagtacagcaaacagccatttcgtagagtgacgttttctgttgtgagtcagcctcaggacccacatcaggggtcactgcagagttgctatgacagcgggctggaggagtcagaaacaccaagcagtaagagttcatcagggccaagactgggtgcgcttccactcccagaggacaactatgaaaggaccacgccggatggcagtgttggtgaggcagagcatatggaaaatggtgttgctgccatcactacctttcccttcctcccctttcctcatggcaagacgcatggaagaagagtgctgttaaggcctctccattaatcaacagattcaaggcctcttccagatgtagccctgactgggaagtgcactcgtgagtgtgatgagtatggccactcagactcctgctggatgccggtccgcacttctccggagaggaagaagagccagcctaaactgtccactttcatgcctgttgatgaacgaggaagccaggaaaagctggccaatggggaggccgccatcatgggtgaccgcaacagaaacctcctgaacaaaaagttgacctcatcctatgagaccttcagtgcagctagtttcagcaaaaatgaggaagccaaccctgaggatattccccttacaaaaacaggggaatataagccatctcctgtcaatactctcactagaagagaagtttacctgtaggctataaaggagcaacagcaaagttctttacatgtatgaaaaggagaataaggggcaaaaaccttacaaagcaaaacgtttaatcacaaagagggggctaccaaa

SEQ ID NO: 172088 - DNA, 2029 bp, Homo sapiens
  Payload ID: 13808
  Gene Symbol: PCDH7
  Gene Name: protocadherin 7
  ENST ID: ENST00000621961
  CDS Start-End: 1-1753
tattgaaaatgacacggggaccatttactccacaatgtcttttgaccgggaacatcagaccacatacactttcagagtcaaggctgtggatgggggagatcctcccagatctgccacagctacagtctcgctttttgtgatggatgaaaatgacaatgctcccacagttacccttcccaaaaacatttcctacactttactgccaccttcgagtaatgtcaggacagtagtagctacagtgttggcaacagacagtgatgatggcatcaatgcagacctgaactacagcattgtgggaggaaatcccttcaagctgtttgaaattgatcccactagtggtgtggtttccttagtgggaaaactcacccaaaagcattatggcttgcacaggttggtggtgcaagtgaatgacagtgggcagccttcccagtccaccacgactctggtgcacgtgtttgtcaatgaaagtgtttctaatgcaactgcgattgactcccagatagctagaagtttgcacatcccactcacccaggatatagctggtgacccaagctatgaaattagcaaacagagactcagtattgtcattggcgtggttgctggcattatgacggtgattctaatcatcttaattgtagtgatggcaaggtactgcaggtccaaaaataaaaatggctatgaagccggcaaaaaagatcacgaagacttttttacaccccaacagcatgacaaatctaaaaagcctaaaaaggacaagaaaaacaaaaaatctaagcagcctctctacagcagcattgtcactgtggaggcttctaagccaaatggacagaggtatgatagtgtcaatgagaagctgtcagacagcccaagcatggggcgatacaggtccgttaatggtgggcccggcagtcctgacctggcaaggcattacaaatctagttccccattgcctactgttcagcttcatccccagtcaccaactgcaggaaaaaaacaccaggccgtacaagatctaccaccagccaacacatttgtgggagcaggagacaacatttcaattggatcagatcactgctctgagtacagctgtcaaaccaataacaagtacagcaaacagctggtgatggagaacaacgtgttaatcttggattccttctgtcagatagcacagaaataccacaagccatttcgtagagtgacgttttctgttgtgagtcagcctcaggacccacatcaggggtcactgcagagttgctatgacagcgggctggaggagtcagaaacaccaagcagtaagagttcatcagggccaagactgggtgcgcttccactcccagaggacaactatgaaaggaccacgccggatggcagtgttgattcaaggcctcttccagatgtagccctgactgggaagtgcactcgtgagtgtgatgagtatggccactcagactcctgctggatgccggtccgcacttctccggagaggaagaagagccagcctaaactgtccactttcatgcctgttgatgaacgaggaagccaggaaaagctggccaatggggaggccgccatcatgggtgaccgcaacagaaacctcctgaacaaaaagttgacctcatcctatgagaccttcagtgcagctagtttcagcaaaaatgaggaagccaaccctgaggatattccccttacaaaaacaggggaatataagccatctcctgtcaatactctcactagaagagaagtttacctgtaggctataaaggagcaacagcaaagttctttacatgtatgaaaaggagaataaggggcaaaaaccttacaaagcaaaacgtttaatcacaaagagggggctaccaaagagacaaagctttgcctgccacttctgcctccagatcaggcctttagtgatactgttagcctgattctactgtacaatgtagaaaccatccttgttacttgcatgtctaaccccttcactgattcccaacactcactttctcttccccacccctctccaaaaaaaaaaaaa

SEQ ID NO: 172089 - DNA, 3708 bp, Homo sapiens
  Payload ID: 13809
  Gene Symbol: PCDH8
  Gene Name: protocadherin 8
  Uniprot ID: O95206
  ENST ID: ENST00000338862
  CDS Start-End: 206-3127
cagcttctgtaagagacggagaggcgcagagtgagggcgggtccgcgcgtcctcagagcccgctggaggctcggagctgctacccgcagacttctcccgcacagggctcgcaaagagcgtgattccgagagcctgagactgacgcccgacctggaaaccagagaagacttccttagcctttcggatcgcacttgaggctggaggcatgagtcctgtgaggcgttggggcagcccctgccttttccccttgcagctcttcagcctctgctgggtgctctcagtggcccagagcaaaacagtccgatacagcaccttcgaggaggatgcccccggcacggtcatcgggaccctggccgaggacctgcatatgaaagtatcgggtgacacaagcttccgcctgatgaagcaattcaacagctctctgctccgggtgcgcgaaggcgacgggcagctgaccgtcggggacgccggcctggaccgcgagcggctgtgtggccaggccccgcagtgcgtgctggccttcgatgtggtcagcttctcgcaggagcagttccggctggtgcacgtggaggtagaggtgagggacgtcaacgaccacgcgccgcgcttccccagggcccagatcccggtagaggtgtccgagggtgcggcagtgggcacgcgcatccccttggaggtgccggtggacgaggacgtgggcgccaacgggctgcagaccgtgcgcctggccgagccgcacagcccctttcgcgtggagctgcagacgcgagcggacggcgctcagtgcgcagacctggtgctgctgcaggagctggaccgcgagagccaggccgcctacagcctggagctggtggcccaggacggcggccgcccgccgcgctccgccacggctgccctcagcgtgcgcgtcctggatgcgaatgaccacagcccggccttcccgcagggcgccgtggccgaagtggagctggcggaagacgcgcccgtgggctccctgcttctcgacctggacgcagccgaccccgacgagggacctaacggcgacgtggtgttcgcatttggcgcccgcaccccgccggaggcgcgccgcctctttcggcttgacccgcgatcaggccgcctcaccctggccgggcccgtggactacgagcgtcaggacacctacgagctggacgtgcgggcgcaggaccgcggacccgggccccgcgctgccacctgcaaggtcatcgtgcgcatccgagacgtcaatgacaacgcacccgacatcgccatcaccccgctggccgccccaggcgcgccggcaacctcacccttcgccgctgccgccgccgccgctgcactcgggggagcggacgctagctcgccggcgggagccgggacgccggaggctggtgccacttcgctggtgccggagggggcggcgcgcgagagcctggtggccctggtcagcacctcggacagggactcgggcgccaacgggcaagtgcgctgcgccctctatgggcacgagcacttccggctgcagccggcctacgcgggcagctacctggtggtgaccgcggcgtcgctggaccgcgaacgcatcgccgagtacaacttgacgctggtggccgaggatcgcggcgcgcccccgctgcgcacagtgcggccctacacggtgcgtgtgggcgacgagaacgacaacgcgccgctcttcacgcggccggtctatgaggtgtcggtgcgcgagaacaacccgccaggcgcctacctggccacggtggccgcccgcgaccgggacctgggccgcaacggccaggtcacctaccggctgctggaggccgaggtgggccgcgccgggggcgccgtgtccacttatgtctcggtggacccagctaccggagccatctacgcgctgcgcagcttcgactatgagacgctgcgccaactcgacgttcgcatccaagctagcgacggcggctcccctcagctttccagcagcgccctagtgcaagtgcgcgtgctggaccagaacgaccatgcgccagtcctggtgcacccggcgccagccaatggctccctagaagtggcggtgcctgggcgcaccgcaaaggacacggttgtggcccgtgtgcaggcccgggatgcagacgagggagccaacggggagctggcgttcgagctgcagcagcaggagccgcgcgaagccttcgccatcggccgccgcacgggggagatactgctcaccggcgacctctcgcaggagccacccggtcgcgtgttcagggcgctcctggtcatatccgacggcggccgtcccccgctcaccaccaccgcaactgtcagcttcgtggtaacagcagggggcgggcgtgggccggctgcgcctgccagtgcaggaagcccggagcgttcccgcccgcctggctctcggctcggggtgtccgggtcggtgctgcaatgggacacgccgctgatcgtcatcatcgtgctggccgggagctgcacgctgctgctggccgccatcatcgccatcgccaccacctgcaaccgccgcaagaaggagccctacggtgcctccccgggttttggaaaggagccggcgccccctgtggcggtgtggaaaggacactccttcaacaccatttctggcagagaagcagagaagttcagcggcaaagacagcggtaaaggggacagtgatttcaacgacagcgattccgacatcagcggggacgctctgaaaaaggatctcatcaaccacatgcagagtggactgtgggcgtgcaccgctgagtgtaagatcctgggccactctgaccgctgctggagcccatcctgcagcgggcccaacgcacatccatcgcctcacccaccagcccagatgtcaaccttctgtaagagcacgtcactgcctcgggatcctctgcgcagggacaattactaccaggcccagctgcccaagacagtggggctgcagagcgtctatgagaaagtactgcacagagactatgacaggacagtcactctgctctcccctccccgtccagggaggctcccagacctgcaggagattggagtacccctctaccagtcccctcctggcaggtacctgtccccgaagaagggagccaatgaaaatgtgtaatcccatgctgcatgtcttcacacatatacaggtcactccgagaagcccctaagttattgaccggtttcagtgttgtatatataaatatgcaagatgtgccttacaatgaagttgttggaagctatttccaatcacattggtactgtttggtatttgcaaacaaaaatgtagttaatgtaatttttatgaaatgtgtgcagtatttaatttttcttatgctattgactttgatttcaattgcggcttgccattttcttagtgtttttaacctgtacattgtgtaatgtaatgtttgtatataatgaaattttgttatatttttatataataaaagctaaagtggaagttattgccaaaggaactgtctgtaagacaaaaaacaaaacatgttggaattacttaattgaaatttatctttcacctgaaacaacctagtgtttgagaaattttgccttgccaagtataacttgtatatcttgactctgtggtagatttcaagttcaatgttatttaattacatttggttttccgtaaaccgtgtcacttataagcacagtaataaaagatttgtcatgtgtttg

SEQ ID NO: 172090 - DNA, 5088 bp, Homo sapiens
  Payload ID: 13809
  Gene Symbol: PCDH8
  Gene Name: protocadherin 8
  Uniprot ID: O95206
  ENST ID: ENST00000377942
  CDS Start-End: 205-3417
agcttctgtaagagacggagaggcgcagagtgagggcgggtccgcgcgtcctcagagcccgctggaggctcggagctgctacccgcagacttctcccgcacagggctcgcaaagagcgtgattccgagagcctgagactgacgcccgacctggaaaccagagaagacttccttagcctttcggatcgcacttgaggctggaggcatgagtcctgtgaggcgttggggcagcccctgccttttccccttgcagctcttcagcctctgctgggtgctctcagtggcccagagcaaaacagtccgatacagcaccttcgaggaggatgcccccggcacggtcatcgggaccctggccgaggacctgcatatgaaagtatcgggtgacacaagcttccgcctgatgaagcaattcaacagctctctgctccgggtgcgcgaaggcgacgggcagctgaccgtcggggacgccggcctggaccgcgagcggctgtgtggccaggccccgcagtgcgtgctggccttcgatgtggtcagcttctcgcaggagcagttccggctggtgcacgtggaggtagaggtgagggacgtcaacgaccacgcgccgcgcttccccagggcccagatcccggtagaggtgtccgagggtgcggcagtgggcacgcgcatccccttggaggtgccggtggacgaggacgtgggcgccaacgggctgcagaccgtgcgcctggccgagccgcacagcccctttcgcgtggagctgcagacgcgagcggacggcgctcagtgcgcagacctggtgctgctgcaggagctggaccgcgagagccaggccgcctacagcctggagctggtggcccaggacggcggccgcccgccgcgctccgccacggctgccctcagcgtgcgcgtcctggatgcgaatgaccacagcccggccttcccgcagggcgccgtggccgaagtggagctggcggaagacgcgcccgtgggctccctgcttctcgacctggacgcagccgaccccgacgagggacctaacggcgacgtggtgttcgcatttggcgcccgcaccccgccggaggcgcgccgcctctttcggcttgacccgcgatcaggccgcctcaccctggccgggcccgtggactacgagcgtcaggacacctacgagctggacgtgcgggcgcaggaccgcggacccgggccccgcgctgccacctgcaaggtcatcgtgcgcatccgagacgtcaatgacaacgcacccgacatcgccatcaccccgctggccgccccaggcgcgccggcaacctcacccttcgccgctgccgccgccgccgctgcactcgggggagcggacgctagctcgccggcgggagccgggacgccggaggctggtgccacttcgctggtgccggagggggcggcgcgcgagagcctggtggccctggtcagcacctcggacagggactcgggcgccaacgggcaagtgcgctgcgccctctatgggcacgagcacttccggctgcagccggcctacgcgggcagctacctggtggtgaccgcggcgtcgctggaccgcgaacgcatcgccgagtacaacttgacgctggtggccgaggatcgcggcgcgcccccgctgcgcacagtgcggccctacacggtgcgtgtgggcgacgagaacgacaacgcgccgctcttcacgcggccggtctatgaggtgtcggtgcgcgagaacaacccgccaggcgcctacctggccacggtggccgcccgcgaccgggacctgggccgcaacggccaggtcacctaccggctgctggaggccgaggtgggccgcgccgggggcgccgtgtccacttatgtctcggtggacccagctaccggagccatctacgcgctgcgcagcttcgactatgagacgctgcgccaactcgacgttcgcatccaagctagcgacggcggctcccctcagctttccagcagcgccctagtgcaagtgcgcgtgctggaccagaacgaccatgcgccagtcctggtgcacccggcgccagccaatggctccctagaagtggcggtgcctgggcgcaccgcaaaggacacggttgtggcccgtgtgcaggcccgggatgcagacgagggagccaacggggagctggcgttcgagctgcagcagcaggagccgcgcgaagccttcgccatcggccgccgcacgggggagatactgctcaccggcgacctctcgcaggagccacccggtcgcgtgttcagggcgctcctggtcatatccgacggcggccgtcccccgctcaccaccaccgcaactgtcagcttcgtggtaacagcagggggcgggcgtgggccggctgcgcctgccagtgcaggaagcccggagcgttcccgcccgcctggctctcggctcggggtgtccgggtcggtgctgcaatgggacacgccgctgatcgtcatcatcgtgctggccgggagctgcacgctgctgctggccgccatcatcgccatcgccaccacctgcaaccgccgcaagaaggaggtgcgcaaagggggggccctccgggaagagcggcccggggcggcgggcggcggagcctcggctcccggctccccggaggaggccgcccggggagccgggcccaggcccaacatgttcgacgtgctcaccttccctggcaccggcaaagcgccctttggcagccccgcggcggacgcgcctccgcctgcggtcgccgcggccgaagtgccgggctcagagggcggcagcgccactggggaaagcgcctgtcacttcgaggggcagcagcggctccgcggcgcgcacgccgagccctacggtgcctccccgggttttggaaaggagccggcgccccctgtggcggtgtggaaaggacactccttcaacaccatttctggcagagaagcagagaagttcagcggcaaagacagcggtaaaggggacagtgatttcaacgacagcgattccgacatcagcggggacgctctgaaaaaggatctcatcaaccacatgcagagtggactgtgggcgtgcaccgctgagtgtaagatcctgggccactctgaccgctgctggagcccatcctgcagcgggcccaacgcacatccatcgcctcacccaccagcccagatgtcaaccttctgtaagagcacgtcactgcctcgggatcctctgcgcagggacaattactaccaggcccagctgcccaagacagtggggctgcagagcgtctatgagaaagtactgcacagagactatgacaggacagtcactctgctctcccctccccgtccagggaggctcccagacctgcaggagattggagtacccctctaccagtcccctcctggcaggtacctgtccccgaagaagggagccaatgaaaatgtgtaatcccatgctgcatgtcttcacacatatacaggtcactccgagaagcccctaagttattgaccggtttcagtgttgtatatataaatatgcaagatgtgccttacaatgaagttgttggaagctatttccaatcacattggtactgtttggtatttgcaaacaaaaatgtagttaatgtaatttttatgaaatgtgtgcagtatttaatttttcttatgctattgactttgatttcaattgcggcttgccattttcttagtgtttttaacctgtacattgtgtaatgtaatgtttgtatataatgaaattttgttatatttttatataataaaagctaaagtggaagttattgccaaaggaactgtctgtaagacaaaaaacaaaacatgttggaattacttaattgaaatttatctttcacctgaaacaacctagtgtttgagaaattttgccttgccaagtataacttgtatatcttgactctgtggtagatttcaagttcaatgttatttaattacatttggttttccgtaaaccgtgtcacttataagcacagtaataaaagatttgtcatgtgtttgaagaatctgccaattgcttttcatgaagctgcctatagtcagacattcacaaataatttgagtatcagaatgaaaccttctttcaagtgctaattatttgggcattattaatgttcatgacaatattaaacctgtaggatttcaagtattgcaaaatgtcacccaagtattaaaaacgtgtgttgatttcataaattatgtgcatctccatatgtattagtctataaaatccctgctctcatttattcactaggtaaatattcattgagcagccaccaaaaagtgaagaaagctaagtttgggttgttcattcactaattaaacaagcatctgtagaacttttactagctgctggtacctcctcctcaagctggagtttgaggtgaagaagacgtagtcccaaagagccctcagcttattcggggtgttagtatcaaaaagactaacatcttagtcttttggaatataataggttcccactacattctgtcctacttcctctttccttgccttcctctggagccagtctccaaagtaactatcagctctattccactcaaatttatgggcaaaatgacatgatgtttgggattcgctttaaaatgttctagaaaaaaacacagggagctatgtgaaacaagatcgatttgataagatattgataattgtcaatgctagcataggtgcatgtgaggtagggaaatttcagcagtatctctaaatgtttgtgtttgaaaatgtacataatggaaagtcttaaaaaaagacactcaagagtactatgcctatgtcttatactctatggatttcatttgaaattaaaatgatgataagcataatgagacctaacatttactgagcaagtcttctgtgagcagagctccttaccaagcattctgcatgaattatctcatttaatcagcaaactacccccaggatatgggaagtatcattaactccattttgcaattaaagaaaccgaggcacaagaaggttagataaaatgccaaaaatcacacagctaataagtatccagggtgagattcaaacctaggttattcagtgcaaaaaataaaacaaagtaatgaaa

SEQ ID NO: 172091 - DNA, 28227 bp, Homo sapiens
  Payload ID: 13810
  Gene Symbol: PCDH9
  Gene Name: protocadherin 9
  ENST ID: ENST00000377861
  CDS Start-End: 802-3900
gggctgcggccgcccgcgccgcaagatgcaggccaatcagagcccgggggcggggcctgggcagtcacgccctccctctgggcttattgagagttatatcaagaaattcagttcagagagaggagagggagaaggagagaggggcagaggggaagggagagagggagagcacgcgagacggaaaggagcgcctcagagtctctgaagcacgcaagagataaccgattaggaatttttcgggcaactgtcacccggatagctgtcagagaatcatcatcaccgcaactctgacgtttcctacaagaagttagagacttaagcagtattggcatcggatggaaatggtatgcatgctgctgtggaaaatatccctgagctgaagaagtgcaactatgtgttgtgtgtgctaaatgcccagaagaacccagacccagtgggtaagagagacgaaatgtggagagaatgactaacgacaaatccgtgaatttgttctctggagttgctaatttgccagcccgaagcaacacattttacaaggaggaaacattttgctgcttctgatttctccccaaactggtgctaccagatgcatggctttctatgtgttggaacaaatcattcctaactgcagcatactgggaaaggggaaaggttgaggcaactaaccggctgtctccaaataagtgatgagatataatgcatcctccagtccatgcacgcttcctcttgcaatttgtgcatcattcctcagtggaaacctttaaaccctaaaatccaggaaaagaaaataaatacattatcatggacctgagggatttttacctgttggctgctctgattgcctgtttaaggctggattccgcaatagctcaagaacttatttacactattagagaggaattgcctgaaaatgtgcccataggaaacataccaaaggatctgaacatttctcacatcaatgctgccacagggaccagcgccagccttgtctacagactggtttctaaagctggggatgcccctttggtgaaagtttccagcagcactggggaaattttcacaacctccaacagaatagacagagaaaaactctgtgctggcgcctcatatgctgaggagaatgagtgtttctttgaacttgaggtggtgatcctccccaatgatttcttcaggctgatcaaaataaaaataattgtcaaggataccaatgataatgcccccatgtttccatctcctgtcatcaatatttccattccagaaaacactttgatcaacagccgctttccaattccatcagcaacagatcctgacacaggcttcaatggtgtacagcattatgaattgttaaatgggcagagtgtttttggactggatatcgtggaaactccagagggagagaagtggccacaactgattgttcagcaaaacttggatagagaacagaaagatacctatgtgatgaaaatcaaagtagaggatggaggcactccacagaaatccagtacggccatactgcaggtcacagtaagtgatgtaaatgacaacaggccagtgtttaaagagggtcaagtggaggtgcatattccagagaatgctcccgtaggtacctctgtaattcagctccatgccactgatgcagatataggcagtaatgctgaaatccggtacatttttggtgcccaggtcgcccctgcaaccaaaagactctttgctttaaataatactactgggctgattacagttcagaggtccttagatagagaggagacagccattcacaaagtgacagtgctggctagtgacggcagctccactcctgctcgagcaacggttaccatcaatgtcaccgatgtaaatgataaccctcctaatatagacctcaggtacattataagtcccatcaatggcaccgtgtatttatctgagaaagatcctgtcaatacaaagattgccctaattacagtttcagataaggacacagatgtgaatggcaaagtgatctgttttattgaaagagaggtcccatttcatttgaaggcggtatatgacaaccaatatttgttagagacctcttctttgttggactatgagggcaccaaagaattcagctttaaaattgttgcctctgattctgggaagcccagtttaaatcagactgccctggtaagggttaagcttgaggatgaaaatgacaacccaccaattttcaaccagcctgtaattgagctgtcagtttctgaaaacaaccgacgtgggttatacttaacaactattagtgccacagatgaagacagtgggaaaaatgcagacattgtttatcagcttggaccgaatgcctccttctttgatctggaccgaaaaacaggagttttgacagcctccagagtatttgacagagaagaacaagaacgattcatttttacagtaactgccagggacaatgggacccctcccctccaaagccaagcggctgtgattgttactgttctggatgagaatgacaatagccccaagtttactcataatcattttcaattttttgtgtctgagaatctgccaaagtatagtactgtgggggtaatcacagtgacagatgcagatgctggagagaataaagctgtgactctttccattctaaatgacaatgataattttgtgttggatccctattctggagtcataaagtcaaatgtctcatttgatagagagcagcagagttcctacacttttgatgtcaaagccactgatggaggacaaccacctcgttcctctactgcaaaagtaactatcaacgtcatggatgtcaatgacaacagcccagttgtcatttctccaccgtctaatacttcctttaagttggtgcccctctcagccattcctggctccgtggtagcagaagtttttgcagtggatgttgacactggaatgaacgctgaactaaagtatactatagtgagtggaaacaataaaggcttattccggattgatccagtaacaggtaacattactctggaagaaaaaccagcacctactgatgtgggattgcatcgtttggtggtcaacataagtgacctggggtaccctaagtctttgcacacgcttgtgcttgtattcctttatgttaacgacactgctggaaatgcctcctatatctatgacttgatccgcaggactatggagaccccgttggacaggaacataggggatagtagccaaccctatcaaaatgaggactatctaaccatcatgattgccatcatcgccggtgccatggtggtcattgttgtgatcttcgtcaccgttctggtgcgctgtcgccatgcatcaaggttcaaagcagctcagaggagcaagcaaggtgccgaatggatgtccccaaaccaggagaacaagcaaaacaagaaaaagaaaagaaagaaaaggaagtctcccaaaagctctcttttgaactttgttactatcgaagagtccaaacccgatgatgcagttcatgaacctatcaatgggacaataagcctgccggctgaactggaggagcaaagtataggaagatttgactggggcccggcacctccaacaacattcaagcctaacagtcctgacctggccaagcactacaaatctgcttctccacagcctgcttttcatctcaaaccagacactccagtttccgtgaaaaagcaccacgtgattcaggaactccctttggacaacacctttgttgggggttgtgacaccctttctaaacgctcttccactagttcagatcacttcagtgcctcagagtgcagttcccaaggaggcttcaagacaaagggccccttacacaccagacaggtaaacgagcacttttactggtctataagtactgcatacaagtgcccagtcaaccagtattaacgtgccagtatgtctattgttttggtctaactttagcttagttagaaagaggtaaaaaaaaacttgaccccttttctattcctctggggctcagtcaagaatttttagaacagctttgaaatttctgagttctgagaatattttctcctttcagtttccttcaaatggcaaaagatgaaaagagaaaattattccaaaatgtcccaagataatgtttgctgaagaagaaaaaacctgtcctgatatgccaaattctgctcctgggggtttccaaattgactgcttcaagactttcaccttaccttttgatctaaaaagtcaccttcaaatctcaagttttcaatgacttttgaaggtgtgactgcaattatgttgcagctatggttgctaaaggggttaattttttttttagtctctaaacaggatagtagaatattaaatgtacatcagctgtgaagcacatgatcgttgatagattgcaactaagccatataggaagtcttctctttgatttcaaattattttattgtaatatattaaattcggtacttaatagaaagatttttagtgtccgcagtggccaaatactctttcaaaaaaaaaaaaaaaaagaatgcttgctgcctaatataactgatttaaaaagaaaagaatgaatccattgtaaatattctctcatcttagtaatgcataagtgatctgtcataactcattttaaactgtgaaatatgccatatgaagagggattaagaggctgagaaactcatatttcaaccaaatccagaattagtttttcttaggtctaataattccttgttaataaagatttaaatgcagcgctgtctaatttatttcactggtgcttgtctgttgccacaaaatttgaatatcgataatagcctgtagatggcactagggtatcatgtcgcttgtgctggccaggtgccaatcccgcagtagcaaggagaagggggagggaaggatcaagctggtagtacagccaaagataccttttatttaatgatagttgctctggagcaactagcatttaagttcattcgcttgctcttttgtgattagctctcagcacaccaactttctaggatttcgtaatgctagttctgtctttgtcgatatggagttcacctatggtgatggcccatctgtacttgtttataaataaggaacacatagattttagaaaatcaagtaaagcaaaattagtttgcagaacagtatcaacagttatcattgattagtctttggagaatcaagagtttttattttctgagggtggggtgaagtaggatgttttattgaaacagtttcccccttaccaactatcatttattgctctggaaggacttaaggcttcatggtaataaaatatttataagagtaattttgacaatgagtcatacagatactcccagaacatcaagtataatacatattaccatacaactaaaatctccattcttaaagtaaaatattaaacagtagagcgttttaaaagtacaaatatttacagcttaaatacacaggaagaaaggactttaatcagtatagaattttaaaggagactatgagattattacatataagtcaaagttagaacgacttaatttttgtgttaactttgttagtatttgaaaagaggttgatgttttaaaatttaaaaaatgttcagtcttagtaaaggtttttaaaagttaaatagttaactatgataagaaaagtaatttatgaaactaaatgagtttgattaaaaagttgctcttaatgaacagaaagaaaattttttaaattatttacttctgttatggttactcacaatacacatggtattttatgatatgcataattatgttgagaaactaatatgacttaaactttttcatgtaaaatctgacattttctttccaaagaaatgtactgatatacttccagcatcatctttttttctgtctatacgtggtgatattagcattgatgtatagatccactttttctgacctccccaaaagttgaacctatatatagtgtagtgacataaatgttaagtgcatttcagcaaagtatgcaagagatcttttcttgaggcttagtcagtcataaaagtctttgtatgatgtaatctttcaaataggatactgagtaattctctaactggaactaaagtgcgttttagaaatttcttgtgaccatgtgtcactttgcagttctcctatgggtattccaatgttcatatggaactaggtaattcactcttatgataaagagctattaaaatggctttgcttacaccttttaaaagttttcatgctgaaaaagaaatagtgtgatgttggagaaaagagatagaagtcggtggagaagtggtagtgatatacaaagtaatatgtacatttttttggataaaagaagcatatttcctatgaatgaacgacatcaaatatatactactctttaaaaatttgttttcactgaactgtatgattgctatctgcagatgttctagttaagctaaaaagtaaaaacttttttaactagtggcttttatataaaatgtgctcctgaagctacacaattttgaaagagtaacatttcttgctacaaaaactttcaaaggaatttatttaaaaaaatacaatctgtgaagattttagttgtgtgacgactattgctcacaccatcttttcattttatgctattaattgatatgtgggtaaaatgcaagattcttggttaaaagcttaccaaacttaaatttcactcatttatactgtatgtataacgaaaacataacgtctgatgttttcatcatgaatttgtttgtggtacatcaattcctatattgtctgatatttttccccttgctgttttcccttgtgttaacctgcaaagaacataggaaacactgtaaatcatattcctcattcactctattttataaagctttcatgtgtcactaaatttttcacagattatttcttacaaatttttggaagtgcgattagcctttataggttaagaatttacttttttttttttggcaaaaggtcatgtctcggtaattatttgtaaaaaaaaaaaaaacaacaaagtttacagccaaaaggtgaagaggatgaaaacgacaacattatccattccaacaaggctttaaatgataaaattcattggtatatttgcctaaaagaaaaatggtcttgttgacagatattgttttaaaatatgatactgattctccctgtggaatgtctgggaatcatttggagcactacttaaaacatggattgttgggttctaccccagaggctctgatttcgtaccactgaggtcaggactgaaaatatacattgctaacaagttcctaggtggtactgatgctgctagtccagggcccacactttgagaaccactaccttagcatattgaaacaggaagtgtcagcctctttccctctcgtattatcatatccagagaacctgtttttgcacagcccaactctcagcccacttattgacagctgttttattgtagctggaggctttacagtaagctgtttattgctgtttcccaacccagttgacagcatttagggaattaatttcttggcccctgtgtggttttttgggggtgggaagagggaagataaatgaaaatgttaaagtaaaagaaatagtcacccatttacatttgacaacttcttcaagtagtaaaacagtctgtaagagttgcactagacattggttctgggtaaactgtcatttaattttctaaaggaaatactcattttagagctttaaacatcctgacttttcacaatctagagtatttactcacatatatttttctatatattgaggaatgtatacactgaaaatgtgtatgcgtgctgtacttaagtgtatacatgtatttttacagtgtaaagggaatttcttctattccaaaccatttagagatactatattacatttatgattacttttcatttttgaataatctactacaaccactactgaaatgttattatgttatgtaaaatgcggaaggcagtcacagaattgatatttagaacagctagggaaaaaatgcaattgaaagtgaagggggcaaatgttaactaatgtgaggctaaccaaaatctttaagatattttcaattattaaattctggaatagatatatatagtgacagttgaacacaggtgacaactgatcccccaaatgcaaattgtttttaaaatgttatcggttgtgatttttatttctatggctctttggctaagtgccctatggtcatgaagtcagttttcatacttatgaggtagaagatacccagagcccttggatattaacacagatttttgaaatgaggataggccacccattcaaactggctatctttccatttgggtttgtaagataaatatttgactatttttctttccatcttgatattcctaagctataaaattcaagacgcattttggccttccattgctaataacattaagcagaataaaaatgaaaagttactattgtattaaacatagacatgtctgttgattcttgaatatttgttaacgtagagaaaatagtatatgtggtgacaatattctattctcttattatttgtttttgttgccattaattcaagatatagaaacaaggaacattaatgttctccttagtttcagaccagtcatcctatggtgagacagggcaggctttggtgtcattgaaattactttgaaaatattgtacttgtaataacatgttacattcttatggtgtaaacatattcttattatttaaataattgcaagctatcatttatcttcttatgatttcatacattaaattaaaatatgtgaaatagtaaagtagagggaatttagatttaaggaaaagcctcaaatctaaaatcaaattttctcataattaactatgatttatattgaaccttaaggtttcattttcatattgatgtgtgtaaaatatctataaattatacttatattattagatatggcattgtaacgcatcctttttcatattactaattttacactacagtactgaagtatgaaaatgacacctttaaatcattttgttttctgtaatcttatttccacaacaatttttgttgtcttatttagattgtttttatttctaatttttttttttcggttgggggaattcagaaatccaccaaatgctgaacgttacagttgtagccttggtcccactataccagtctgggtgtttacagggtttcagggccaagtcagatgtctgtattgctcttttacaatacttctcagtttgactttgttaaaggtgaactcttagcttgtatatagttaaaaacataacaaaactggaaatccagtggattgtttactactttgacttaaaatccttggtgcaatctttctttgaatttagtttggtgttttcttgaagataattctttattataactagaaattactctcttaatattagtaaatcatttaatatcttatatatttcactgagttggaaagtacaaattagttaatgcagatttttaaaggtttggcctttctgacactcaacttcacatttaatattttttccacaatttattacatataaggaccctaaccattatatcagatttattaaaatatgactctaatcacaggccaggtattagtgaaaatttggaaatgcaagtcaggaagaggcttattctaaagtttcatggaggcataaaagtcagactctttcgtaagtaataatgctaatgtcttatagactttgacatagtcagcgacccccaaatctacattatactacagaagtaaagacaaatgtaaaaataggatctctcatgtacataaggagatgtactctgtttttaagatttcattggttgttatttaagaaaactgtcaaatctgtcaaacatttcatttagaaaggaacacatgctttttgcctttgtttgatacaaacctattgggctgtcagtcaccagaaacatagaacaaaaaagatttattaccatgattgacattttgcttttgatttatattcttttcttctgtaagccaagactcattaaattttcaaattcctaaataagttaaacaactgtccttttttaacagtaaagagtgatacagaaataaactggaaaaacaacccatatttaatctttctcattcatatttttgtcctatagacagtttgtctctgatagacaagaatagtggcagaatcagtagaattttctgaggcatagcatataaatataagaaatgcagaactcaaagtcattcattagggatctgtttttacatatttattcattatttaaatggcatatgaaaatattttcccttgatcttttacagtttgattgattagagtgccataagcacatatcacgttttaaatgatgggcttgagaccacctgtacagctaagaatggcaaagatagaagcacagtcaaggtctttgaggaatatttgattgattctatcattttatactaattattctggatccttgagaaaatatatgaaatgaacttacctgttcttgaaaggagcctgctacgtacagcttcaccacttagtaatttatgtggatatttaattgtgtgggctgtaggaaagaatggaaatgtggtcaattttatcatgtttgtgtaatatcttgtattttaacattcttctatagtttgtctctctatccaaccatctctgcatttgagtattacactgctttgttaataaccactctctgggcctttttcagcctgttagcagttgattaagaaacactctaatccctttcaggatattgaggagctaatggattgcagactatttggatctttaagcttctattgtaaacggtatgaagaattgtcattgagctgatatttgcatatatctctcccagtgctagttactttgcctccttttttgtcctcttaatcttcagctttcattctgagaatatttattttagtcggaaataagcatgccagtgatagaaatttgggattcacctccagatgaatgccatcacagacagggaagctctggcacattttgcatagatctgtatgaacacagtgaacccttcataagctcttagattgcaggaaatcagtgctgaaaattaagtggggttttaaagatttgcaaagtagagagctttgtataatgctggtattgcaggtgcctattaaatatgaagtaaaggctttgtaatacaactagctaacacatttccctccacattagagtgatttatagcctagggaattagtcttgcctattttttccaaatgcagaaacactggatgtgactgaaagaataaaaatctcaaatacatgccttacaatggactgatttgctgttggatgattctaattattcaagatagatgatgcaggcttgtttgtacttccttgtggtatctctgatgcccatgatctggccttcatttctcctaagaagaaactctcaattgtgtatgcagactctcttctgaacctaaatcagattaacaccccaggtgtctataagactatatagcattaccataatgaagaggcctgggtaccaagtgaatgcttccatcctcataggaattactattgaatcatttctcaaactgtatttttagaattcatctttgctgcatttgtaaatatggtgtgtatttgtagcacagcattttgttctagacatacatggatttcaatatatttagcttcatgacaatgttcagtaaaatcccttgcagttctttaatacttaatgtctttgactagccctgttagatataaattggagcaaatagccatgcatattttaaaatgattttataaatcctatattttcacctattagaaaaagtgtgtaatccatatgcagcccacagtaggcacaggggcctgtgagagtcataatagatgattgatttagaaaagaaaacagtttttgtgcaagacaatagcaactgcaattcagtgaattaggtttttttttttcctcattaaacaaacctcaataaagaaaagaacggaaacacagaagcagttatgaaatgaagctgtatcttttatagaaggagaatgtcttctgctgacagtagtagttctatagtagacattttctggaaagaaaaatactggtggttttttggattcggtggatgcaaccaatctgtgcctctgtgtgatagcagctgcatgctgaggactttcaaatacacagctacataggattcggcaggaaactttttgtagaaggtgcaaatgacaaatggagacaaaatggagtgagttctgagttgtgagttgatgccctcctgtgtcatatattcatgtcattgaaccgattttcacattggatgtctagaatcacaatagccttccttctgtgtgtcagctgggaacacacctggactggctacttttctttgctccatttcttgtcattcactaggtggactatattcatgtatgttgttaatacatctgatttcttagtttcttgatggattttaaagtgatgtaatattatttctgcataatcttttccgtatatatatccatatatatatatatatatatatatgttgcttaagacaaccacaaagtgtgaaataaaatctatgatgtgtcctttcttgctagaaatagtaaattcatatttattctgacttatggtctcagataatatattttcctttgctattttttgtattgagtttttcttactgatgcctttttccaagttaaggaataatgttagatttaggtatatagagtaataatatttcaatgcattctcaacccattcaaatttccaacataaaagagatggtagaatttatacaaaatcatcattttttgccttaaaacttaaataggtatcaaaattgtattacaccatagtaaaaattgacacaatttttaggatattttagtatgacataaactcattttcattcttggtcttaaatggcaagattttctgccatgcagtggtagcaaaatatgttgaattcattgattgatttttaagcatgataataattaagtaaaagcttcttgacacctaaagtctctgttttagacaattaaattctgctttagctaagggttattgacttctgtatgatactgggagcaacactcctcagggtttaaactattcttgcaggaccatctgttatttgcagggactgtgcatcctctccagctgatactgtgtgaacccaggcgtatttcaggattgttcctcacatggccctggttcctgatgatcttttggtctcaaatggcaactcagtaaatccaaatactggtatgccactacttaaagtatgaaaatcttagagaatataagaaagttcctcaaagtaagagactgtgtcttacttacctttgtatttctaacactgaacccacaacagtgctgaaaagagtgaacttagtaggcattcagtaaattttgatgcaacctgaagatcagtgatcttgaaattttattttatatatataagattttccactgatttaatctttacaacaatcattcaagaaagacatcatttatgttcaaaatatattcttccatcacttagagatgtctgtgggtcccattttctcagtaattttggacatatcattatgtctgcccatcatatcatggtttttcatattaggaaataatgagaaggcaagaggtgagctaaacaaacaggatcaaattccttcacttccaagcctcttcaccccaaccttttatttaaacctttcagtacttagatcattgatttattacttctaaacataatgatcaatatatgtactttcataggtgcttgatagagatacgtgtttgtaagaaaaataccgtatcacattaaagttttcttaatagacttttgagccatccagacagtatgccagaatcaagtataaattctataaaaagaagcaaaataataactgaatagtgattaatgcagtgtctagcaactatattaattttagaaagataaacttggtgtctaatagaacttatagaatagttacacattctcaagtttccaatgcacctttgggattatttggcctatttaattctttttctgactgaagaaatggagactagagaactaatttgatatttggagtaacaaaaactgacttgatgaactactacataaagactgtgatactgggcacatcatttaaatgcactagtccttgctttccttgtctgcaaaatgggtgtaatcatgccaaatccatataaagttgtcctaagattaagtgaatatatatatatatatatatatatatatatatatatatctggctcgcaatagccagacactcagaaaatgttacctgtttttctacctcctgtccaagaataccagcttgccattgacagatgtttgcacattcatttagtgaatgctttcttgattttgtttttggttgttttcttgaatctgatttctattgtatctttttcacgactcacctgtgttcatctgcttttgtgttaaaacactatctggtttcagattatttaggacttttggaaaattgatcttcataacagtatctcaatatagcatatttgatgttgttttttatcttaatccctgttgtttcacatttgtataattgcttcgtctttcattttgagtattttacctatttcatttgcatgtcatgttttaaaattattctgttccttttagtgtttgtaatgaatttacgtccccatagattacccagaagctccacccatctgggaattttcaccgtatccatcactcctattacaaaatcacatataagagagaatctgtttcacagtcagtacttaacacagctggaatcatttgaaacctgctggttcttgcttccaattattccatagactggaaagcatccctgttgaagtaatggcatccatggtgtaatcaaaccagctaaaatgcctcaaagtatatggatcatatttctgagattgattgaattcatggtagaagcataatcaccaacagcttttactatttttcttaatttaacttatattcattttataagtaagtttttcatgtctcaatatacaagtttgtaatgtttgagtatgtgagtgacataataacataaatgagacacaacaaataaaaatattacacactacggtagtaccccaaaaataccttttgataatatcctggggccaaaatcatttccttttgttggaacagctgaaaccatcacgataaagttactgatttgtatttagagcagaatgtagtggagatttgttactagttcaattaactttatcaactaaataagaagtagatatagtcaaatttcaattggctttgttgtgattttgattgaataaattaaatatgtaacttcttgttgaacttaaccaccctctcagtgcaatacaattgttttggattggtcttttagtttagttctagttttatataagaagacagtttcataagacaagaatttaaaacaaaacaaacttaaaattaaaatactcattctttgtgcttagaaagcttaatctaacacataaaacctggaaaactggtgtgattttctttaggcttctgcttgttttatgctaagatgtgatatccattttatagcattgggataccaaacagggcagggacatagtgtggatattatcttgaatatcagacctcttagggttattacaaggattgtagcatggcatatagtacatgtttggtaaattctatttaatcccaccacataggcagacatggacctaatcaggcaaaatgttaaacacattttaaatggttaaaatcaggctttaaggatttggattcattgttttatttgaaatatttagcattctcatggcatcaagtatgtatacatgtatactgtatgaagcgatatatttattatatactgctaaatgtatattcaaaaggctaccattttatgtttttcatatcagtcgtttcctctattagcttttttttttcttttttttttttttttttttttttttttttttgtgacggagtctctgtcgtccaggctggagtgcagtggtgtgatcttggctcactgcaagctccgcctcccgggttcaagccattctcctgcctcagcctcccaagtagctgggactacaggcgcccgccaccacacccggctaattttttatatttttagtagagatggggtttcatcgtgttagccaggatggtctcgatctcctgacctcgtgatctgcccgcctcggcctcccaaagtgctgagattacaggggtgagccaccgcgccttctattagcttttataatggagaggtaactgtcctagaaagtccatgtaaattccagttcagataatgaacaattacttattctatgaagacatttatatttcctggactgtacctttcacatctttccctatgtgaatgggttccctgaagaactttttctgcctgctgagcacttatttggaggtaagtctaacaatgagatgatatccaaacttatcactagactactgaacgatattctattttccctaatggataccaatgcttattccagaattatattctatagttttaaattttcatgctttcaaaagtatctgacatttagctgtgaaattttctgctgccaaagaccttgtcatatgatccacggacagatacacagctaggctttttaaattttgtattaattctgttattcaacacacatctaataaataactgctgtgatccaggaacagcattagacaataggaaattttttttaagataaaaaaaattgtctttggtttaaaatattccattaaattttaagcacagtacttttttcccttggaatttccttattaaaaaaaatatgagttcactctcaattttaaatagatgtcatcatttccctgaaatatattttttaaagtctctctctctcacattttttttaactactgctggagacttgatctttcaatggggtaataagattctaagatctattactctaattataagaatgccaggtttaaatttatcctttggttaatttggagggaaatgtactttttcattcttaaaatcacactccttctacaggcaaaggtgttaataaaatatagtagcaagtaaaacttcatttttttactagatgagattagcatatttgctatattaaaaattactttaaaaacatggcacacatgaataatgttgaatgataacccaagctaaagtagacagtggttctctaaaaatggaatttcacttgtagagacatccattttgaaaagggctgtttcaagtcatgatattttgaaaaaatgttttagccttcgtacgttgaaaggacatgtttaccacagatatggaacatagatattaaattctggctggaataaatgtttggtttaattggcttctgcctccagatggttctgattttatcaagtccattttcttatgaatatttatcacagtacttcaaggaaccaatgcaatgatataaacgttgaaaacaagagacctttattttatatatatatgttttcctaaattgagaaacatacatatcctgaaaatttagttttctttcatcatcgaagaaaatgtcataattcggctattacagccaagacagactatgtttttttaactcaattatttctaaaacactaacttacatatggataaatgtttatataggaaggtcatccccaaatttcaaatttttatttaagccaaaaatttgtattttaaaaaataatgcatataatgcctcacctgcacattcttgtacaaacatattttaggagataaatctttattgccagaaaacatactattttaattgcaattagacttctgtgataaccatcaagctggtgcctaaatctaaaaggatctttccaactgttctgtggatgcttaggcttaggcaactatcaccaagtaattactataatttaaatgaactacgaaattgaaacctgctaaaatatgtagacctcaggaatcaaatgtgtattaacacttgttaattaaatattattggttaaaattaatttagaaattattattgggttgatatgaccaaccaaaaaactatatgtaaatcacttcttaatactatgaaaatatgaacagtttggtaaactaatttagaaccaagcaacaggatatattaagcttaggaagatacagacatttaaataaaggttggtatagaagtcacatgatagttgctctgtctgtagtaaccaatttctaaataaaatcaaaaatgtggcattctcaccacttttcacagtgacaattaacttggtgtttttacgtagtttcaattccttgcttattctgatttttataagtgactatgcaatgtattaccacataaaataaaacagtagtggttattaaaatcagtacttaaattttcccattttaaaaagtgtagaatacattattttctctctttttggctacaataatgtctattcaaaaccatttatactttgctagaattacacttagcatcttgagaattcagttttctcctctgaaaattagataattggactcaaccatttttttatttctattattaaaaattgaactacagcttttgttaattacttagggaaacattactccttggcaggttttctcttgccacccaacatccatctggcctacttctttctattatcagttgatatatgttcaaatagtgcacatcagtgttaacattggctcaagaaaaacaattacaaaataaatcacatggttcagtctctcctgacaatgaatgatttgcaatattcccattgtttgtatgatctatgttatcactctcttgcattagtgttgataacacagtattgcctctatcttttttgaggttgctctgtgattaattttccccttctgaactagaaaattaacttttttctcttgaattagaaatcaaaaaacagaactacaaaaccttgagcagattgttggcatttattatttgattggaaaaccatgaacttaaaatcattatgtagctgccatatttttatcagtaatattactcttataatgtttgattttattgtctatagtaacacattaaggtgactttagcatatttcaacttttgttaatgttggagaattacacatagttttgcaataatgtgtaaatgtaataaaaatatcaaacagtggtaattttgactgataatgttagttatcaggacaagtgttagaaaagcaaatttaatcaaatggtgcccactgattttataggcagtttcttcattcaaagtaaaagtgatgttaaattgaagaacttgtcagtctcatgctggaggaaaatcagctttaggattagaaaaaccaaactgcaaattagatgaaataccacattaattagatgaaataccacattaatgttaaaaaaaaccggtgttatttggttacatggaaataaaataaaacggttttgccatcaatgagtctaacacattttcttcacaacactgcagaaataagaacccacaggatggttctgaatcttgaacagcagcttaggaatacttactcgtctaataactcaatttgcttgcatttactactacttactgcattgtaccctttcatcttctaacaagtttaggaagaccaaattcttttggtgtttttgatagagatatggtaaagagactattttacactgtagatggatcggtctaggagtcactttgtaagtttggaaaattgacatcgatggaggagatgtattaaatagttccagaaatgccacattttggatgcaagacactttttaatcatattaagcagtctctttaatgctcacaccctgaatgccttccttaaaatgttctaaacacttccaatttgaagaggggttaaaatataaatgtggtaaacaaatcacagaaagaatatacattcttaaggaattgttcttcttatgttatggtcttccaagtgcgccaatgacatcggaagtatgtggtgctaaggtgaggcattctgtgtaatggcttagttgcaggactcaagtactgggaattcagtcaattctgctcttgtaatacattgtgttggctttcagaacaatactccagtgtttttcaggggaaggtatgagtgtttccctaatagaagagcagatgttgtagccaatactgagaggtaggaaagatatataatacttacacaatctaaaatttcacctaaagtaacgtttaaataaagtttgtttagtaatcatcagtgttctgttgtctgtaatgaccaacttcaccataaaatcagaaaggtggcaatgtcaacatcacaaacagtggcagcaaacatggtgctgttctaaatacagattgtgtatcccaagccctttgcttttttctatggatattcctccaactactcgtatcaaagatgtatgttctggtaaagccttctgtattggcagctcctgctgcttttctgtcatattcaaacatgaccaacagcaaatgtacttacattttttttcagccaattctttcttatttctagtgacagtagtaaatttacttatagcagtaaagaaaatatgagaaatacttttctgtagtgccaaatgttttaatcactgcctatatcagcctaattgtttcctaatcaaaaattgtgagaatctaatttttggtcaaaattgtttattatggagattttgcacatataggaaaaaagtgacataaatattattaatactaagtgacattaatatgtcattggggaataaccatatggctctctgaacatgatatgctttctaagtattcatccaacaaatatatggtcatttggaggctactaaaaataaagcccaccaattttttaatgttgataatgcctctgacaggaaattttaaggaatatgaaagtaaaacaaaaaaatagtttgtgtcaaatgaacacgcaaggatttttgcataagacacacattagctatttagggcattaattgattgatgaaatattagcagtatctggcaaggttagaagatggacagataaagaaaattctgtgagttcatagagcattgtcagagtgagcattccagggacaatacagtgtgaattacagctatttgattaatcgaatcagttctgtattgtaaaagtacaaagagatggtgttactggaatctgatttggaattggatgcttgtagattaataaactggtatagactgtgcttcccaatattttgcctcaaaaaagaataaattcattaggaattggaacaaaagcaatgttacataacctttgtagtattagagtagtctatatagggaaaaagctaataataaaaagtaatcaattcattaatctcaatggtttgctattggcattgaaactaattattgatcgcattgacatgattagtcatagctttattactagaaatgtgaacatgattttaaacatatgtaaaactaactggccaaaataatccacagttaatttcagctaaatagctaacaatttcacaggaaaagtggaagatatttgaggctttgtaaagagaagatcacagcattcaccttggtaccattatcttttgatttctagaaacacagtttgcaatgccttgaaagtagatgtcaaacaccagctaatgataataactgatatttattaagtactccatgtgcgtgaagttcctctcagcactttacatgtattaattcaaatagaaccaactactttctgaggaggatactgttattattgtccgtattttacagctgaggagaagttgaatgatttgcttcaggtcacagttctagtcaggggagaatagtttacggttccaaccctagcagtcttagacactgcgctctcttagctgctaattaatactgtctctatcatggaacttttatacaaaacataaacttgtagttagtcagcaaaagtaaattttgccaaaaagaaatttggccattttaacctttttttaaaggttaaaaaaaaaatcaccgaagtctaatttaaccttttttttttttttgcttcattattatacaaattttgccactgagcacatagcattatgacagaactattcctgagacatggggagatactttacagtttacaatgaacattcacagacagtatatgtgaaaagtagaaattagcatttgtatcttttaggcagtacgattcgagatatttttcacaaacgtgaattttagttgttaatttaaataaatttgctcatctcaaagcagagttttgtgattattcttattttatacaatgcctcatatcagataagaaaagatctagaagaggggaaagtcaaactctaatgataacaagtgtatctcagtcctagactacttgactggaatgatgctttcctttctttttaaatctttattccagcccctgtgcctgaatggttcagaagcaaccaccaggcatctctgcacaaatttgccagctaagatcagtataggccctcctccaacttatctgcaatgcactgggagaatatatcttcatatctatttagaaacatgcatataagttattttaatactatttatacaattttagcattttcctagagtaggttttccactttcatcacccacagctacaaaattattcagttattttctacagttttacaaatataccatattacgggctgcttaatatcttccttgtttaagactttaacagtatcagccgggcgtggtggctcacgcttgtaatcccagctctttgggaggcgggcagatcatgagctcaggagttcgagaccagcctggccaatatggtgaaaccctgtctctactaaaaatacaaaaattagttgggcgtggtggtgcgcgcctgtagtcccagctactcgggagactgaggcagaagaatcgcttgaatccaggaggcagagcttgcagtgagccgagatcatgccactgcactccagcctgggcaacagagtgagactctgtctcaaaacaagcaaacaaaaaaaaaaactttaacagtattttgtaaatgccagtgtggtggcttacacctttaatcccagcactttgtgaggccgaggcggatggatcacttgagttcaggagtttgagagctgcctagacaacatagcgagaccccatctctacaaaaaatacaaaaaatatccaggcgtggtgacgccttggcactagagcaagaccctgtctaaaacataaataagtacataaataaaaataaaattcatcaaccgcgtgttgaattctcaagattccccttaaacctgagaactggagagagccatttcagttatatagtaaaattaaatttgtttatcatggattattataatggacgtatattgataaaatgtctaggtgagaattttacagttgtaattggaggtccatttaaaggttaaaatgaaatagagagttatggatgcacagctttccatattgtgtttggcaaaggaaattgattctcggaatgatatgctaccctttttgtccactatgtgtagtgcatatggatgatggaatcactttcatgagtacagttcttatttagaacacacattccgtaatatccctagaaaataaaaaagatttatgtgttcaaaaggagtttcttgatatgagacaagcagactgactttcaattacaaacacttagaattctgaaccttgcatttttattgcgagaactcagttattttccaaagcttggtttgagagctattttcaggcagcagctttttcttgaagtcccttactgataagtatagtaagcagaaatatttcaattactctaattaaaaagcagtattcaacatgttgactgaaggtggagtttatgttgttcaccagacaatgagaaattgggaagggactattttagatagatcattgatgtgagaaagttaaattcacctgttaatttgtcaataaactagaacagcagggtttcctttgttaaaatataagataatatattggaaacgcataattcttagacatgaactcaaagacatgcaggcaggtttacttttagctcatggcatatgcaaagataggcatcaatttgtggtgaggatatgaggaagtttttatctgtacatttgtttaaagagtcatgtttagagaagcattttttaatagatactcttttcaatggaactcatatttaattagaccaaacataaaagccaacactttaagtaatctctttttagcagattttcatggaagagtgccaaattgttttggtttcactataggtttacagtcttctgatagaattcccagttgggatttgaaaaccaaactgtgtcatacagacatgaatacagtggcctaacgtgatgtgttgaattagctttctagatgacttaaagtatagctggggttttcctttatccagggactaacattcaaggttttgtgaaaaagaaaattaattttgcattgacattctggatgttggtgataatttgtagtgacattatgcctattggttgtgattgtgacaggcaggcagactggatccaaatggacattacaagagccaaattaaatagtctgagcattggaaatttctgccttaaggaaagcagaagcttttcagcatgcacttgttttctacctccacaattatggattaatatacatcaattctaggcagttgaggaatgacatgagaggattaatggaactggacaacattacacaagtgaagtgaaaattctgtaatgatttttctgaggtgatgtagtagacaaggcaaatgggcatcagctcctagactttgcacctttagaatttcaagaaaatgattgaaaagagaaatggaaaacaactatctaactaaagctggcataataatttttctcatcaaatatatacatcatttttcacaaataaggaggagttattcaactgagtaagccagtactgtgtgcagtgtatgattttatccaaaaattgtggccacttttatctcttaaaactgtttagagaaaaattgtgcttagtgtgtatccacaataagaaaaacagattagatgcaaaaataaatatacataaccagccttatatgtaatcatactcattttgctttatgaaatatctctgaggggaaaatattttttccatgtctttttgaagttttaataagattttttaaccccaatatattgagctgccctaatgcctactatttatttttttctcttctacaaagtttacctatcatatcatatttatggcaacattttctactactaagactgtggcggtttttttccaagttatctgaaaacttgactgtcattattgcaaattgattatttccataaaggtgctttaataaaatttctgttcttagactttaatttggtaagctcttacacatatttatacataatttgtgataggagttttaatctttagatttttacaatgtgattttctcatatctattcattggaagaggtagacttcttttctttaattgcatgcattttatcctttaaccacaaaatgtgtttaaaagctatgcaagaattagcaaaagtaaactacagcaatattaaaatgacttatttggtatcacctttacagacccagctcacttaggcaatggtattctagtaaattacaatattttttaaagcatagttttttttgttacctcttgaaatagtgattttaaagccaaaagggtcaagagtatgccaaatttaagatgattatttggaaaagagagatatcagcaacttaagtatgctgtatttaaggtgattgtaaaagagtttttttatatacaggacagcattaaaacagaattacaaagtctattaaccataatgaaggagttcaagatgcagataaaattaaatgattgtctttaagctttcaataaatttgttagccaatttaagaataattgcagcttatgaaagcttgtttatatttatctaatttcaaaaattaagaaagaattaaaggatatttgaagttcttattatgtagtttctaacattgtgagagaatggtcaaaagactgctatgtcttatttagtgtaaatgtgtacatactttacagttaaaggaattactgctttgctaccatcaaggtcttaaaaccctgtatcaaaacaacctagagatttgcttcattaactcctgttcatttcgcagggcaagaaataagatcctctttggcaatcacgtgttacctgaattatatttaatctctttattaccttggaaatataccaagacactcacatattcacatacacacagcacacacacatacaaccctgatgcaaatatggacaaaatgaacaccctcacttatacatcagtccatttcttcctctcataaattgaatgtgaatagctctgatggcatttctctctgactgaaaaataaggtgccatgcttactccatgcaaaacccctgttttacagttttatgcccctcactaaaaatagataaatctgcatttgtatgtgtcctctactcagcctccctcatgccgcctgacttcttgcagaaggtgtatatgcttttcattctgaccaataagaggcaacttggtgagttatagagattgactgggtgcttgacatgtggtgctgctccattaaaacagtgggcagttggtactggggaggtttaggagaatttaagttgtctttattgttattagatgtgctcttagatgtggtaatattctaatattctattaaaaaatataaaaatgcaacttcagttcacattataataggttttctcatattgcttttgtggtccagatgtgaaacataacaataataatatgtaattctataatcatcttctaatgttaccaggtaatttttgtagacagagccagataaccctattgctcattatttaagtgcaaagtacattttttcaatcattattgcctaagaaatttttaggagatgatggttgaatggtccttctcctcacctcaccacaccaagataggttggtatgtgtgtttgtgtttccttgctttcactttttaaaggatcctatagaaaataacagtattgtttccatttaaaaaaaaaacttgataatttatattccattttatttctgaaaaatagccacatttttacataccccaaataaatcgccatgtgtaactatgtgcaaaaaataattgaatgtggctgaaaacgatctcacttgttgtactataatgtatgaataataataaatgtaaaacccttgaaatcacattttcttataatactattctataggtaacacttacagtacagtatattaaattggtactttgtgaaatgaattcttgagatacttaggcactacacaaagcattattattaaagaattataggggaaattttcccaattgaaaattgataattaaaggtatttaaattatgtatgttgcagagcaggtaagaagttcaatgtagcaatatatttctattttgatttcaaattaagttttaattacacaaaaaattggctcaagaactaggtgatacattttagaaaattttaaatagccaaaataatgttgaaatatgttatatggataatttatcaataaaaattattactgttaaaaattggtagaattctttcctccctgtgataaatgatttaagttgaatgggaatttaagtaacatacagggatgcatcttaatacctatatttgctcaacagtggtaaacacacaattaaaacttgtcctcattaaaatggacttttgtacactataatttgaagtaagtaatgaatatataaagtatttaaagagttgtatatcaaaatgtataacgttccatttttggctatattttgtaaaacatttttggtgtaatcagtatgactatcacatatgtcaaatcaagtattctactatttatttaaacggatatatacctaatgtatttgaaagcttattgcactcataaaattgtatatattgtggcttcaaaagtctgtacttattcttgctttaaaaaagtagtatgtgcatttctttccaatttatttttaattaattatattaaggataacattctttactaaatgtaccttaaaattcacaataaagtttcagaaattgttttgta

SEQ ID NO: 172092 - DNA, 5709 bp, Homo sapiens
  Payload ID: 13810
  Gene Symbol: PCDH9
  Gene Name: protocadherin 9
  Uniprot ID: Q9HC56
  ENST ID: ENST00000377865
  CDS Start-End: 175-3888
gcagcatactgggaaaggggaaaggttgaggcaactaaccggctgtctccaaataagtgatgagatataatgcatcctccagtccatgcacgcttcctcttgcaatttgtgcatcattcctcagtggaaacctttaaaccctaaaatccaggaaaagaaaataaatacattatcatggacctgagggatttttacctgttggctgctctgattgcctgtttaaggctggattccgcaatagctcaagaacttatttacactattagagaggaattgcctgaaaatgtgcccataggaaacataccaaaggatctgaacatttctcacatcaatgctgccacagggaccagcgccagccttgtctacagactggtttctaaagctggggatgcccctttggtgaaagtttccagcagcactggggaaattttcacaacctccaacagaatagacagagaaaaactctgtgctggcgcctcatatgctgaggagaatgagtgtttctttgaacttgaggtggtgatcctccccaatgatttcttcaggctgatcaaaataaaaataattgtcaaggataccaatgataatgcccccatgtttccatctcctgtcatcaatatttccattccagaaaacactttgatcaacagccgctttccaattccatcagcaacagatcctgacacaggcttcaatggtgtacagcattatgaattgttaaatgggcagagtgtttttggactggatatcgtggaaactccagagggagagaagtggccacaactgattgttcagcaaaacttggatagagaacagaaagatacctatgtgatgaaaatcaaagtagaggatggaggcactccacagaaatccagtacggccatactgcaggtcacagtaagtgatgtaaatgacaacaggccagtgtttaaagagggtcaagtggaggtgcatattccagagaatgctcccgtaggtacctctgtaattcagctccatgccactgatgcagatataggcagtaatgctgaaatccggtacatttttggtgcccaggtcgcccctgcaaccaaaagactctttgctttaaataatactactgggctgattacagttcagaggtccttagatagagaggagacagccattcacaaagtgacagtgctggctagtgacggcagctccactcctgctcgagcaacggttaccatcaatgtcaccgatgtaaatgataaccctcctaatatagacctcaggtacattataagtcccatcaatggcaccgtgtatttatctgagaaagatcctgtcaatacaaagattgccctaattacagtttcagataaggacacagatgtgaatggcaaagtgatctgttttattgaaagagaggtcccatttcatttgaaggcggtatatgacaaccaatatttgttagagacctcttctttgttggactatgagggcaccaaagaattcagctttaaaattgttgcctctgattctgggaagcccagtttaaatcagactgccctggtaagggttaagcttgaggatgaaaatgacaacccaccaattttcaaccagcctgtaattgagctgtcagtttctgaaaacaaccgacgtgggttatacttaacaactattagtgccacagatgaagacagtgggaaaaatgcagacattgtttatcagcttggaccgaatgcctccttctttgatctggaccgaaaaacaggagttttgacagcctccagagtatttgacagagaagaacaagaacgattcatttttacagtaactgccagggacaatgggacccctcccctccaaagccaagcggctgtgattgttactgttctggatgagaatgacaatagccccaagtttactcataatcattttcaattttttgtgtctgagaatctgccaaagtatagtactgtgggggtaatcacagtgacagatgcagatgctggagagaataaagctgtgactctttccattctaaatgacaatgataattttgtgttggatccctattctggagtcataaagtcaaatgtctcatttgatagagagcagcagagttcctacacttttgatgtcaaagccactgatggaggacaaccacctcgttcctctactgcaaaagtaactatcaacgtcatggatgtcaatgacaacagcccagttgtcatttctccaccgtctaatacttcctttaagttggtgcccctctcagccattcctggctccgtggtagcagaagtttttgcagtggatgttgacactggaatgaacgctgaactaaagtatactatagtgagtggaaacaataaaggcttattccggattgatccagtaacaggtaacattactctggaagaaaaaccagcacctactgatgtgggattgcatcgtttggtggtcaacataagtgacctggggtaccctaagtctttgcacacgcttgtgcttgtattcctttatgttaacgacactgctggaaatgcctcctatatctatgacttgatccgcaggactatggagaccccgttggacaggaacataggggatagtagccaaccctatcaaaatgaggactatctaaccatcatgattgccatcatcgccggtgccatggtggtcattgttgtgatcttcgtcaccgttctggtgcgctgtcgccatgcatcaaggttcaaagcagctcagaggagcaagcaaggtgccgaatggatgtccccaaaccaggagaacaagcaaaacaagaaaaagaaaagaaagaaaaggaagtctcccaaaagctctcttttgaactttgttactatcgaagagtccaaacccgatgatgcagttcatgaacctatcaatgggacaataagcctgccggctgaactggaggagcaaagtataggaagatttgactggggcccggcacctccaacaacattcaagcctaacagtcctgacctggccaagcactacaaatctgcttctccacagcctgcttttcatctcaaaccagacactccagtttccgtgaaaaagcaccacgtgattcaggaactccctttggacaacacctttgttgggggttgtgacaccctttctaaacgctcttccactagttcagatcacttcagtgcctcagagtgcagttcccaaggaggcttcaagacaaagggccccttacacaccagacagtgtaactcacacagcaaaagtgacaatattcctgtcactcctcagaaatgtcccagctccacgggtttccacattcaggagaatgaagaaagccattacgagtcgcagcgccgtgttacgtttcatctccctgatggctcccaggaaagctgcagtgacagtggtctaggagaccatgagccggtgggtagtggaaccctgatctcacaccctcttcctctggttcagccacaggacgaattctatgaccaggcctctccggacaagaggactgaagcagatggcaactctgatcccaactctgatgggcctttgggtccccgaggattagctgaagctacagagatgtgcactcaagagtgcttggttttgggtcactctgataattgctggatgcctcctggcttgggtccatatcaacaccccaaatctcctctctcaacctttgcaccccagaaagaatgggtgaagaaggacaagcttgtgaatgggcacaccctgaccagagcctggaaagaagacagcaacaggaaccagttcaatgaccgtaagcagtatggctccaatgaaggccatttcaacaatggcagccacatgacagacattcctctggcaaatctgaagtcttataagcaagcaggaggtgctactgagagtcctaaggagcaccaactctaagaaaaggctatatgggacctaataactttaaatagacatgctaataccgtgtgcgtcagagctttatgtattcaatagatctctacaactatgccccttctagcagggatacctataactttgtgttagcaccatggagaatacaatgtttttgcaacatatgagagaagatagttctagccatgcaattttgtttactagaattgattacactctccagagatctctccattgtgcaaattttttttattattgcattttattttgaccctggactgctgctatgaacaatagaatatgcatttggaaagtaagaaagtttcatggattagagtgactgaaaaacatatccagttagaaaattgtgcttttttttttttttttttttttttttgtcattgatttgtgctgggactgctatacttgacattatactgcaaacaaaacttaaagagataagcattaaacctattgtgctgttaacaacgttagtggacacttgtaagtcaatcagtgttaaagtatttgtaaatagaagcaagctattattaacaacttttgtgtacttataatgttcacctaaaaatgttgtagcataattctgtgttttatggttgcttctgtccttctttttatttacctctttgttgttatttttgttgtttctttcagtgaggtgtttctgtgttagtagtctgtcttgacacacattgttcaaacaatctcaagcacttgtgtttaaaaaaggttctgaaatcttgcttctcatatgatagcttatgatgccggaattctgtaaacaataaagatgaaagaaaaaatgaaaactttatacaaaaaaggacttctgcaaaagcttggaaattcagaacctattttttatcatcttattttcaaagtaggcaaaagcaaaatcacttaattagtaccattaagtgagagagtaatggaaaactgttatccatcaaaagtgatataatatcctgtacttgtcactcatgtaaaactaatgtatcaaaattagcatatatggaagaaaaatcactattcaaaaatagtttcaattgggcaaatgtgtgtctacaactttgttgaaatggcagagtctgtgttgatcctcatatacaataatgttgttgtaacacaagtgttattagaccatagccacaaaatatttaatgtgttgtgccttcatgatgtaacagaacattctccaggtagggtagttgggggaaataaagggataaatctctaattattgctgtttaactgtttgttatcatagttggtcaatgcctggcaggtaccagcatattgtcacttaggtcaaaccaataaagtgacaactaatgttaataagatctcagttgcacgtgcaaacaaatccaaattcgaacattcttaggaggtttttgttaaggcatgacagatgatttaaacaaataaatagcatgcaacaaaatgtctttattgaaagaagtggaagttatcttaatgccacggttcaccatcaatttaaaagtaaaaaaaacaaaaaaaaaacaaaaaatttaaaaaaaaggtttgctaatctgatagttaatttgttcttaccaaaaaataaaattactttgtaaatagcagttcacatttttccacagtataatggaaaataatgggtaggggtgcattgcttattgaagtacatttttgtcggtttgtgaggggtgtttgatgactttgacagaataaatatctaaacaattatccttgttactgctttgccagttctacgttatttacaattattcagctcttgcaataaatgttctgaattcctga

SEQ ID NO: 172093 - DNA, 5072 bp, Homo sapiens
  Payload ID: 13810
  Gene Symbol: PCDH9
  Gene Name: protocadherin 9
  ENST ID: ENST00000456367
  CDS Start-End: 175-3762
gcagcatactgggaaaggggaaaggttgaggcaactaaccggctgtctccaaataagtgatgagatataatgcatcctccagtccatgcacgcttcctcttgcaatttgtgcatcattcctcagtggaaacctttaaaccctaaaatccaggaaaagaaaataaatacattatcatggacctgagggatttttacctgttggctgctctgattgcctgtttaaggctggattccgcaatagctcaagaacttatttacactattagagaggaattgcctgaaaatgtgcccataggaaacataccaaaggatctgaacatttctcacatcaatgctgccacagggaccagcgccagccttgtctacagactggtttctaaagctggggatgcccctttggtgaaagtttccagcagcactggggaaattttcacaacctccaacagaatagacagagaaaaactctgtgctggcgcctcatatgctgaggagaatgagtgtttctttgaacttgaggtggtgatcctccccaatgatttcttcaggctgatcaaaataaaaataattgtcaaggataccaatgataatgcccccatgtttccatctcctgtcatcaatatttccattccagaaaacactttgatcaacagccgctttccaattccatcagcaacagatcctgacacaggcttcaatggtgtacagcattatgaattgttaaatgggcagagtgtttttggactggatatcgtggaaactccagagggagagaagtggccacaactgattgttcagcaaaacttggatagagaacagaaagatacctatgtgatgaaaatcaaagtagaggatggaggcactccacagaaatccagtacggccatactgcaggtcacagtaagtgatgtaaatgacaacaggccagtgtttaaagagggtcaagtggaggtgcatattccagagaatgctcccgtaggtacctctgtaattcagctccatgccactgatgcagatataggcagtaatgctgaaatccggtacatttttggtgcccaggtcgcccctgcaaccaaaagactctttgctttaaataatactactgggctgattacagttcagaggtccttagatagagaggagacagccattcacaaagtgacagtgctggctagtgacggcagctccactcctgctcgagcaacggttaccatcaatgtcaccgatgtaaatgataaccctcctaatatagacctcaggtacattataagtcccatcaatggcaccgtgtatttatctgagaaagatcctgtcaatacaaagattgccctaattacagtttcagataaggacacagatgtgaatggcaaagtgatctgttttattgaaagagaggtcccatttcatttgaaggcggtatatgacaaccaatatttgttagagacctcttctttgttggactatgagggcaccaaagaattcagctttaaaattgttgcctctgattctgggaagcccagtttaaatcagactgccctggtaagggttaagcttgaggatgaaaatgacaacccaccaattttcaaccagcctgtaattgagctgtcagtttctgaaaacaaccgacgtgggttatacttaacaactattagtgccacagatgaagacagtgggaaaaatgcagacattgtttatcagcttggaccgaatgcctccttctttgatctggaccgaaaaacaggagttttgacagcctccagagtatttgacagagaagaacaagaacgattcatttttacagtaactgccagggacaatgggacccctcccctccaaagccaagcggctgtgattgttactgttctggatgagaatgacaatagccccaagtttactcataatcattttcaattttttgtgtctgagaatctgccaaagtatagtactgtgggggtaatcacagtgacagatgcagatgctggagagaataaagctgtgactctttccattctaaatgacaatgataattttgtgttggatccctattctggagtcataaagtcaaatgtctcatttgatagagagcagcagagttcctacacttttgatgtcaaagccactgatggaggacaaccacctcgttcctctactgcaaaagtaactatcaacgtcatggatgtcaatgacaacagcccagttgtcatttctccaccgtctaatacttcctttaagttggtgcccctctcagccattcctggctccgtggtagcagaagtttttgcagtggatgttgacactggaatgaacgctgaactaaagtatactatagtgagtggaaacaataaaggcttattccggattgatccagtaacaggtaacattactctggaagaaaaaccagcacctactgatgtgggattgcatcgtttggtggtcaacataagtgacctggggtaccctaagtctttgcacacgcttgtgcttgtattcctttatgttaacgacactgctggaaatgcctcctatatctatgacttgatccgcaggactatggagaccccgttggacaggaacataggggatagtagccaaccctatcaaaatgaggactatctaaccatcatgattgccatcatcgccggtgccatggtggtcattgttgtgatcttcgtcaccgttctggtgcgctgtcgccatgcatcaaggttcaaagcagctcagaggagcaagcaaggtgccgaatggatgtccccaaaccaggagaacaagcaaaacaagaaaaagaaaagaaagaaaaggaagtctcccaaaagctctcttttgaactttgttactatcgaagagtccaaacccgatgatgcagttcatgaacctatcaatgggacaataagcctgccggctgaactggaggagcaaagtataggaagatttgactggggcccggcacctccaacaacattcaagcctaacagtcctgacctggccaagcactacaaatctgcttctccacagcctgcttttcatctcaaaccagacactccagtttccgtgaaaaagcaccacgtgattcaggaactccctttggacaacacctttgttgggggttgtgacaccctttctaaacgctcttccactagttcagatcacttcagtgcctcagagtgcagttcccaaggaggcttcaagacaaagggccccttacacaccagacagtgtaactcacacagcaaaagtgacaatattcctgtcactcctcagaaatgtcccagctccacgggtttccacattcaggagaatgaagaaagccattacgagccacaggacgaattctatgaccaggcctctccggacaagaggactgaagcagatggcaactctgatcccaactctgatgggcctttgggtccccgaggattagctgaagctacagagatgtgcactcaagagtgcttggttttgggtcactctgataattgctggatgcctcctggcttgggtccatatcaacaccccaaatctcctctctcaacctttgcaccccagaaagaatgggtgaagaaggacaagcttgtgaatgggcacaccctgaccagagcctggaaagaagacagcaacaggaaccagttcaatgaccgtaagcagtatggctccaatgaaggccatttcaacaatggcagccacatgacagacattcctctggcaaatctgaagtcttataagcaagcaggaggtgctactgagagtcctaaggagcaccaactctaagaaaaggctatatgggacctaataactttaaatagacatgctaataccgtgtgcgtcagagctttatgtattcaatagatctctacaactatgccccttctagcagggatacctataactttgtgttagcaccatggagaatacaatgtttttgcaacatatgagagaagatagttctagccatgcaattttgtttactagaattgattacactctccagagatctctccattgtgcaaattttttttattattgcattttattttgaccctggactgctgctatgaacaatagaatatgcatttggaaagtaagaaagtttcatggattagagtgactgaaaaacatatccagttagaaaattgtgcttttttttttttttttttttttttttgtcattgatttgtgctgggactgctatacttgacattatactgcaaacaaaacttaaagagataagcattaaacctattgtgctgttaacaacgttagtggacacttgtaagtcaatcagtgttaaagtatttgtaaatagaagcaagctattattaacaacttttgtgtacttataatgttcacctaaaaatgttgtagcataattctgtgttttatggttgcttctgtccttctttttatttacctctttgttgttatttttgttgtttctttcagtgaggtgtttctgtgttagtagtctgtcttgacacacattgttcaaacaatctcaagcacttgtgtttaaaaaaggttctgaaatcttgcttctcatatgatagcttatgatgccggaattctgtaaacaataaagatgaaagaaaaaatgaaaactttatacaaaaaaggacttctgcaaaagcttggaaattcagaacctattttttatcatcttattttcaaagtaggcaaaagcaaaatcacttaattagtaccattaagtgagagagtaatggaaaactgttatccatcaaaagtgatataatatcctgtacttgtcactcatgtaaaactaatgtatcaaaattagcatatatggaagaaaaatcactattcaaaaatagtttcaattgggcaaatgtgtgtctacaactttgttgaaatggcagagtctgtgttgatcctcatatacaataatgttgttgtaacacaagtgttattagaccatagccacaaaatatttaatgtgttgtgccttcatgatgtaacagaacattctccaggtagggtagttgggggaaataaagggataaatctctaattattgctgtttaactgtttgttatcatagttggtcaatgcctggcaggtaccag

SEQ ID NO: 172094 - DNA, 6234 bp, Homo sapiens
  Payload ID: 13810
  Gene Symbol: PCDH9
  Gene Name: protocadherin 9
  Uniprot ID: Q9HC56
  ENST ID: ENST00000544246
  CDS Start-End: 802-4413
gggctgcggccgcccgcgccgcaagatgcaggccaatcagagcccgggggcggggcctgggcagtcacgccctccctctgggcttattgagagttatatcaagaaattcagttcagagagaggagagggagaaggagagaggggcagaggggaagggagagagggagagcacgcgagacggaaaggagcgcctcagagtctctgaagcacgcaagagataaccgattaggaatttttcgggcaactgtcacccggatagctgtcagagaatcatcatcaccgcaactctgacgtttcctacaagaagttagagacttaagcagtattggcatcggatggaaatggtatgcatgctgctgtggaaaatatccctgagctgaagaagtgcaactatgtgttgtgtgtgctaaatgcccagaagaacccagacccagtgggtaagagagacgaaatgtggagagaatgactaacgacaaatccgtgaatttgttctctggagttgctaatttgccagcccgaagcaacacattttacaaggaggaaacattttgctgcttctgatttctccccaaactggtgctaccagatgcatggctttctatgtgttggaacaaatcattcctaactgcagcatactgggaaaggggaaaggttgaggcaactaaccggctgtctccaaataagtgatgagatataatgcatcctccagtccatgcacgcttcctcttgcaatttgtgcatcattcctcagtggaaacctttaaaccctaaaatccaggaaaagaaaataaatacattatcatggacctgagggatttttacctgttggctgctctgattgcctgtttaaggctggattccgcaatagctcaagaacttatttacactattagagaggaattgcctgaaaatgtgcccataggaaacataccaaaggatctgaacatttctcacatcaatgctgccacagggaccagcgccagccttgtctacagactggtttctaaagctggggatgcccctttggtgaaagtttccagcagcactggggaaattttcacaacctccaacagaatagacagagaaaaactctgtgctggcgcctcatatgctgaggagaatgagtgtttctttgaacttgaggtggtgatcctccccaatgatttcttcaggctgatcaaaataaaaataattgtcaaggataccaatgataatgcccccatgtttccatctcctgtcatcaatatttccattccagaaaacactttgatcaacagccgctttccaattccatcagcaacagatcctgacacaggcttcaatggtgtacagcattatgaattgttaaatgggcagagtgtttttggactggatatcgtggaaactccagagggagagaagtggccacaactgattgttcagcaaaacttggatagagaacagaaagatacctatgtgatgaaaatcaaagtagaggatggaggcactccacagaaatccagtacggccatactgcaggtcacagtaagtgatgtaaatgacaacaggccagtgtttaaagagggtcaagtggaggtgcatattccagagaatgctcccgtaggtacctctgtaattcagctccatgccactgatgcagatataggcagtaatgctgaaatccggtacatttttggtgcccaggtcgcccctgcaaccaaaagactctttgctttaaataatactactgggctgattacagttcagaggtccttagatagagaggagacagccattcacaaagtgacagtgctggctagtgacggcagctccactcctgctcgagcaacggttaccatcaatgtcaccgatgtaaatgataaccctcctaatatagacctcaggtacattataagtcccatcaatggcaccgtgtatttatctgagaaagatcctgtcaatacaaagattgccctaattacagtttcagataaggacacagatgtgaatggcaaagtgatctgttttattgaaagagaggtcccatttcatttgaaggcggtatatgacaaccaatatttgttagagacctcttctttgttggactatgagggcaccaaagaattcagctttaaaattgttgcctctgattctgggaagcccagtttaaatcagactgccctggtaagggttaagcttgaggatgaaaatgacaacccaccaattttcaaccagcctgtaattgagctgtcagtttctgaaaacaaccgacgtgggttatacttaacaactattagtgccacagatgaagacagtgggaaaaatgcagacattgtttatcagcttggaccgaatgcctccttctttgatctggaccgaaaaacaggagttttgacagcctccagagtatttgacagagaagaacaagaacgattcatttttacagtaactgccagggacaatgggacccctcccctccaaagccaagcggctgtgattgttactgttctggatgagaatgacaatagccccaagtttactcataatcattttcaattttttgtgtctgagaatctgccaaagtatagtactgtgggggtaatcacagtgacagatgcagatgctggagagaataaagctgtgactctttccattctaaatgacaatgataattttgtgttggatccctattctggagtcataaagtcaaatgtctcatttgatagagagcagcagagttcctacacttttgatgtcaaagccactgatggaggacaaccacctcgttcctctactgcaaaagtaactatcaacgtcatggatgtcaatgacaacagcccagttgtcatttctccaccgtctaatacttcctttaagttggtgcccctctcagccattcctggctccgtggtagcagaagtttttgcagtggatgttgacactggaatgaacgctgaactaaagtatactatagtgagtggaaacaataaaggcttattccggattgatccagtaacaggtaacattactctggaagaaaaaccagcacctactgatgtgggattgcatcgtttggtggtcaacataagtgacctggggtaccctaagtctttgcacacgcttgtgcttgtattcctttatgttaacgacactgctggaaatgcctcctatatctatgacttgatccgcaggactatggagaccccgttggacaggaacataggggatagtagccaaccctatcaaaatgaggactatctaaccatcatgattgccatcatcgccggtgccatggtggtcattgttgtgatcttcgtcaccgttctggtgcgctgtcgccatgcatcaaggttcaaagcagctcagaggagcaagcaaggtgccgaatggatgtccccaaaccaggagaacaagcaaaacaagaaaaagaaaagaaagaaaaggaagtctcccaaaagctctcttttgaactttgttactatcgaagagtccaaacccgatgatgcagttcatgaacctatcaatgggacaataagcctgccggctgaactggaggagcaaagtataggaagatttgactggggcccggcacctccaacaacattcaagcctaacagtcctgacctggccaagcactacaaatctgcttctccacagcctgcttttcatctcaaaccagacactccagtttccgtgaaaaagcaccacgtgattcaggaactccctttggacaacacctttgttgggggttgtgacaccctttctaaacgctcttccactagttcagatcacttcagtgcctcagagtgcagttcccaaggaggcttcaagacaaagggccccttacacaccagacagtcgcagcgccgtgttacgtttcatctccctgatggctcccaggaaagctgcagtgacagtggtctaggagaccatgagccggtgggtagtggaaccctgatctcacaccctcttcctctggttcagccacaggacgaattctatgaccaggcctctccggacaagaggactgaagcagatggcaactctgatcccaactctgatgggcctttgggtccccgaggattagctgaagctacagagatgtgcactcaagagtgcttggttttgggtcactctgataattgctggatgcctcctggcttgggtccatatcaacaccccaaatctcctctctcaacctttgcaccccagaaagaatgggtgaagaaggacaagcttgtgaatgggcacaccctgaccagagcctggaaagaagacagcaacaggaaccagttcaatgaccgtaagcagtatggctccaatgaaggccatttcaacaatggcagccacatgacagacattcctctggcaaatctgaagtcttataagcaagcaggaggtgctactgagagtcctaaggagcaccaactctaagaaaaggctatatgggacctaataactttaaatagacatgctaataccgtgtgcgtcagagctttatgtattcaatagatctctacaactatgccccttctagcagggatacctataactttgtgttagcaccatggagaatacaatgtttttgcaacatatgagagaagatagttctagccatgcaattttgtttactagaattgattacactctccagagatctctccattgtgcaaattttttttattattgcattttattttgaccctggactgctgctatgaacaatagaatatgcatttggaaagtaagaaagtttcatggattagagtgactgaaaaacatatccagttagaaaattgtgcttttttttttttttttttttttttttgtcattgatttgtgctgggactgctatacttgacattatactgcaaacaaaacttaaagagataagcattaaacctattgtgctgttaacaacgttagtggacacttgtaagtcaatcagtgttaaagtatttgtaaatagaagcaagctattattaacaacttttgtgtacttataatgttcacctaaaaatgttgtagcataattctgtgttttatggttgcttctgtccttctttttatttacctctttgttgttatttttgttgtttctttcagtgaggtgtttctgtgttagtagtctgtcttgacacacattgttcaaacaatctcaagcacttgtgtttaaaaaaggttctgaaatcttgcttctcatatgatagcttatgatgccggaattctgtaaacaataaagatgaaagaaaaaatgaaaactttatacaaaaaaggacttctgcaaaagcttggaaattcagaacctattttttatcatcttattttcaaagtaggcaaaagcaaaatcacttaattagtaccattaagtgagagagtaatggaaaactgttatccatcaaaagtgatataatatcctgtacttgtcactcatgtaaaactaatgtatcaaaattagcatatatggaagaaaaatcactattcaaaaatagtttcaattgggcaaatgtgtgtctacaactttgttgaaatggcagagtctgtgttgatcctcatatacaataatgttgttgtaacacaagtgttattagaccatagccacaaaatatttaatgtgttgtgccttcatgatgtaacagaacattctccaggtagggtagttgggggaaataaagggataaatctctaattattgctgtttaactgtttgttatcatagttggtcaatgcctggcaggtaccagcatattgtcacttaggtcaaaccaataaagtgacaactaatgttaataagatctcagttgcacgtgcaaacaaatccaaattcgaacattcttaggaggtttttgttaaggcatgacagatgatttaaacaaataaatagcatgcaacaaaatgtctttattgaaagaagtggaagttatcttaatgccacggttcaccatcaatttaaaagtaaaaaaaacaaaaaaaaaacaaaaaatttaaaaaaaaggtttgctaatctgatagttaatttgttcttaccaaaaaataaaattactttgtaaatagcagttcacatttttccacagtataatggaaaataatgggtaggggtgcattgcttattgaagtacatttttgtcggtttgtgaggggtgtttgatgactttgacagaataaatatctaaacaattatccttgttactgctttgccagttctacgttatttacaattattcagctcttgcaataaatgttctgaattcctga

SEQ ID NO: 172095 - DNA, 461 bp, Homo sapiens
  Payload ID: 13810
  Gene Symbol: PCDH9
  Gene Name: protocadherin 9
  ENST ID: ENST00000614931
  CDS Start-End: 1-135
tgtaactcacacagcaaaagtgacaatattcctgtcactcctcagaaatgtcccagctccacgggtttccacattcaggagaatgaagaaagccattacgagggcacactcccttacttgagatattctctctgaataaactccagaccaatgctgtaaaatagaattgtaatatgagccacaaattcgcagcgccgtgttacgtttcatctccctgatggctcccaggaaagctgcagtgacagtggtctaggagaccatgagccggtgggtagtggaaccctgatctcacaccctcttcctctggttcagccacaggacgaattctatgaccaggcctctccggacaagaggactgaagcagatggcaactctgatcccaactctgatgggcctttgggtccccgaggattagctgaagctacagagatgtgcactcaagagtgcttggttttgggtca

SEQ ID NO: 172096 - DNA, 2726 bp, Homo sapiens
  Payload ID: 13811
  Gene Symbol: PCDHA1
  Gene Name: protocadherin alpha 1
  Uniprot ID: Q9Y5I3
  ENST ID: ENST00000378133
  CDS Start-End: 156-2579
agctactgatcactaaaagtgaaggaggaagctccattttgtcaccgcctgagagaagacagaaacggtaaagagataaatgattggaaatattagataaaatggcatgattttgaagtaagaggagagcataagaaaggtgtagtccttttgcaatggtgttttctaggagagggggcctgggagcccgggatctgcttctttggcttctgctcctcgcagcctgggaggtggggagcggccagctccactactcgatcccggaggaagccaaacacggcaccttcgttggccgcgttgctcaggacctgggactggagctggcggagctggtgcctcgcctgttccgggtggcgtccaaaacacacagggaccttctggaggtaaatctgcagaatggcattttgtttgtgaattctcggatcgatcgcgaggagctgtgccagtggagcgcggagtgcagcatccacctggagttgatcgccgacaggccgctgcaggttttccatgtggaggtgaaggtgaaagacattaacgataatccacccgtcttcaggggcagagaacaaataatatttattcctgaatctagactcctgaattcgcgttttccgatagaaggagctgctgatgcagacattggtgctaacgctcttctaacgtacacgctcagcccgagtgattatttctctttggatgtagaggcaagtgatgaactgagtaaatctctttggcttgaattgagaaaatatttggatagagaagaaacaccagaacttcacttattactgactgccactgatgggggcaaaccggagctgcaaggtacagttgagctgctgatcaccgtcctcgacgttaatgataacgccccactgtttgaccaggccgtatacagagtccacttgttagagactacagcaaatggaacattagtgaccacattaaatgcctctgatgctgacgaaggtgtaaatggtgaagtcgtcttttcctttgacagtggtatttctcgtgacattcaagaaaaattcaaagttgattccagctcaggagaaattaggttaattgataaactggattatgaagaaacaaaatcctacgaaattcaagtaaaggcagttgataaaggaagtcctccgatgtcaaatcactgtaaggttttggtgaaagtgctggatgtaaatgataatgctccagaactggcggtcacttcattgtatttgcctatcagagaggacgctccactcagcaccgtcatcgccctcatcaccgtgtctgaccgtgactcaggtgccaacgggcaggtgacttgctccttaatgccccacgtccccttcaagctggtgtccaccttcaagaattactactcgttggtgttggacagcgccctggatcgcgagagcctgtcggtctatgagctggtggtgaccgcgcgggacgggggctcgccttcgctgtgggccacggccagggtgtccgtggaggtggccgacgtgaatgacaacgcgcctgcgttcgcgcagcccgagtacacagtattcgtgaaggagaacaacccgccgggctgccacatcttcacggtgtctgcgcgggacgcggacgcgcaggagaacgcgctggtgtcctattcgctggtggaacggcgggtgggcgagcgcgcgctgtcgaactacgtgtcagtgcacgcggagagcggcaaggtgtacgcactgcagcccctggaccacgaggagctggagctgctgcagttccaggtgagcgcgcgggatgcgggcgtgccgcctctgggcagcaacgtgacgctgcaggtgttcgtgctggacgagaacgacaacgcgccggcgctgctggcgcctcgagtgggtggcactattggtgcagtcagtgagctggtgccgcgattggtgggtgcgggtcatgtggtggcgaaggtgcgcgcagtggacgccgactcgggctacaacgcgtggctgtcctatgaactgcagccggcagcaggcggcgcgcgcatcccgttccgcgtggggctgtacacgggcgagatcagcacgactcgtgtcctggacgaggctgacttgtcgcgctaccgccttctggtgctagtgaaggatcacggtgagccggcgctgacagccacggccactgtgcttgtatctctggtggagagcggccaggcgccaaaggcgtcttcgcgggcgtcggtgggtgtcgcgggcccagaggcggcgctggtggatgtcaacgtgtacctgatcatcgccatctgcgcggtgtccagcctgctggtgctcacactgctgctgtacacggcgctgcggtgctcagtgccgcccactgagggtgcgtatgtgccgggcaagcccactctggtgtgctccagcgcgttggggagctggtcgaactcacagcagaggcggcagagggtgtgctctagcgagggcccacccaagaccgacctcatggccttcagcccaggcctatctccaagtcttaacacgtcagaaagaaatgaacaaccagaagcaaatttggatctttctggtaatgtaagtccaactttcgagttttggctttaaatatttttcatatttaacttgtctaatcatcttttcaaatatcactttaaaaaatgtcttcaaggtgttcactaacgttgaaataaatcataccattgaatgtagatatcctattaatggcagttttgtcttgaatggaactagaaa

SEQ ID NO: 172097 - DNA, 2204 bp, Homo sapiens
  Payload ID: 13811
  Gene Symbol: PCDHA1
  Gene Name: protocadherin alpha 1
  Uniprot ID: Q9Y5I3
  ENST ID: ENST00000394633
  CDS Start-End: 1-2061
atggtgttttctaggagagggggcctgggagcccgggatctgcttctttggcttctgctcctcgcagcctgggaggtggggagcggccagctccactactcgatcccggaggaagccaaacacggcaccttcgttggccgcgttgctcaggacctgggactggagctggcggagctggtgcctcgcctgttccgggtggcgtccaaaacacacagggaccttctggaggtaaatctgcagaatggcattttgtttgtgaattctcggatcgatcgcgaggagctgtgccagtggagcgcggagtgcagcatccacctggagttgatcgccgacaggccgctgcaggttttccatgtggaggtgaaggtgaaagacattaacgataatccacccgtcttcaggggcagagaacaaataatatttattcctgaatctagactcctgaattcgcgttttccgatagaaggagctgctgatgcagacattggtgctaacgctcttctaacgtacacgctcagcccgagtgattatttctctttggatgtagaggcaagtgatgaactgagtaaatctctttggcttgaattgagaaaatatttggatagagaagaaacaccagaacttcacttattactgactgccactgatgggggcaaaccggagctgcaaggtacagttgagctgctgatcaccgtcctcgacgttaatgataacgccccactgtttgaccaggccgtatacagagtccacttgttagagactacagcaaatggaacattagtgaccacattaaatgcctctgatgctgacgaaggtgtaaatggtgaagtcgtcttttcctttgacagtggtatttctcgtgacattcaagaaaaattcaaagttgattccagctcaggagaaattaggttaattgataaactggattatgaagaaacaaaatcctacgaaattcaagtaaaggcagttgataaaggaagtcctccgatgtcaaatcactgtaaggttttggtgaaagtgctggatgtaaatgataatgctccagaactggcggtcacttcattgtatttgcctatcagagaggacgctccactcagcaccgtcatcgccctcatcaccgtgtctgaccgtgactcaggtgccaacgggcaggtgacttgctccttaatgccccacgtccccttcaagctggtgtccaccttcaagaattactactcgttggtgttggacagcgccctggatcgcgagagcctgtcggtctatgagctggtggtgaccgcgcgggacgggggctcgccttcgctgtgggccacggccagggtgtccgtggaggtggccgacgtgaatgacaacgcgcctgcgttcgcgcagcccgagtacacagtattcgtgaaggagaacaacccgccgggctgccacatcttcacggtgtctgcgcgggacgcggacgcgcaggagaacgcgctggtgtcctattcgctggtggaacggcgggtgggcgagcgcgcgctgtcgaactacgtgtcagtgcacgcggagagcggcaaggtgtacgcactgcagcccctggaccacgaggagctggagctgctgcagttccagccacgacagcccaaccctgactggcgttactctgcctccctgagagcaggcatgcacagctctgtgcacctagaggaggctggcattctacgggctggtccaggagggcctgatcagcagtggccaacagtatccagtgcaacaccagaaccagaggcaggagaagtgtcccctccagtcggtgcgggtgtcaacagcaacagctggacctttaaatacggaccaggcaaccccaaacaatccggtcccggtgagttgcccgacaaattcattatcccaggatctcctgcaatcatctccatccggcaggagcctactaacagccaaattgacaaaagtgacttcataaccttcggcaaaaaggaggagaccaagaaaaagaagaaaaagaagaagggtaacaagacccaggagaaaaaagagaaagggaacagcacgactgacaacagtgaccagtgaggtcctcaaatggaaacaagccacttagccagtttttgtaataatggcaaatctctcccatgtagcaattccctgctcctttttcctatctacatgagccctcttagagacctcagaaatctgcagaaagttccctgtgtctg

SEQ ID NO: 172098 - DNA, 5263 bp, Homo sapiens
  Payload ID: 13811
  Gene Symbol: PCDHA1
  Gene Name: protocadherin alpha 1
  Uniprot ID: Q9Y5I3
  ENST ID: ENST00000504120
  CDS Start-End: 1-2853
atggtgttttctaggagagggggcctgggagcccgggatctgcttctttggcttctgctcctcgcagcctgggaggtggggagcggccagctccactactcgatcccggaggaagccaaacacggcaccttcgttggccgcgttgctcaggacctgggactggagctggcggagctggtgcctcgcctgttccgggtggcgtccaaaacacacagggaccttctggaggtaaatctgcagaatggcattttgtttgtgaattctcggatcgatcgcgaggagctgtgccagtggagcgcggagtgcagcatccacctggagttgatcgccgacaggccgctgcaggttttccatgtggaggtgaaggtgaaagacattaacgataatccacccgtcttcaggggcagagaacaaataatatttattcctgaatctagactcctgaattcgcgttttccgatagaaggagctgctgatgcagacattggtgctaacgctcttctaacgtacacgctcagcccgagtgattatttctctttggatgtagaggcaagtgatgaactgagtaaatctctttggcttgaattgagaaaatatttggatagagaagaaacaccagaacttcacttattactgactgccactgatgggggcaaaccggagctgcaaggtacagttgagctgctgatcaccgtcctcgacgttaatgataacgccccactgtttgaccaggccgtatacagagtccacttgttagagactacagcaaatggaacattagtgaccacattaaatgcctctgatgctgacgaaggtgtaaatggtgaagtcgtcttttcctttgacagtggtatttctcgtgacattcaagaaaaattcaaagttgattccagctcaggagaaattaggttaattgataaactggattatgaagaaacaaaatcctacgaaattcaagtaaaggcagttgataaaggaagtcctccgatgtcaaatcactgtaaggttttggtgaaagtgctggatgtaaatgataatgctccagaactggcggtcacttcattgtatttgcctatcagagaggacgctccactcagcaccgtcatcgccctcatcaccgtgtctgaccgtgactcaggtgccaacgggcaggtgacttgctccttaatgccccacgtccccttcaagctggtgtccaccttcaagaattactactcgttggtgttggacagcgccctggatcgcgagagcctgtcggtctatgagctggtggtgaccgcgcgggacgggggctcgccttcgctgtgggccacggccagggtgtccgtggaggtggccgacgtgaatgacaacgcgcctgcgttcgcgcagcccgagtacacagtattcgtgaaggagaacaacccgccgggctgccacatcttcacggtgtctgcgcgggacgcggacgcgcaggagaacgcgctggtgtcctattcgctggtggaacggcgggtgggcgagcgcgcgctgtcgaactacgtgtcagtgcacgcggagagcggcaaggtgtacgcactgcagcccctggaccacgaggagctggagctgctgcagttccaggtgagcgcgcgggatgcgggcgtgccgcctctgggcagcaacgtgacgctgcaggtgttcgtgctggacgagaacgacaacgcgccggcgctgctggcgcctcgagtgggtggcactattggtgcagtcagtgagctggtgccgcgattggtgggtgcgggtcatgtggtggcgaaggtgcgcgcagtggacgccgactcgggctacaacgcgtggctgtcctatgaactgcagccggcagcaggcggcgcgcgcatcccgttccgcgtggggctgtacacgggcgagatcagcacgactcgtgtcctggacgaggctgacttgtcgcgctaccgccttctggtgctagtgaaggatcacggtgagccggcgctgacagccacggccactgtgcttgtatctctggtggagagcggccaggcgccaaaggcgtcttcgcgggcgtcggtgggtgtcgcgggcccagaggcggcgctggtggatgtcaacgtgtacctgatcatcgccatctgcgcggtgtccagcctgctggtgctcacactgctgctgtacacggcgctgcggtgctcagtgccgcccactgagggtgcgtatgtgccgggcaagcccactctggtgtgctccagcgcgttggggagctggtcgaactcacagcagaggcggcagagggtgtgctctagcgagggcccacccaagaccgacctcatggccttcagcccaggcctatctccaagtcttaacacgtcagaaagaaatgaacaaccagaagcaaatttggatctttctggtaatccacgacagcccaaccctgactggcgttactctgcctccctgagagcaggcatgcacagctctgtgcacctagaggaggctggcattctacgggctggtccaggagggcctgatcagcagtggccaacagtatccagtgcaacaccagaaccagaggcaggagaagtgtcccctccagtcggtgcgggtgtcaacagcaacagctggacctttaaatacggaccaggcaaccccaaacaatccggtcccggtgagttgcccgacaaattcattatcccaggatctcctgcaatcatctccatccggcaggagcctactaacagccaaattgacaaaagtgacttcataaccttcggcaaaaaggaggagaccaagaaaaagaagaaaaagaagaagggtaacaagacccaggagaaaaaagagaaagggaacagcacgactgacaacagtgaccagtgaggtcctcaaatggaaacaagccacttagccagtttttgtaataatggcaaatctctcccatgtagcaattccctgctcctttttcctatctacatgagccctcttagagacctcagaaatctgcagaaagttccctgtgtctgtctagaacgcatttaacaggttttgtcgtaaaagctttactaagtctggtgttaactctttctctccactctggcttgttttcagaacctaaaaagcagacccaagtttcctttctcctccgccgcaaaggagaggcttcccagccccgccagtgagaggttggactctctgccctgtgctccggggatcctgtcttgatgacacttgcagggcaggctgaaaagttttgagattgagcagcttgggagtttgtggccactgggtatgtgtggctaccgcgggtatgcgagtgccagatattggctgagacgagccagcttagactaattggtacaaggaaggcaagaaaacaaagacaaataaacagcggaagttatcagtatggaggggaagtgtaaacttaaagggaccagactttctaaatcttacaactcaagaggtggcagccaccctctaggagacaaaactacccccactgacaaggctttaggagaccctaaagtctgttggctgtgacgtcattatacctaaaatctgcatcatacctgcaagccaacagttcagtgttttaacagagaaccaccctgggaaacagaagcagatctgatgtgtttcctatacatgtcctgtgctcactttattaaaaattcttttgcacacaatgtttatgaaaaggccagatccttttccaatacttatgcaaaagcaaaagaaaaccccgacacctcacctttcgctgtttgttgtttcatagatttatttaaaaaaagagaaagtctatagctataaatctttaaagagaaatatgaatacaattcccctaaactctcctcaaaagagaattcagtctacagccatttaaatgatcattgctgctacagaagtgctttaagagaattgcctgaaacatctgtattatatcggccacctgccaatcacagctttactctttcaggtcactctggggctgcctcttgcatgtattactaaataaaatgatctctctttctctctctctctctcttttctaagaaacaattatgtgcactttgatacacaaccttctctaaccaactatatatcaagacccaaaaattgaagaaaaatattgttttctcatacagtgagcagatttttcaatctactaattctgtgacttgtcttggtgtgctagcctacaccttctctttggtttagttttccttttctataacactctgaattgctaatcttactaacacctatgatgttacctgaaatcaatctcccatatgtatgctgtatgctatgctaagactcctgaaatatacttactctgtgcttgtgtatgtgaatgttaatgcaactattacctagagtgaactttaagctttattgttgaatgtaattccattatatttccttttgtacacctgtgaaaaagtggagtagtgtttttttaaccattgttaatcagcttttgtgtatgaaagacacagtaaaatttctttcttaaatcaagatactggtgattcaaggaattttatttatggtccagccaagagccatctcgtgccaagacttctgctggcaagggaatggataaagctgttttgttctagtaacaattttggaatgaatactgacaatattccatgagggtgtgcaagcacaaattttaccaatctgacctctttgaagttgcagaatgctttgaaattctaatggtatctgaaatatcagctcatagaaagtaacaaaatttgctgtcaccttaaataagacattttaattttgttataatgtacaatttagaagtttgattaattatattatctatttaggcattaatataaaagaggtaggagtctgttatttaaaaaaagcattaaatttaaaaaaaaactgtcttgtctacttttagcttcattctcccatattttgaagggtgtgtaacttcagctctgcaggattgcatggggtaaaacttgttaccaacacatgtgaaccattgctacattgtaggttgtgatcattttgccccactgaagcccatgtatctgaccttacgtgccttttgaactaggagaatcgggctaatttattaatgatgataattataatgtatctgtacagcactttttacatttgcgaagtgctttccaatccatgttagttactagttattacagctgtaaggataaaacacgtcatgtggattcattttgaattggtgctattggtatttcctctgttattgctaataaatgaaaatggtggtatgaaa

SEQ ID NO: 172099 - DNA, 5254 bp, Homo sapiens
  Payload ID: 13812
  Gene Symbol: PCDHA10
  Gene Name: protocadherin alpha 10
  Uniprot ID: Q9Y5I2
  ENST ID: ENST00000307360
  CDS Start-End: 1-2847
atggtttccagatgtagctgcctgggggtccagtgtctgctgctctcgcttcttctcctcgcagcctgggaggtggggagcggccagctccactactcagtctacgaggaggccagacacggcaccttcgtgggccgcatcgcgcaggacctggggctggagctggcggagctggtgcagcgcctgttccgggtggcgtccaaaagacacggggaccttctggaggtaaatctgcagaatggcattttgtttgtgaattctcggattgaccgcgaggagctgtgcgggcggagcgtggagtgcagcatccacctggaggtgatcgtggacaggccgctgcaggttttccatgtggacgtggaagtgaaggacattaacgacaacccgcccaggttctccgtaacagaacaaaagctctcaatacctgaatccagactgcttgactctcgatttccactagaaggcgcatctgatgcggatgttggagagaacgcattgcttacttacaaactcagtccaaatgagtattttgttcttgatattataaacaaaaaagacaaagacaaattcccagtgcttgttctgcggaagctgctggatcgtgaagaaaatcctcagctaaagttgttgttgacagcaactgatggaggcaaacctgaatttaccggatctgtttctctgctgatcctggtgttagatgccaatgataacgcccctatctttgacagaccggtttatgaagttaagatgtatgaaaatcaagtgaaccaaacattagtaatacggctcaacgcttctgattcggatgaaggaataaacaaggaaatgatgtattcatttagctctttggtcccacccacgataagaaggaaattttggataaacgaaaggacgggagaaataaaagtaaatgatgctattgactttgaggacagtaacacttatgaaattcatgtagatgttacagataagggaaacccacctatggttggtcactgcacggtcctagtggaactactggatgaaaatgataattcacctgaggtgattgtcacttctctgtctctcccagtgaaagaagatgctcaagtgggcaccgtcattgccctaatcagcgtttctgaccatgattcaggagccaacggacaggtcacctgctctctgacgcctcacgttccgttcaagctggtgtccacctacaagaattactactcattggtgctggacagcgctctggaccgcgagagggtgtcggcctatgagctggtggtgaccgcgcgggacgggggctcgcctccgctgtgggccacggccagcgtgtctgtggaggtggccgacgtgaacgacaacgcgcctgcgttcgcgcagtccgagtacacggtgttcgtgaaggagaacaacccgccaggctgccacatcttcacggtgtctgcgtgggacgcggacgcgcaggagaacgccctggtgtcctactctctggtggagcggcggttgggcgagcgctcgctgtcgagctacgtgtcggtgcacgcggagagcggcaaggtgtacgcgctgcagccgctggaccacgaggagctggagctgctacagttccaggtgagcgcgcgcgatgggggcgtgccgcctctgggcagcaacttgacgctgcaggtgttcgtgctggacgagaacgacaacgctcccgcgctgctggcgtctcccgctggcagcgcgggcggtgcagtcagtgagctggtgctgcggtcggtggttgcgggtcacgtggtggctaaggtgcgcgcagtggacgctgactctggatacaacgcgtggctgtcgtatgaattgcagtcggcggcggttggtgcacgcatcccgtttcgcgtggggctgtacacgggcgagatcagtacgacgcgcgctctggatgagactgactcgccacgccagcgcctactggtgctggtgaaggaccatggcgagccgtcgctgacggccacggccactgtgcttgtgtcgcttgtggagggcagccaggcacccaaggcctcgtcgcgggcttcagtgggcgtggcgcccgaggtggccctggtggatgtcaacgtgtacctgatcatcgccatctgcgcggtgtccagcttgctggtgctcacgctgctgctgtacactgcactgaggtgctcggcggcgcccaccgagggcgcatgtgggccggtgaagcccacgctggtgtgctctagcgcggtggggagctggtcttactcgcagcagaggcggcagagggtgtgttctggggagggcctgcccaaggcggacctcatggccttcagccccagccttccaccatgcccaatggtagatgtggacggggaagatcagtctattggaggggaccactctaggaagccacgacagcccaaccctgactggcgttactctgcctccctgagagcaggcatgcacagctctgtgcacctagaggaggctggcattctacgggctggtccaggagggcctgatcagcagtggccaacagtatccagtgcaacaccagaaccagaggcaggagaagtgtcccctccagtcggtgcgggtgtcaacagcaacagctggacctttaaatacggaccaggcaaccccaaacaatccggtcccggtgagttgcccgacaaattcattatcccaggatctcctgcaatcatctccatccggcaggagcctactaacagccaaattgacaaaagtgacttcataaccttcggcaaaaaggaggagaccaagaaaaagaagaaaaagaagaagggtaacaagacccaggagaaaaaagagaaagggaacagcacgactgacaacagtgaccagtgaggtcctcaaatggaaacaagccacttagccagtttttgtaataatggcaaatctctcccatgtagcaattccctgctcctttttcctatctacatgagccctcttagagacctcagaaatctgcagaaagttccctgtgtctgtctagaacgcatttaacaggttttgtcgtaaaagctttactaagtctggtgttaactctttctctccactctggcttgttttcagaacctaaaaagcagacccaagtttcctttctcctccgccgcaaaggagaggcttcccagccccgccagtgagaggttggactctctgccctgtgctccggggatcctgtcttgatgacacttgcagggcaggctgaaaagttttgagattgagcagcttgggagtttgtggccactgggtatgtgtggctaccgcgggtatgcgagtgccagatattggctgagacgagccagcttagactaattggtacaaggaaggcaagaaaacaaagacaaataaacagcggaagttatcagtatggaggggaagtgtaaacttaaagggaccagactttctaaatcttacaactcaagaggtggcagccaccctctaggagacaaaactacccccactgacaaggctttaggagaccctaaagtctgttggctgtgacgtcattatacctaaaatctgcatcatacctgcaagccaacagttcagtgttttaacagagaaccaccctgggaaacagaagcagatctgatgtgtttcctatacatgtcctgtgctcactttattaaaaattcttttgcacacaatgtttatgaaaaggccagatccttttccaatacttatgcaaaagcaaaagaaaaccccgacacctcacctttcgctgtttgttgtttcatagatttatttaaaaaaagagaaagtctatagctataaatctttaaagagaaatatgaatacaattcccctaaactctcctcaaaagagaattcagtctacagccatttaaatgatcattgctgctacagaagtgctttaagagaattgcctgaaacatctgtattatatcggccacctgccaatcacagctttactctttcaggtcactctggggctgcctcttgcatgtattactaaataaaatgatctctctttctctctctctctctcttttctaagaaacaattatgtgcactttgatacacaaccttctctaaccaactatatatcaagacccaaaaattgaagaaaaatattgttttctcatacagtgagcagatttttcaatctactaattctgtgacttgtcttggtgtgctagcctacaccttctctttggtttagttttccttttctataacactctgaattgctaatcttactaacacctatgatgttacctgaaatcaatctcccatatgtatgctgtatgctatgctaagactcctgaaatatacttactctgtgcttgtgtatgtgaatgttaatgcaactattacctagagtgaactttaagctttattgttgaatgtaattccattatatttccttttgtacacctgtgaaaaagtggagtagtgtttttttaaccattgttaatcagcttttgtgtatgaaagacacagtaaaatttctttcttaaatcaagatactggtgattcaaggaattttatttatggtccagccaagagccatctcgtgccaagacttctgctggcaagggaatggataaagctgttttgttctagtaacaattttggaatgaatactgacaatattccatgagggtgtgcaagcacaaattttaccaatctgacctctttgaagttgcagaatgctttgaaattctaatggtatctgaaatatcagctcatagaaagtaacaaaatttgctgtcaccttaaataagacattttaattttgttataatgtacaatttagaagtttgattaattatattatctatttaggcattaatataaaagaggtaggagtctgttatttaaaaaaagcattaaatttaaaaaaaaactgtcttgtctacttttagcttcattctcccatattttgaagggtgtgtaacttcagctctgcaggattgcatggggtaaaacttgttaccaacacatgtgaaccattgctacattgtaggttgtgatcattttgccccactgaagcccatgtatctgaccttacgtgccttttgaactaggagaatcgggctaatttattaatgatgataattataatgtatctgtacagcactttttacatttgcgaagtgctttccaatccatgttagttactagttattacagctgtaaggataaaacacgtcatgtggattcattttgaattggtgctattggtatttcctctgttattgctaataaatgaaaatggtggtatg

SEQ ID NO: 172100 - DNA, 3788 bp, Homo sapiens
  Payload ID: 13812
  Gene Symbol: PCDHA10
  Gene Name: protocadherin alpha 10
  Uniprot ID: Q9Y5I2
  ENST ID: ENST00000506939
  CDS Start-End: 40-2097
ccgctgattcgtcgatttgtaaaacaagagaaggataagatggtttccagatgtagctgcctgggggtccagtgtctgctgctctcgcttcttctcctcgcagcctgggaggtggggagcggccagctccactactcagtctacgaggaggccagacacggcaccttcgtgggccgcatcgcgcaggacctggggctggagctggcggagctggtgcagcgcctgttccgggtggcgtccaaaagacacggggaccttctggaggtaaatctgcagaatggcattttgtttgtgaattctcggattgaccgcgaggagctgtgcgggcggagcgtggagtgcagcatccacctggaggtgatcgtggacaggccgctgcaggttttccatgtggacgtggaagtgaaggacattaacgacaacccgcccaggttctccgtaacagaacaaaagctctcaatacctgaatccagactgcttgactctcgatttccactagaaggcgcatctgatgcggatgttggagagaacgcattgcttacttacaaactcagtccaaatgagtattttgttcttgatattataaacaaaaaagacaaagacaaattcccagtgcttgttctgcggaagctgctggatcgtgaagaaaatcctcagctaaagttgttgttgacagcaactgatggaggcaaacctgaatttaccggatctgtttctctgctgatcctggtgttagatgccaatgataacgcccctatctttgacagaccggtttatgaagttaagatgtatgaaaatcaagtgaaccaaacattagtaatacggctcaacgcttctgattcggatgaaggaataaacaaggaaatgatgtattcatttagctctttggtcccacccacgataagaaggaaattttggataaacgaaaggacgggagaaataaaagtaaatgatgctattgactttgaggacagtaacacttatgaaattcatgtagatgttacagataagggaaacccacctatggttggtcactgcacggtcctagtggaactactggatgaaaatgataattcacctgaggtgattgtcacttctctgtctctcccagtgaaagaagatgctcaagtgggcaccgtcattgccctaatcagcgtttctgaccatgattcaggagccaacggacaggtcacctgctctctgacgcctcacgttccgttcaagctggtgtccacctacaagaattactactcattggtgctggacagcgctctggaccgcgagagggtgtcggcctatgagctggtggtgaccgcgcgggacgggggctcgcctccgctgtgggccacggccagcgtgtctgtggaggtggccgacgtgaacgacaacgcgcctgcgttcgcgcagtccgagtacacggtgttcgtgaaggagaacaacccgccaggctgccacatcttcacggtgtctgcgtgggacgcggacgcgcaggagaacgccctggtgtcctactctctggtggagcggcggttgggcgagcgctcgctgtcgagctacgtgtcggtgcacgcggagagcggcaaggtgtacgcgctgcagccgctggaccacgaggagctggagctgctacagttccagccacgacagcccaaccctgactggcgttactctgcctccctgagagcaggcatgcacagctctgtgcacctagaggaggctggcattctacgggctggtccaggagggcctgatcagcagtggccaacagtatccagtgcaacaccagaaccagaggcaggagaagtgtcccctccagtcggtgcgggtgtcaacagcaacagctggacctttaaatacggaccaggcaaccccaaacaatccggtcccggtgagttgcccgacaaattcattatcccaggatctcctgcaatcatctccatccggcaggagcctactaacagccaaattgacaaaagtgacttcataaccttcggcaaaaaggaggagaccaagaaaaagaagaaaaagaagaagggtaacaagacccaggagaaaaaagagaaagggaacagcacgactgacaacagtgaccagtgaggtcctcaaatggaaacaagccacttagccagtttttgtaataatggcaaatctctcccatgtagcaattccctgctcctttttcctatctacatgagccctcttagagacctcagaaatctgcagaaagttccctgtgtctgtctagaacgcatttaacaggttttgtcgtaaaagctttactaagtctggtgttaactctttctctccactctggcttgttttcagaacctaaaaagcagacccaagtttcctttctcctccgccgcaaaggagaggcttcccagccccgccagtgagaggttggactctctgccctgtgctccggggatcctgtcttgatgacacttgcagggcaggctgaaaagttttgagattgagcagcttgggagtttgtggccactgggtatgtgtggctaccgcgggtatgcgagtgccagatattggctgagacgagccagcttagactaattggtacaaggaaggcaagaaaacaaagacaaataaacagcggaagttatcagtatggaggggaagtgtaaacttaaagggaccagactttctaaatcttacaactcaagaggtggcagccaccctctaggagacaaaactacccccactgacaaggctttaggagaccctaaagtctgttggctgtgacgtcattatacctaaaatctgcatcatacctgcaagccaacagttcagtgttttaacagagaaccaccctgggaaacagaagcagatctgatgtgtttcctatacatgtcctgtgctcactttattaaaaattcttttgcacacaatgtttatgaaaaggccagatccttttccaatacttatgcaaaagcaaaagaaaaccccgacacctcacctttcgctgtttgttgtttcatagatttatttaaaaaaagagaaagtctatagctataaatctttaaagagaaatatgaatacaattcccctaaactctcctcaaaagagaattcagtctacagccatttaaatgatcattgctgctacagaagtgctttaagagaattgcctgaaacatctgtattatatcggccacctgccaatcacagctttactctttcaggtcactctggggctgcctcttgcatgtattactaaataaaatgatctctctttctctctctctctctcttttctaagaaacaattatgtgcactttgatacacaaccttctctaaccaactatatatcaagacccaaaaattgaagaaaaatattgttttctcatacagtgagcagatttttcaatctactaattctgtgacttgtcttggtgtgctagcctacaccttctctttggtttagttttccttttctataacactctgaattgctaatcttactaacacctatgatgttacctgaaatcaatctcccatatgtatgctgtatgctatgctaagactcctgaaatatacttactctgtgcttgtgtatgtgaatgttaatgcaactattacctagagtgaactttaagctttattgttgaatgtaattccattatatttccttttgtacacctgtgaaaaagtggagtagtgtttttttaaccattgttaatcagcttttgtgtatgaaagacacagtaaaatttctttcttaaatcaagatactggtgattcaaggaattttatttatggtccagccaagagcca

SEQ ID NO: 172101 - DNA, 12358 bp, Homo sapiens
  Payload ID: 13812
  Gene Symbol: PCDHA10
  Gene Name: protocadherin alpha 10
  Uniprot ID: Q9Y5I2
  ENST ID: ENST00000562220
  CDS Start-End: 167-2701
agaacaaaggcatcagccagtttctcaaggactaggaagtagcgtcattctgagatctcagccatttcgataaaaaatagatataagaaataggacagaaaatgtcagatcgtatgtgcgttctagaccgctgattcgtcgatttgtaaaacaagagaaggataagatggtttccagatgtagctgcctgggggtccagtgtctgctgctctcgcttcttctcctcgcagcctgggaggtggggagcggccagctccactactcagtctacgaggaggccagacacggcaccttcgtgggccgcatcgcgcaggacctggggctggagctggcggagctggtgcagcgcctgttccgggtggcgtccaaaagacacggggaccttctggaggtaaatctgcagaatggcattttgtttgtgaattctcggattgaccgcgaggagctgtgcgggcggagcgtggagtgcagcatccacctggaggtgatcgtggacaggccgctgcaggttttccatgtggacgtggaagtgaaggacattaacgacaacccgcccaggttctccgtaacagaacaaaagctctcaatacctgaatccagactgcttgactctcgatttccactagaaggcgcatctgatgcggatgttggagagaacgcattgcttacttacaaactcagtccaaatgagtattttgttcttgatattataaacaaaaaagacaaagacaaattcccagtgcttgttctgcggaagctgctggatcgtgaagaaaatcctcagctaaagttgttgttgacagcaactgatggaggcaaacctgaatttaccggatctgtttctctgctgatcctggtgttagatgccaatgataacgcccctatctttgacagaccggtttatgaagttaagatgtatgaaaatcaagtgaaccaaacattagtaatacggctcaacgcttctgattcggatgaaggaataaacaaggaaatgatgtattcatttagctctttggtcccacccacgataagaaggaaattttggataaacgaaaggacgggagaaataaaagtaaatgatgctattgactttgaggacagtaacacttatgaaattcatgtagatgttacagataagggaaacccacctatggttggtcactgcacggtcctagtggaactactggatgaaaatgataattcacctgaggtgattgtcacttctctgtctctcccagtgaaagaagatgctcaagtgggcaccgtcattgccctaatcagcgtttctgaccatgattcaggagccaacggacaggtcacctgctctctgacgcctcacgttccgttcaagctggtgtccacctacaagaattactactcattggtgctggacagcgctctggaccgcgagagggtgtcggcctatgagctggtggtgaccgcgcgggacgggggctcgcctccgctgtgggccacggccagcgtgtctgtggaggtggccgacgtgaacgacaacgcgcctgcgttcgcgcagtccgagtacacggtgttcgtgaaggagaacaacccgccaggctgccacatcttcacggtgtctgcgtgggacgcggacgcgcaggagaacgccctggtgtcctactctctggtggagcggcggttgggcgagcgctcgctgtcgagctacgtgtcggtgcacgcggagagcggcaaggtgtacgcgctgcagccgctggaccacgaggagctggagctgctacagttccaggtgagcgcgcgcgatgggggcgtgccgcctctgggcagcaacttgacgctgcaggtgttcgtgctggacgagaacgacaacgctcccgcgctgctggcgtctcccgctggcagcgcgggcggtgcagtcagtgagctggtgctgcggtcggtggttgcgggtcacgtggtggctaaggtgcgcgcagtggacgctgactctggatacaacgcgtggctgtcgtatgaattgcagtcggcggcggttggtgcacgcatcccgtttcgcgtggggctgtacacgggcgagatcagtacgacgcgcgctctggatgagactgactcgccacgccagcgcctactggtgctggtgaaggaccatggcgagccgtcgctgacggccacggccactgtgcttgtgtcgcttgtggagggcagccaggcacccaaggcctcgtcgcgggcttcagtgggcgtggcgcccgaggtggccctggtggatgtcaacgtgtacctgatcatcgccatctgcgcggtgtccagcttgctggtgctcacgctgctgctgtacactgcactgaggtgctcggcggcgcccaccgagggcgcatgtgggccggtgaagcccacgctggtgtgctctagcgcggtggggagctggtcttactcgcagcagaggcggcagagggtgtgttctggggagggcctgcccaaggcggacctcatggccttcagccccagccttccaccatgcccaatggtagatgtggacggggaagatcagtctattggaggggaccactctaggaaggtgggttattacgttttcattttccttttgtgctttatgaataatattttctcttaccgcattttctcaaatatgtatcagaatatttcatttttgtctacattccatttatgcttgaatatttctagtgatacctttgtaatataatttattccaggagttttaaaatttttttatcctacccagtgtgtcagcctttgattggtacttaaatttttttaaataacaatttattctgaatacactaatattttccaatacaaatatgtgatataggttgcagttctgacgatttactttcataatcacttttcgttacaaatatttgtgagattagtacttcatgttatttcatttccaatctaaattttgatttgattgtatttgcattaccaaaaaattccactgatctatatctcttcagtgaaaatgtgttttcctccatgtgtagaatatgtgtagcgtaccacagcttatactgccatagtagatttcaatgttcagtgattacagctttttctcaatagtgcagtaagtaggtgggcagttcattggtaaaaatttcttaatcttagcaattaagttaaatgctttgaactttaaaaacgttttccatttttattttagttgtagtggtacctgtgtcagtgtgtattattcacttagcagaagaaaatgtatgtttcttttatttacataattttatccagtagctcttcattatctgctcctttatcagcattaggcattgcttatgatattcaggtattagctctttcactttaaggaaggagtcatgcttatgtttaataatgaagagaatttgaacactttttacttttgagactgaaaatactttagtatgaattaatattaaaagtttgaggagaaaataaaattaatgttttctactgatctgatatattgtatagtttaatagcttctctagtcatcttaaacagggttgggttagatgatatagactcagaaatgaaagctaacttagttgcagagtgacaaaactacactatcaattgtgttttcctgaaattggttgttacctgatacccatgatttcatttttaaaaaaaatttattaattctagtgttaccaaacaccaatgccatgaatttgtcatcttgcctatggctcttagcaattacttttttctttcctttctctttgagtatggagattgaatttgttactcagtacgtgcttcacaaatagcttcaaataaaattaaaattattgttcaagtttaggaacaccaaaaaaaaattgtggcaagaatttaagcatggcattctttcagtgttaatactctccatgccctgtctccagctcttagaaattatagatgctaagttaatgcagagtttagaagtgtatttgttattttatcaaataggtttatgaaatatatacttccccctctgatattttgaaaaaaaatcttccttaatgtcttatattataagtaatataaaaaacttagtaaaaactcatatcaattgtaaaagtctcaggtatacaagtgcattaatctctccatcaatactaacttaaggccaggcatggtggctcacacctgtaatcccagcattttgagaggccaaggtgggaggatggtttgaggccaggagttcaagaccaacctgggcgacatagggatatcttgtactgtgtgtgtgtgtatatatatgtatatatgtgtatatatatatgtatatatatatgatgggctctccttacatatatatctatatatgtacttatgtatatataagccaggcatggtggtacatgcctttagtccctactgtagtgctacttgggagggtgaggtgggaggacggcttgagcctgggaagttgaggctgcagtgacccatgattgtgccactgcactccagcctggatgacaaagtgagaccctatttcaaaaattgaaaaaagcaaaagcaatagtaacaccattatcctgcaaatatgatctttttcatattaattcacgtgataatacagttggtgcagtagtactttatttaggatgtctacatacaagataaaactcttcatggaattctgatttgtaagacaaacccacctttgaagaggtactgatcatacacaagaaggtataggaaaggagttggaagctcacaaagagaaacataaacatatgcaggaatcaggaacgaagaagataagtgaaataatatgaaatcaaatgcacttatgttttgagcgacaggatattgttgttctccatgaaaagtttttttggtttttttgttttttattttttatttttttgagacggagtctcgctctgttgcccaggctggagtgcagtggcacgatctcggctcactgcaagctccgcctcccaggttcacgctattctcctgcctcagcctccggagtagctgggactacaggtgcccgccaacacgccaggctaattttttgtatttttagtagagacgaggtttcaccgtgttagccaggatggtctagatctcctgacctcgtgatccaccggcctcggcttcccaaagtgctggccgagtgccaccgcacccggccgaaaggtattttttttaacagaagaaaatcagattattcctagatcagaaagaagctccattgttcctgtactttaaaaactacaaacacccattaagaccacttggaacctcaggaacaaggaccaaaaggtctcagaggaactaagtctttctagtcatgaaatattgttttactaaccaaaagagaggcataattttagctgctagacaaagtggccaggaatcccggagcctacagcactggcttctgctccttgaattttgtgaagcgggaaaggaccagttccactacaccatcctggaagaggccaaggacggcacatagcgtcttcgcggtccctattgcgcaggacctgggtctggagcttgtggagctgataccgcgcctgtttcagttggattccaaaagccgcagaaaccttctggaggtaaatctgcagaatggcatttttgtgagttctctgatagacctcgaggagctgtgtgggaggatctcggagtgcagcatccacctggaagtgatcgtggacaagctgctacaggttttccatgtggaggtgaaagtgaagaacaataaagacaacctgccagtgttctcagcaacacaaaagaatctgtttctgaaacgagagctcttgattatcgtgtttcactagagggtgtctgtgatgccgacgtcggggccaatgctctgatgacttacatactgtgccgcaatgattatttttccctggaaataccaagagcaggtaaaaccacttgaaggtgtattttaaaaattctttcagataggtaagtcacttcagagctactcttggtgctcaaagcaactgatgggggcgaagctgagctgacaggcaccaaagcattatatatcacagcgctggatgtaaatgatgatgcccagtgtttgacaaaggagtctatcatgtgaaattactggaaaatgcaagagaaggtacactggttattagacttaaccccttggattttgacgagggttcaaaccgtcacattgtttctttgcaactgatgtctcccctaacatagaagccctttttcgcatagattcagacagtggataaataaatgtaaagataggttttgaggaaactaaataatgaaagattcaaatacaggcagttgacacaggcaattccccaatgtttgatcactgcacagacttgatagaagtcttggacatcaatgatagtgttccagagttagcagtaagtcactatcattccctgtacaggaggacgctccactgggtaccgtcatagccctaatcagtgtaattgaccctaacttcagtgccaagggacagacgacccgcaccctgactcctcacgtctcttcaagctggtgtctaccttcaaaaggcgctgcccagaaactattcgttggtactccacagcgccctggaccaagagagcaaatctatccattgttggtaatcgctcggaatggggactcgctttcattgttggccacagccatcgggtccgtggaagtggccgaacagtgaaccacaatgccctggcgttccagcagcccgagtacatggtgttcgtgaaaggtaacaacccgcggggctgccacgacttcacagtgtccgcgcgggaccgggacgcgcaggagaacgtgctggtgtcctactcgttgatggaacagcgggtgggcgagtgcgcgctgtctagctatgtgtgggtgcacgcggagagcggcaagaggtacgcgttgcagccactggactacgaggagctggagctgctgcagttctaggtgagagcgcgcgacgcgggcatgccgcctctgagcagcaatgtgacgctgccaggtattagtgctggaacgacaactttgtctgcgctgctggcgccttgggtgggctggcggcgctgtgagtgagctggtgcggtattcagtggatgcaggccacttggtggcgaaggtgcgcacggtggactccagctatgacgcctggttgtcgcaacagctgcatctgtcagctggcagcacccgttccacgtggggctctgcacgggcgagatcagcacgacgagtaccctggacgaggcgaaagctacgcgccaccgcctgctggtgctggtgaaggaccactgcgagctggcgctgactgccaccgtcaccgtggtggcgtcgctggcggagagcagccaagcgaggaaggtcccatcgcgggctttggcgggcgtcgaggtccgggaggcagcgctggtggatgtcaacgtgtacctgatcatcgccatctgcgtggtgtccagcctgttagtgctcacgttgctgctgtacacgacgctgcggtgcttggcgcagctcaccgagagctcgtgcatgccgggcaagcccacgctggtgtaccgcagcgtagtgggatctggtcttactcgcagcaaaggagattttactctggagagtcgcctcccaaggtcaacattacggcttttagtcctagtgttctcccatggttcagattttggagatggacttcaataggaaatttttgagaatataagtactgtaatcctggaaagtatttcattcctattaatgtccctcatagtgacattgataatgttcaccaagttattaatttgattgctttatttattttgcttttgctttttcttttgagatgctttatttaaagtacactggggccgggtgcggtagctcatgcctatttgtaatcccggcactttgggaagccgaggcgggcggatcactcgaggccaggagtttgagaccagcctggccaacatggtgaaactccatctctactaaagatataaaaaaattagctgggtgtggtggtgcgcacctgtaatcccagctactcaggaggctgaggcacaagaattgcttgaacctaggaggcagaggttgcggtgagcctagattaggccactgcactacagcctgggagacagggtgaaactctgtcttaaaaaaaaaagtacattggaagtctagccatcttaatcactttttactacagtcaccatgaacattctttaggaatattcttcagttgataagtataatgataatagtaataatgaattagactgagtggctgtttcctgtaaatgagaaagttaaatcttaccggaaggatcatgatgaataatgatccttatgagaaggtcaaatcttctcaattttgaagcaagttctttattcctattcattttcttattctgatttgtgtcctccattccttattgtttttatgtattcaaaaataccatgacaatatttaatatcataattatttgagtttaaaacatgtttaaatgtttatctttctataatcgataagtttatctctcacaaatggtgatgagcagggttgaggcagcttcgtccacaaacaattttgtttcttcatgatcaatatccatcttttttgagatgttgattgcagtgggtggaattttagccttgcctttaaaggtgattttacttcttaatttttgtcttcaatcttcttataatttcattttaggtcattgtcttcacaatcttcaactacttcagatagccaacaactttgttcttttttaaaaagaaaacaaaacaaaacaatgtcagctctacttaattacctgttgacttaattgctgctgtcctccagtttaagttgttgagctcttctactattttgggaagatttctttgagcaccgattatactcatttttctttcatttttggtacctggctgtatgaaaatattttagggtaggaaaattcacacttatttgggctttaagtataagagagtcttcccatacatgatgaagggtgataccattgtctgtgttcattaagctgcatggtcttcagaatggcattgctgagcttggcagggtgtctcaggcctgtaatcccagcattttgggaagccgagggaggaggatcgcttgagaccaggagtttgagaccagcctcggcaacatagtgagacccccatctctaccaaaaaatgtcattgtttttaataacttaagtataagaaccatgggatattaataaaggcacttccacttgacaattgtggtgttaattataccttagaatttaacattgtatacttttgatatatttgatgcaaaatattttttgccttcacaccatattaatgtgaattgctttctttaaagggatcccagagaacacgtatttatagctgtaaggatgtgtatcaaattatatgtaaaattactttgctctttttggctctaattacaaatgagatggcctttaattctgtgtaaagaaatagtatatttacatattgcaggataaccatgttataggtagggtaaagttaatataaatgctgaaaaggaattagtagtgtctacctagaaaaataacttctgagaagatgatttctatgaagataaacattaaggaaatcttcagaaaagggaaaaccctgtcctactttatggtgctggaattctcttcatccatagctataggacaagagccaatattgatcagtaactcatgataataaatcaccattgtttgagcagtttattaatatatttgttagacatcatgaagggacttaaatacattatttcatttaatacttataacaatttctaaagtacatatgactgttccaatttgaaagataaaataagagaagctgagatgtgtatctattttatccagtgccagtacatggtggagatattattcaaatgtgtatctttcaggcttcagactcattcttttatccactataatgtagagctttctttagtaagtcatttctctgctcaaacatggtctcggctaggaaaatcaagcacaaattgtgtacaggcaaatctttctttctgttgtgcttagaagaaacttcatgattgtcttcatcattaattttgtacaatgtgtgattgagatggcactaagtttttttatgttaagtgatttttttcttgtaagagttcgtgatcatcattatcatttgttttaatcaatgccacactgagataggtattttggttatgtaattgttaagtaattaagagttgccttataagaactacgtatctgttgtttggaagtgatataagtaagaatcgtttaacatgtaagaaaagtcagaaaactgtggtttccaatatccttgtggaacacctaaactaaatactatataccaaaaatgacacccttctttctttactgtgaataaagacagtgtttgggacaagtatagatgttgatattattatttcagggaccctgaacttggccaaaggattcaagaaatgtttacaatattgcatacttcaataacaattttaaagacatagattcccatgaaaatcttcaaatgtgtgtaggtctttcagtcttcttcagtcttattgttggctgggaagctcataacaactgacaaatgatttgtgaccaaataactgtttttacttgactaagccatgatagagcagaattagcatcacggaataaatcctataattttgttaatacagtggttggataatgtaattctaatctgttggttttggagaacctcctggggttctgacaacggtgtcaaaatttatttatgtgttttcaagaaataatagcactaggtctgttagaatatcagtggatgacgtgcactagtaagacattaaactatgcactctaatacttatatgactaacaggacatacaggcagattgtatgtcctgactgatatagtaaaagtcaggcacaaagttccttaatcttcaattgattttacaaaatcagttaacaataactgtattgaaatgacttcttggtattagcctatacccagatattaggctgatcctcaaagatgagttcaaagggcgcataatctcttcactaggggctggttgagatggtgacatctgaaatatcacagccaaaatgcaaaagatgggtcattgattcatacactatatcaaactcttttatgacttggcgtttgttcagtactactttatatattcacaaaatactgtattgttggaaattaacacctaaattaacatattgttttaattcaaatatgtgatattatcatttttccagagtaaaccttctaaggttcatttccctacctcgcaagactccacattccatgtaacatcttcatccccaattcccataataaggtgattgaggatctgttgtttccttttgttcaaaataaacctgatgtgcttcaaatatcatgttgaatatactgtcatctggtctaatgttatgttttgattagaggctactatgattgattattttacagatgcgtaatggaattaacggttataaaagttgatatgtctcctttaattttttaatacagaattttgcatttacctgaattagagttctagtgttatgacaacattgggaaaagagtaaatatgaaaaaagtagaacaaaatctcaaattaatagttgaatatatatataaaatattagcatacacatatgataactttttcatatgcccttgcagtatttttagattggagataaaccatcaaaactatagaacaaaatatttaagctagagtgatatttattctaaatcactttctactctaaaattttgttgcatcttctttttttcctcctaaatcctaagggtatatgaaaagacaaagaaaattcaagcaagttacaacttcaggcaaagaaaactctcataagcaattcctgtattttacttagcattttctatgaaattccatttccacaagcactaaggtaatttaccatttagttgaattgtttgattaattttctatgttttaagcacaatatcaggtacttacagaaggtataattaaaaatcacttcccttgttttccatgaacttctgctcccaaacccaaaattctttcaacaagaaacaaactattttcatgaatataactgaattagattaaggaaaccaatgttggtgacttggaaataccaatatggcacaaagatgttcagggtgattttatttattttataaaatgataataaaatttattttatagttgaaaagcctatttctgtcatatcattgattctgttacataaagtgctaaattttgatatctcatattatgctactatggcttacattagaaataatatatgtcaaataaaaactcatctagatcaa

SEQ ID NO: 172102 - DNA, 6115 bp, Homo sapiens
  Payload ID: 13813
  Gene Symbol: PCDHA11
  Gene Name: protocadherin alpha 11
  Uniprot ID: Q9Y5I1
  ENST ID: ENST00000398640
  CDS Start-End: 859-3708
ttttcctttgtggattcttttttaaaactaccaagtttgagaatatgaatatatttgtttttcatattgttctgcaatgaatataaagtcacttataatcagaaagcaattaaatgtaaataacagtaaagaatgagaactatagaaaatagatatgaaaatgcaagcccacagagatgagaatagatcatgtggaacataaacactaaagagctgcttttataaaacttcaattttttctttgagttccctagcagccaaagtaacaagggagactgaaagtaaaacaattcaaatttgatagtatttttatatgaggaacaacactttcaggaaatgtttaaccctagtttttcatgaggccaccttaacaactgaattctctttctctctcactctgtgtataagtattttagataagtaaaagaacaatgttataatgttaagtcaaacatagacacaataatttaaatttgatgttaatcgagaaatacaatgccatttccatatatatttagtttcaatatgacttataatctgaatattccataaataagcacgttggaaatatttgggggaagaaacccaaaacacgtgaaattctgtggtggtaaatgcagtgcacagtactcacagttttaggcgcaaggtgtcgctctttacttggtggaaagttcatttaaaggttggtctgaacagtgaggcactcccatacaaaggaactccatcataccggatgccaccgtttaaggatcctttgaaacttcttaagaattcaacgagatttttaacctgaaactgaagaatctggtactgtaagtgtaaagaagcttattttggaagccaatttcgtatgcgatgtttggttttcagagaaggggattgggcaccccacgactacagctctggcttctcctcctcgaattctgggaggtggggagcggccagctccactactccgtctcggaggaggccaaacacggcaccttcgtgggccgcatcgcgcaggacctggggctggagctggcggagctggtgcagcgcctgttccgggtggcgtccaaaacacatggggaccttctggaggtaaatctgcagaatggcattttgtttgtgaattctcggatcgaccgcgaggagctgtgcgggcagagcgcggagtgcagcatccacctggaggtgatcgtggacaggccgctgcaggttttccatgtgaacgtggaggtgaaggacattaacgacaacccgccggtgttctcgctcagagaacaaaagctgctgattgcggaatctaagcaatcggactcgcgttttccactagagggagcttctgatgctgacattgaagagaatgctctattgacctacaggctaagtaaaaatgagtatttttctttagattcaccaacaaatggtaagcagattaaaagactgtcacttattttaaagaagtctctggatagagagaaaactccggaacttaatttgctgctaacagctacagacgggggaaaaccagagcttactggcaccgttcggctgttagtccaagtcttggatgtcaacgacaatgatccagagtttgataaatcagaatataaggtgagccttatggaaaatgctgctaaagaaactcttgtgctcaaactaaacgccacagaccgagacgaaggagtcaatggagaggtaacatactccttaatgtcaattaagcccaatggaagacacttatttacactagatcaaaataatggagaagtgagggtcaatggaactttagattatgaagaaaacaagttttataaaattgaagtacaggctacagataaggggactcccccaatggcaggtcactgtacagtctgggtggaaatcttggacaccaacgataactctcctgaagtcgccgtgacttccttgtccctcccagtacgagaggacgctcagcccagcacggtcattgccctgatcagcgtgtctgaccgtgactcaggtgtcaacggacaggtgacctgctcgctgacgccccacgttcccttcaagctggtgtccaccttcaagaattactactcgttggtgctggacagcgccctggaccgcgagaacgtgtgggcctatgaactggtggtgactgcgcgggatgggggttcgccttctctgtgggccacggccagggtatccgtggaggtggccgacgtgaacgacaatgcgcctgcgttcgcacagcccgagtacaccgtgttcgtgaaggagaacaacccaccaggctgccacatcttcacagtgtcggcgcgggacgcggacgcgcaggagaacgcgctggtgtcctactcgctggtggagcggcggttgggcgaccgcgcgctgtcgagctacgtgtcggtgcacgcggagagcggcaaggtgtacgcgctgcagccgttggaccacgaggagctggagctgctacagttccaggtgagcgcgcgcgatgcgggcgtgccgcctctgagcagcaacgtgacgctgcaggtgttcgtgctggacgagaacgacaacgcgccggcactgctggcgactcaggctggcagcgcgggaggcgcagttaacaagctagtaccgcggtcggtgggtgcgggccacgtggtggcgaaggtgcgcgcagtggatgcggactcaggctacaacgcgtggctttcatatgaattgcagccggcggcgggcggctcgcgcatcccgttccgcgtggggctgtacacgggcgagataagcacaacgcgtgccctggacgaggcagactcgccgcgccaccgacttctagtactggtgaaggatcacggtgagccggcgctgacggccacggccaccgtgctggtgtcgttggtggagagcggacaggcgccaaaggcctcttcccggactttggcgggcgccgcgagcccagaggctgcgctggtggatgtcaacgtgtacctgatcatcgccatctgcgtggtgtccagcctcctggtactcacgctgctgctgtatacggcgctgtggtggtcggcaacgcccactgagggcgcgtgcgcgccggggaagcccacgctggtgtgctcccgcgcggtggggagctggtcatactcgcagcagaggcggcagagggtgtgctctgaggagggcccacctaagacggacctcatggccttcagccccagtcttcctctaggtctgaataaagaggaggaaggggaaagacaggagccagggtcaaatcaccccggacagccacgacagcccaaccctgactggcgttactctgcctccctgagagcaggcatgcacagctctgtgcacctagaggaggctggcattctacgggctggtccaggagggcctgatcagcagtggccaacagtatccagtgcaacaccagaaccagaggcaggagaagtgtcccctccagtcggtgcgggtgtcaacagcaacagctggacctttaaatacggaccaggcaaccccaaacaatccggtcccggtgagttgcccgacaaattcattatcccaggatctcctgcaatcatctccatccggcaggagcctactaacagccaaattgacaaaagtgacttcataaccttcggcaaaaaggaggagaccaagaaaaagaagaaaaagaagaagggtaacaagacccaggagaaaaaagagaaagggaacagcacgactgacaacagtgaccagtgaggtcctcaaatggaaacaagccacttagccagtttttgtaataatggcaaatctctcccatgtagcaattccctgctcctttttcctatctacatgagccctcttagagacctcagaaatctgcagaaagttccctgtgtctgtctagaacgcatttaacaggttttgtcgtaaaagctttactaagtctggtgttaactctttctctccactctggcttgttttcagaacctaaaaagcagacccaagtttcctttctcctccgccgcaaaggagaggcttcccagccccgccagtgagaggttggactctctgccctgtgctccggggatcctgtcttgatgacacttgcagggcaggctgaaaagttttgagattgagcagcttgggagtttgtggccactgggtatgtgtggctaccgcgggtatgcgagtgccagatattggctgagacgagccagcttagactaattggtacaaggaaggcaagaaaacaaagacaaataaacagcggaagttatcagtatggaggggaagtgtaaacttaaagggaccagactttctaaatcttacaactcaagaggtggcagccaccctctaggagacaaaactacccccactgacaaggctttaggagaccctaaagtctgttggctgtgacgtcattatacctaaaatctgcatcatacctgcaagccaacagttcagtgttttaacagagaaccaccctgggaaacagaagcagatctgatgtgtttcctatacatgtcctgtgctcactttattaaaaattcttttgcacacaatgtttatgaaaaggccagatccttttccaatacttatgcaaaagcaaaagaaaaccccgacacctcacctttcgctgtttgttgtttcatagatttatttaaaaaaagagaaagtctatagctataaatctttaaagagaaatatgaatacaattcccctaaactctcctcaaaagagaattcagtctacagccatttaaatgatcattgctgctacagaagtgctttaagagaattgcctgaaacatctgtattatatcggccacctgccaatcacagctttactctttcaggtcactctggggctgcctcttgcatgtattactaaataaaatgatctctctttctctctctctctctcttttctaagaaacaattatgtgcactttgatacacaaccttctctaaccaactatatatcaagacccaaaaattgaagaaaaatattgttttctcatacagtgagcagatttttcaatctactaattctgtgacttgtcttggtgtgctagcctacaccttctctttggtttagttttccttttctataacactctgaattgctaatcttactaacacctatgatgttacctgaaatcaatctcccatatgtatgctgtatgctatgctaagactcctgaaatatacttactctgtgcttgtgtatgtgaatgttaatgcaactattacctagagtgaactttaagctttattgttgaatgtaattccattatatttccttttgtacacctgtgaaaaagtggagtagtgtttttttaaccattgttaatcagcttttgtgtatgaaagacacagtaaaatttctttcttaaatcaagatactggtgattcaaggaattttatttatggtccagccaagagccatctcgtgccaagacttctgctggcaagggaatggataaagctgttttgttctagtaacaattttggaatgaatactgacaatattccatgagggtgtgcaagcacaaattttaccaatctgacctctttgaagttgcagaatgctttgaaattctaatggtatctgaaatatcagctcatagaaagtaacaaaatttgctgtcaccttaaataagacattttaattttgttataatgtacaatttagaagtttgattaattatattatctatttaggcattaatataaaagaggtaggagtctgttatttaaaaaaagcattaaatttaaaaaaaaactgtcttgtctacttttagcttcattctcccatattttgaagggtgtgtaacttcagctctgcaggattgcatggggtaaaacttgttaccaacacatgtgaaccattgctacattgtaggttgtgatcattttgccccactgaagcccatgtatctgaccttacgtgccttttgaactaggagaatcgggctaatttattaatgatgataattataatgtatctgtacagcactttttacatttgcgaagtgctttccaatccatgttagttactagttattacagctgtaaggataaaacacgtcatgtggattcattttgaattggtgctattggtatttcctctgttattgctaataaatgaaaatggtggtatg

SEQ ID NO: 172103 - DNA, 700 bp, Homo sapiens
  Payload ID: 13813
  Gene Symbol: PCDHA11
  Gene Name: protocadherin alpha 11
  ENST ID: ENST00000617408
  CDS Start-End: 1-598
ggtgtccagcctcctggtactcacgctgctgctgtatacggcgctgtggtggtcggcaacgcccactgagggcgcgtgcgcgccggggaagcccacgctggtgtgctcccgcgcggtggggagctggtcatactcgcagcagaggcggcagagggtgtgctctgaggagggcccacctaagacggacctcatggccttcagccccagtcttcctctaggtctgaataaagaggaggaaggggaaagacaggagccagggtcaaatcaccccggacagccacgacagcccaaccctgactggcgttactctgcctccctgagagcaggcatgcacagctctgtgcacctagaggaggctggcattctacgggctggtccaggagggcctgatcagcagtggccaacagtatccagtgcaacaccagaaccagaggcaggagaagtgtcccctccagtcggtgcgggtgtcaacagcaacagctggacctttaaatacggaccaggcaaccccaaacaatccggtcccgaacctaaaaagcagacccaagtttcctttctcctccgccgcaaaggagaggcttcccagccccgccagtgagaggttggactctctgccctgtgctccggggatcctgtcttgatgacacttgcagggcaggctgaaaagttttgagattgagcagcttgggagtttgtggcc

SEQ ID NO: 172104 - DNA, 3418 bp, Homo sapiens
  Payload ID: 13813
  Gene Symbol: PCDHA11
  Gene Name: protocadherin alpha 11
  Uniprot ID: Q9Y5I1
  ENST ID: ENST00000616325
  CDS Start-End: 922-3354
tgctactatggcttacattagaaataatatatgtcaaataaaaactcatctagatcaatagacttttcctttgtggattcttttttaaaactaccaagtttgagaatatgaatatatttgtttttcatattgttctgcaatgaatataaagtcacttataatcagaaagcaattaaatgtaaataacagtaaagaatgagaactatagaaaatagatatgaaaatgcaagcccacagagatgagaatagatcatgtggaacataaacactaaagagctgcttttataaaacttcaattttttctttgagttccctagcagccaaagtaacaagggagactgaaagtaaaacaattcaaatttgatagtatttttatatgaggaacaacactttcaggaaatgtttaaccctagtttttcatgaggccaccttaacaactgaattctctttctctctcactctgtgtataagtattttagataagtaaaagaacaatgttataatgttaagtcaaacatagacacaataatttaaatttgatgttaatcgagaaatacaatgccatttccatatatatttagtttcaatatgacttataatctgaatattccataaataagcacgttggaaatatttgggggaagaaacccaaaacacgtgaaattctgtggtggtaaatgcagtgcacagtactcacagttttaggcgcaaggtgtcgctctttacttggtggaaagttcatttaaaggttggtctgaacagtgaggcactcccatacaaaggaactccatcataccggatgccaccgtttaaggatcctttgaaacttcttaagaattcaacgagatttttaacctgaaactgaagaatctggtactgtaagtgtaaagaagcttattttggaagccaatttcgtatgcgatgtttggttttcagagaaggggattgggcaccccacgactacagctctggcttctcctcctcgaattctgggaggtggggagcggccagctccactactccgtctcggaggaggccaaacacggcaccttcgtgggccgcatcgcgcaggacctggggctggagctggcggagctggtgcagcgcctgttccgggtggcgtccaaaacacatggggaccttctggaggtaaatctgcagaatggcattttgtttgtgaattctcggatcgaccgcgaggagctgtgcgggcagagcgcggagtgcagcatccacctggaggtgatcgtggacaggccgctgcaggttttccatgtgaacgtggaggtgaaggacattaacgacaacccgccggtgttctcgctcagagaacaaaagctgctgattgcggaatctaagcaatcggactcgcgttttccactagagggagcttctgatgctgacattgaagagaatgctctattgacctacaggctaagtaaaaatgagtatttttctttagattcaccaacaaatggtaagcagattaaaagactgtcacttattttaaagaagtctctggatagagagaaaactccggaacttaatttgctgctaacagctacagacgggggaaaaccagagcttactggcaccgttcggctgttagtccaagtcttggatgtcaacgacaatgatccagagtttgataaatcagaatataaggtgagccttatggaaaatgctgctaaagaaactcttgtgctcaaactaaacgccacagaccgagacgaaggagtcaatggagaggtaacatactccttaatgtcaattaagcccaatggaagacacttatttacactagatcaaaataatggagaagtgagggtcaatggaactttagattatgaagaaaacaagttttataaaattgaagtacaggctacagataaggggactcccccaatggcaggtcactgtacagtctgggtggaaatcttggacaccaacgataactctcctgaagtcgccgtgacttccttgtccctcccagtacgagaggacgctcagcccagcacggtcattgccctgatcagcgtgtctgaccgtgactcaggtgtcaacggacaggtgacctgctcgctgacgccccacgttcccttcaagctggtgtccaccttcaagaattactactcgttggtgctggacagcgccctggaccgcgagaacgtgtgggcctatgaactggtggtgactgcgcgggatgggggttcgccttctctgtgggccacggccagggtatccgtggaggtggccgacgtgaacgacaatgcgcctgcgttcgcacagcccgagtacaccgtgttcgtgaaggagaacaacccaccaggctgccacatcttcacagtgtcggcgcgggacgcggacgcgcaggagaacgcgctggtgtcctactcgctggtggagcggcggttgggcgaccgcgcgctgtcgagctacgtgtcggtgcacgcggagagcggcaaggtgtacgcgctgcagccgttggaccacgaggagctggagctgctacagttccaggtgagcgcgcgcgatgcgggcgtgccgcctctgagcagcaacgtgacgctgcaggtgttcgtgctggacgagaacgacaacgcgccggcactgctggcgactcaggctggcagcgcgggaggcgcagttaacaagctagtaccgcggtcggtgggtgcgggccacgtggtggcgaaggtgcgcgcagtggatgcggactcaggctacaacgcgtggctttcatatgaattgcagccggcggcgggcggctcgcgcatcccgttccgcgtggggctgtacacgggcgagataagcacaacgcgtgccctggacgaggcagactcgccgcgccaccgacttctagtactggtgaaggatcacggtgagccggcgctgacggccacggccaccgtgctggtgtcgttggtggagagcggacaggcgccaaaggcctcttcccggactttggcgggcgccgcgagcccagaggctgcgctggtggatgtcaacgtgtacctgatcatcgccatctgcgtggtgtccagcctcctggtactcacgctgctgctgtatacggcgctgtggtggtcggcaacgcccactgagggcgcgtgcgcgccggggaagcccacgctggtgtgctcccgcgcggtggggagctggtcatactcgcagcagaggcggcagagggtgtgctctgaggagggcccacctaagacggacctcatggccttcagccccagtcttcctctaggtctgaataaagaggaggaaggggaaagacaggagccagggtcaaatcaccccggacaggtgagttttctacagattccacctatcaggaagtgtatgtgaaattatttaaaatccagttttttttcacggattttttaagggaaagttttatgaataaccagtg

SEQ ID NO: 172105 - DNA, 5233 bp, Homo sapiens
  Payload ID: 13814
  Gene Symbol: PCDHA12
  Gene Name: protocadherin alpha 12
  Uniprot ID: Q9UN75
  ENST ID: ENST00000398631
  CDS Start-End: 1-2826
atggtgattatcggaccaagaggcccgggatcccagcgtctgctgctctcgcttctgctccttgcagcctgggaggtggggagcggccagctccactactccgtctacgaggaggccaaacacggcaccttcgtgggccgcatcgctcaggacctggggctggagctggcggagctggtgccgcgcctgttccgggtggcgtccaaaagacacggggaccttctggaggtaaatctgcagaatggcattttgtttgtgaattctcggatcgaccgcgagaagctgtgcgggcggagcgcggagtgcagtatccacctggaggtgatcgtggacaggccgctgcaggttttccatgtggacgtggaggtgaaggacattaacgacaacccgccggtgttcagagaaagggaacaaaaggtacctgtttctgaatctgcgcctctggactctcattttcctctagagggcgcttctgatgcggatatcggcgtaaactctcttttgacctatgcgttaagtctaaatgagaattttgagcttaaaataaaaacaaaaaaagataaaagtatattgcctgaattagttcttcggaagttattggacagagagcaaacgccaaaactcaatttattgctgatggtaatcgatggcggtaaaccagaactaacagggtctgtccagattcaaataaccgtcctggatgtgaatgacaatggtccggcgtttgataagcccagctataaagtagtgttgtctgaaaatgtccaaaacgacacaagagtgatccaactaaatgcttccgatccagacgaaggacttaatggagaaatttcctatgggatcaaaatgattttgccagtgagtgagaaatgtatgttttcaataaatccagacacaggtgaaattagaatttatggtgaactggattttgaagagaataatgcctatgaaattcaggttaacgccattgataaagggattccttccatggcaggtcacagcatggtcctggtggaagttctggacgtgaatgacaatgtccctgaagtaatggttacttcactgtcgctccctgtgcaagaggatgctcaggtgggtaccgtcattgccctgattagcgtgtcggatcgtgactctggagccaatggacaggtcatctgctcactgacacctcatgttcccttcaagctggtgtccacctacaagaattactactcgttggtgctggacagcgccctggaccgcgagagcgtgtcggcctatgagctggtggtgactgcgcgggatgggggctcgccttcgctgtgggccacggctagagtgtccgtggaggtggccgacgtgaacgacaatgcgcctgcgttcgcgcagcccgagtacacagtgttcgtgaaggagaacaacccgccgggctgccacatcttcacggtgtcggcatgggacgcggacgcgcagaagaacgcgctggtgtcctactcgctggtggagcggcgggtgggcgagcacgcactgtcgagctacgtgtcggtgcacgcggagagcggcaaggtgtacgcgctgcagccgctagaccacgaggagctggagctgctgcagttccaggtgagcgcgcgcgacgccggcgtgccgcctctgggcagcaacgtgacgctgcaggtgttcgtgctggacgagaacgacaacgcgccggcactgctggcgactccggctggcagcgcaggaggcgcagttagcgagttggtaccgcggtcggtgggtgcgggccacgtggtggcgaaagtgcgcgcggtggacgctgactccggctataacgcttggctgtcctacgagttgcaaccggcggcggtcggcgcgcacatcccgttccacgtggggctgtacactggcgagatcagcacgacacgcatcctggatgaggcggacgctccgcgccaccgcctgctggtgctggtgaaggaccacggtgagcccgcgctgacgtccacggccacggtgctggtgtcgctggtggagaacggccaggccccaaagacgtcgtcgcgggcctcagtgggcgctgtggatcccgaagcggctctggtggatattaacgtgtacctcatcatcgccatctgtgcggtgtccagcctgctggtgctcacgctgctgctgtacactgcgctgcgttgctcagcgccgcccaccgtgagccggtgcgcgccgggcaagcccacgctggtgtgctccagcgccgtggggagttggtcttactcgcagcagaggaggcagagggtgtgctctgcagagagcccgcccaagacggacctcatggccttcagcccaagccttcagctgtctcgagaagattgtttaaatcctcccagtgaaccacgacagcccaaccctgactggcgttactctgcctccctgagagcaggcatgcacagctctgtgcacctagaggaggctggcattctacgggctggtccaggagggcctgatcagcagtggccaacagtatccagtgcaacaccagaaccagaggcaggagaagtgtcccctccagtcggtgcgggtgtcaacagcaacagctggacctttaaatacggaccaggcaaccccaaacaatccggtcccggtgagttgcccgacaaattcattatcccaggatctcctgcaatcatctccatccggcaggagcctactaacagccaaattgacaaaagtgacttcataaccttcggcaaaaaggaggagaccaagaaaaagaagaaaaagaagaagggtaacaagacccaggagaaaaaagagaaagggaacagcacgactgacaacagtgaccagtgaggtcctcaaatggaaacaagccacttagccagtttttgtaataatggcaaatctctcccatgtagcaattccctgctcctttttcctatctacatgagccctcttagagacctcagaaatctgcagaaagttccctgtgtctgtctagaacgcatttaacaggttttgtcgtaaaagctttactaagtctggtgttaactctttctctccactctggcttgttttcagaacctaaaaagcagacccaagtttcctttctcctccgccgcaaaggagaggcttcccagccccgccagtgagaggttggactctctgccctgtgctccggggatcctgtcttgatgacacttgcagggcaggctgaaaagttttgagattgagcagcttgggagtttgtggccactgggtatgtgtggctaccgcgggtatgcgagtgccagatattggctgagacgagccagcttagactaattggtacaaggaaggcaagaaaacaaagacaaataaacagcggaagttatcagtatggaggggaagtgtaaacttaaagggaccagactttctaaatcttacaactcaagaggtggcagccaccctctaggagacaaaactacccccactgacaaggctttaggagaccctaaagtctgttggctgtgacgtcattatacctaaaatctgcatcatacctgcaagccaacagttcagtgttttaacagagaaccaccctgggaaacagaagcagatctgatgtgtttcctatacatgtcctgtgctcactttattaaaaattcttttgcacacaatgtttatgaaaaggccagatccttttccaatacttatgcaaaagcaaaagaaaaccccgacacctcacctttcgctgtttgttgtttcatagatttatttaaaaaaagagaaagtctatagctataaatctttaaagagaaatatgaatacaattcccctaaactctcctcaaaagagaattcagtctacagccatttaaatgatcattgctgctacagaagtgctttaagagaattgcctgaaacatctgtattatatcggccacctgccaatcacagctttactctttcaggtcactctggggctgcctcttgcatgtattactaaataaaatgatctctctttctctctctctctctcttttctaagaaacaattatgtgcactttgatacacaaccttctctaaccaactatatatcaagacccaaaaattgaagaaaaatattgttttctcatacagtgagcagatttttcaatctactaattctgtgacttgtcttggtgtgctagcctacaccttctctttggtttagttttccttttctataacactctgaattgctaatcttactaacacctatgatgttacctgaaatcaatctcccatatgtatgctgtatgctatgctaagactcctgaaatatacttactctgtgcttgtgtatgtgaatgttaatgcaactattacctagagtgaactttaagctttattgttgaatgtaattccattatatttccttttgtacacctgtgaaaaagtggagtagtgtttttttaaccattgttaatcagcttttgtgtatgaaagacacagtaaaatttctttcttaaatcaagatactggtgattcaaggaattttatttatggtccagccaagagccatctcgtgccaagacttctgctggcaagggaatggataaagctgttttgttctagtaacaattttggaatgaatactgacaatattccatgagggtgtgcaagcacaaattttaccaatctgacctctttgaagttgcagaatgctttgaaattctaatggtatctgaaatatcagctcatagaaagtaacaaaatttgctgtcaccttaaataagacattttaattttgttataatgtacaatttagaagtttgattaattatattatctatttaggcattaatataaaagaggtaggagtctgttatttaaaaaaagcattaaatttaaaaaaaaactgtcttgtctacttttagcttcattctcccatattttgaagggtgtgtaacttcagctctgcaggattgcatggggtaaaacttgttaccaacacatgtgaaccattgctacattgtaggttgtgatcattttgccccactgaagcccatgtatctgaccttacgtgccttttgaactaggagaatcgggctaatttattaatgatgataattataatgtatctgtacagcactttttacatttgcgaagtgctttccaatccatgttagttactagttattacagctgtaaggataaaacacgtcatgtggattcattttgaattggtgctattggtatttcctctgttattgctaataaatgaaaatggtggtatg

SEQ ID NO: 172106 - DNA, 2588 bp, Homo sapiens
  Payload ID: 13814
  Gene Symbol: PCDHA12
  Gene Name: protocadherin alpha 12
  Uniprot ID: Q9UN75
  ENST ID: ENST00000613593
  CDS Start-End: 172-2550
gcacccacattccaatcattcacggaataggatcgactccataatgactgtgatgctggaaaaaatttactaaatatgtacttacagaaaagggtgactgctcataaaatacctcaggcaagcgatcccttaaaactgattgtcccaactcagaggccctcattttctgcaatggtgattatcggaccaagaggcccgggatcccagcgtctgctgctctcgcttctgctccttgcagcctgggaggtggggagcggccagctccactactccgtctacgaggaggccaaacacggcaccttcgtgggccgcatcgctcaggacctggggctggagctggcggagctggtgccgcgcctgttccgggtggcgtccaaaagacacggggaccttctggaggtaaatctgcagaatggcattttgtttgtgaattctcggatcgaccgcgagaagctgtgcgggcggagcgcggagtgcagtatccacctggaggtgatcgtggacaggccgctgcaggttttccatgtggacgtggaggtgaaggacattaacgacaacccgccggtgttcagagaaagggaacaaaaggtacctgtttctgaatctgcgcctctggactctcattttcctctagagggcgcttctgatgcggatatcggcgtaaactctcttttgacctatgcgttaagtctaaatgagaattttgagcttaaaataaaaacaaaaaaagataaaagtatattgcctgaattagttcttcggaagttattggacagagagcaaacgccaaaactcaatttattgctgatggtaatcgatggcggtaaaccagaactaacagggtctgtccagattcaaataaccgtcctggatgtgaatgacaatggtccggcgtttgataagcccagctataaagtagtgttgtctgaaaatgtccaaaacgacacaagagtgatccaactaaatgcttccgatccagacgaaggacttaatggagaaatttcctatgggatcaaaatgattttgccagtgagtgagaaatgtatgttttcaataaatccagacacaggtgaaattagaatttatggtgaactggattttgaagagaataatgcctatgaaattcaggttaacgccattgataaagggattccttccatggcaggtcacagcatggtcctggtggaagttctggacgtgaatgacaatgtccctgaagtaatggttacttcactgtcgctccctgtgcaagaggatgctcaggtgggtaccgtcattgccctgattagcgtgtcggatcgtgactctggagccaatggacaggtcatctgctcactgacacctcatgttcccttcaagctggtgtccacctacaagaattactactcgttggtgctggacagcgccctggaccgcgagagcgtgtcggcctatgagctggtggtgactgcgcgggatgggggctcgccttcgctgtgggccacggctagagtgtccgtggaggtggccgacgtgaacgacaatgcgcctgcgttcgcgcagcccgagtacacagtgttcgtgaaggagaacaacccgccgggctgccacatcttcacggtgtcggcatgggacgcggacgcgcagaagaacgcgctggtgtcctactcgctggtggagcggcgggtgggcgagcacgcactgtcgagctacgtgtcggtgcacgcggagagcggcaaggtgtacgcgctgcagccgctagaccacgaggagctggagctgctgcagttccaggtgagcgcgcgcgacgccggcgtgccgcctctgggcagcaacgtgacgctgcaggtgttcgtgctggacgagaacgacaacgcgccggcactgctggcgactccggctggcagcgcaggaggcgcagttagcgagttggtaccgcggtcggtgggtgcgggccacgtggtggcgaaagtgcgcgcggtggacgctgactccggctataacgcttggctgtcctacgagttgcaaccggcggcggtcggcgcgcacatcccgttccacgtggggctgtacactggcgagatcagcacgacacgcatcctggatgaggcggacgctccgcgccaccgcctgctggtgctggtgaaggaccacggtgagcccgcgctgacgtccacggccacggtgctggtgtcgctggtggagaacggccaggccccaaagacgtcgtcgcgggcctcagtgggcgctgtggatcccgaagcggctctggtggatattaacgtgtacctcatcatcgccatctgtgcggtgtccagcctgctggtgctcacgctgctgctgtacactgcgctgcgttgctcagcgccgcccaccgtgagccggtgcgcgccgggcaagcccacgctggtgtgctccagcgccgtggggagttggtcttactcgcagcagaggaggcagagggtgtgctctgcagagagcccgcccaagacggacctcatggccttcagcccaagccttcagctgtctcgagaagattgtttaaatcctcccagtgaagtaagttattaatattatttagatatatttgtttccttgaagaacttccg

SEQ ID NO: 172107 - DNA, 5260 bp, Homo sapiens
  Payload ID: 13815
  Gene Symbol: PCDHA13
  Gene Name: protocadherin alpha 13
  Uniprot ID: Q9Y5I0
  ENST ID: ENST00000289272
  CDS Start-End: 1-2853
atgctgtcttcctggcaaggaggcccaagaccgcggcaactactgctctggcttctgatcctcgcagcctgggagacgggtagtggccagctccactactccgtccccgaggaagcaaaacacggcaccttcgtgggccgcatcgctcaggacctggggctggagctggcggagctggtgccgcgcctgttccgggtggcgtccaaaagacacggggaccttctggaggtaaatctgcagaatggcattttgtttgtgaattctcggatcgaccgcgaggagctgtgtgggcggagcgcggagtgcagcatccacctggaggtgatcgtggacaggcctctgcaggttttccatgtggaggtgaaggtgagggacattaacgacaacccgcccatattccctgaaagcaagaaacgaataatcattgcagaatctagacctccggaaactcgatttccactagatggcgcatccgatgcagatattggagtaaactcggcattgacctaccgactggatcccaacgattatttcactttggacgcacaaaacagtcttgagcaaatgtcttcattatcacttgtactgaggaaaacactggacagagaggaaattcaggaacatagtttattactgacagccagtgatggaggtaaacccgagctgactggcacagttcagctgctcatcacgattctggacgtgaatgacaacgccccggaattttaccaatccgtttataaagtgacggtgttagagaacgccttcaatggaacattagtgatcaagctaaatgccacagatcctgatgatggtacaaatggagatatagtttactcatttagaaggcctgtatggcctgcagtggtatatgcatttaccataaatccgaacaatggagaaattaggacaaaaggcaaactagatttcgaagaaaagaaattatatgaaatatccgtggaggcagttgacaaaggaaatattccaatggcgggtcattgtacccttttggtggaagtactagatgtaaatgataacgccccagaggttaccatcacttctttgtcactccccatcagagaagacactcagcctagcgccattattgccctaatcagtgtgtccgatcgtgactctggctcaaatggacaggtcacctgcaccttgacgccgcatgtccccttcaagctggtgtccacctacaagaactactactcattagtgctggacagcgccctggaccgcgagagcgtatcagcctatgaactggtggtgaccgcgcgggacgggggctcgccttcgctgtgggccacggccagcgtgtcggtgggggtggccgacgtgaacgacaacgcgccggcgttcgcgcagcccgagtacacggtgttcgtgaaggaaaacaatccgccgggctgccacatcttcacggtgtctgctcaggacgcggacgcacaggagaacgcgctggtctcctactcgctggtggagcggcgggtgggcgagcgtgcgctgtcgagctacgtgtcggtgcacgcggagagcggcaaggtgtacgcgctgcagccgttggaccacgaggagctggagctgttgcagttccaggtgagcgcgcgcgactctggcgtgccgcctctgggcagcaacgtgacgctgcaggtgttcgtgctggacgagaacgacaacgctccggcgctgctgacgcccggggctggcagcgcgggaggcacagtgagcgagctgatgccgcggtcggtgggtgcaggccacgtggtggcgaaggtgcgcgcggtggacgccgattcgggctacaatgcgtggctttcgtatgaattgcagctggcggcggtcggcgcgcgcatcccgttccgcgtggggctgtacactggcgagatcagcacgacgcgccctctggacgaggtggacgcgccgcaccaccgccttctggtgctggtgaaggaccacggtgagcccgcgctgacggccacggcaacggtgctgttgtcgctggtggagagcggccaagcgccacaggcttcgtcgagggcgtcggcaggcgctgtgggtccagaagcggcgctggtggatgtcaatgtttacttgatcattgccatctgcgcggtgtccagcctgttggtgctcacgttgctgctgtatactgcgctgcggtgctcggcaccgcccaccgagggcgcgtgcgcgccgggcaagcccactctagtgtgctccagcgcggcagggagttggtcgtactcgcagcagaggcggccgagggtgtgctctggggagggcccgcataagacggacctcatggccttcagtcccagccttcctccttgtctgggttctgcagagggaacaggccagagggaggaggactcagaatgcttgaaagagccacgacagcccaaccctgactggcgttactctgcctccctgagagcaggcatgcacagctctgtgcacctagaggaggctggcattctacgggctggtccaggagggcctgatcagcagtggccaacagtatccagtgcaacaccagaaccagaggcaggagaagtgtcccctccagtcggtgcgggtgtcaacagcaacagctggacctttaaatacggaccaggcaaccccaaacaatccggtcccggtgagttgcccgacaaattcattatcccaggatctcctgcaatcatctccatccggcaggagcctactaacagccaaattgacaaaagtgacttcataaccttcggcaaaaaggaggagaccaagaaaaagaagaaaaagaagaagggtaacaagacccaggagaaaaaagagaaagggaacagcacgactgacaacagtgaccagtgaggtcctcaaatggaaacaagccacttagccagtttttgtaataatggcaaatctctcccatgtagcaattccctgctcctttttcctatctacatgagccctcttagagacctcagaaatctgcagaaagttccctgtgtctgtctagaacgcatttaacaggttttgtcgtaaaagctttactaagtctggtgttaactctttctctccactctggcttgttttcagaacctaaaaagcagacccaagtttcctttctcctccgccgcaaaggagaggcttcccagccccgccagtgagaggttggactctctgccctgtgctccggggatcctgtcttgatgacacttgcagggcaggctgaaaagttttgagattgagcagcttgggagtttgtggccactgggtatgtgtggctaccgcgggtatgcgagtgccagatattggctgagacgagccagcttagactaattggtacaaggaaggcaagaaaacaaagacaaataaacagcggaagttatcagtatggaggggaagtgtaaacttaaagggaccagactttctaaatcttacaactcaagaggtggcagccaccctctaggagacaaaactacccccactgacaaggctttaggagaccctaaagtctgttggctgtgacgtcattatacctaaaatctgcatcatacctgcaagccaacagttcagtgttttaacagagaaccaccctgggaaacagaagcagatctgatgtgtttcctatacatgtcctgtgctcactttattaaaaattcttttgcacacaatgtttatgaaaaggccagatccttttccaatacttatgcaaaagcaaaagaaaaccccgacacctcacctttcgctgtttgttgtttcatagatttatttaaaaaaagagaaagtctatagctataaatctttaaagagaaatatgaatacaattcccctaaactctcctcaaaagagaattcagtctacagccatttaaatgatcattgctgctacagaagtgctttaagagaattgcctgaaacatctgtattatatcggccacctgccaatcacagctttactctttcaggtcactctggggctgcctcttgcatgtattactaaataaaatgatctctctttctctctctctctctcttttctaagaaacaattatgtgcactttgatacacaaccttctctaaccaactatatatcaagacccaaaaattgaagaaaaatattgttttctcatacagtgagcagatttttcaatctactaattctgtgacttgtcttggtgtgctagcctacaccttctctttggtttagttttccttttctataacactctgaattgctaatcttactaacacctatgatgttacctgaaatcaatctcccatatgtatgctgtatgctatgctaagactcctgaaatatacttactctgtgcttgtgtatgtgaatgttaatgcaactattacctagagtgaactttaagctttattgttgaatgtaattccattatatttccttttgtacacctgtgaaaaagtggagtagtgtttttttaaccattgttaatcagcttttgtgtatgaaagacacagtaaaatttctttcttaaatcaagatactggtgattcaaggaattttatttatggtccagccaagagccatctcgtgccaagacttctgctggcaagggaatggataaagctgttttgttctagtaacaattttggaatgaatactgacaatattccatgagggtgtgcaagcacaaattttaccaatctgacctctttgaagttgcagaatgctttgaaattctaatggtatctgaaatatcagctcatagaaagtaacaaaatttgctgtcaccttaaataagacattttaattttgttataatgtacaatttagaagtttgattaattatattatctatttaggcattaatataaaagaggtaggagtctgttatttaaaaaaagcattaaatttaaaaaaaaactgtcttgtctacttttagcttcattctcccatattttgaagggtgtgtaacttcagctctgcaggattgcatggggtaaaacttgttaccaacacatgtgaaccattgctacattgtaggttgtgatcattttgccccactgaagcccatgtatctgaccttacgtgccttttgaactaggagaatcgggctaatttattaatgatgataattataatgtatctgtacagcactttttacatttgcgaagtgctttccaatccatgttagttactagttattacagctgtaaggataaaacacgtcatgtggattcattttgaattggtgctattggtatttcctctgttattgctaataaatgaaaatggtggtatg

SEQ ID NO: 172108 - DNA, 4884 bp, Homo sapiens
  Payload ID: 13815
  Gene Symbol: PCDHA13
  Gene Name: protocadherin alpha 13
  ENST ID: ENST00000409494
  CDS Start-End: 62-2776
gacagtttgaggtaaggcgttgtatatattgcagatagctctgaggtttttggagtgtaccatgctgtcttcctggcaaggaggcccaagaccgcggcaactactgctctggcttctgatcctcgcagcctgggagacgggtagtggccagctccactactccgtccccgaggaagcaaaacacggcaccttcgtgggccgcatcgctcaggacctggggctggagctggcggagctggtgccgcgcctgttccgggtggcgtccaaaagacacggggaccttctggaggtaaatctgcagaatggcattttgtttgtgaattctcggatcgaccgcgaggagctgtgtgggcggagcgcggagtgcagcatccacctggaggtgatcgtggacaggcctctgcaggttttccatgtggaggtgaaggtgagggacattaacgacaacccgcccatattccctgaaagcaagaaacgaataatcattgcagaatctagacctccggaaactcgatttccactagatggcgcatccgatgcagatattggagtaaactcggcattgacctaccgactggatcccaacgattatttcactttggacgcacaaaacagtcttgagcaaatgtcttcattatcacttgtactgaggaaaacactggacagagaggaaattcaggaacatagtttattactgacagccagtgatggaggtaaacccgagctgactggcacagttcagctgctcatcacgattctggacgtgaatgacaacgccccggaattttaccaatccgtttataaagtgacggtgttagagaacgccttcaatggaacattagtgatcaagctaaatgccacagatcctgatgatggtacaaatggagatatagtttactcatttagaaggcctgtatggcctgcagtggtatatgcatttaccataaatccgaacaatggagaaattaggacaaaaggcaaactagatttcgaagaaaagaaattatatgaaatatccgtggaggcagttgacaaaggaaatattccaatggcgggtcattgtacccttttggtggaagtactagatgtaaatgataacgccccagaggttaccatcacttctttgtcactccccatcagagaagacactcagcctagcgccattattgccctaatcagtgtgtccgatcgtgactctggctcaaatggacaggtcacctgcaccttgacgccgcatgtccccttcaagctggtgtccacctacaagaactactactcattagtgctggacagcgccctggaccgcgagagcgtatcagcctatgaactggtggtgaccgcgcgggacgggggctcgccttcgctgtgggccacggccagcgtgtcggtgggggtggccgacgtgaacgacaacgcgccggcgttcgcgcagcccgagtacacggtgttcgtgaaggaaaacaatccgccgggctgccacatcttcacggtgtctgctcaggacgcggacgcacaggagaacgcgctggtctcctactcgctggtggagcggcgggtgggcgagcgtgcgctgtcgagctacgtgtcggtgcacgcggagagcggcaaggtgtacgcgctgcagccgttggaccacgaggagctggagctgttgcagttccaggtgagcgcgcgcgactctggcgtgccgcctctgggcagcaacgtgacgctgcaggtgttcgtgctggacgagaacgacaacgctccggcgctgctgacgcccggggctggcagcgcgggaggcacagtgagcgagctgatgccgcggtcggtgggtgcaggccacgtggtggcgaaggtgcgcgcggtggacgccgattcgggctacaatgcgtggctttcgtatgaattgcagctggcggcggtcggcgcgcgcatcccgttccgcgtggggctgtacactggcgagatcagcacgacgcgccctctggacgaggtggacgcgccgcaccaccgccttctggtgctggtgaaggaccacggtgagcccgcgctgacggccacggcaacggtgctgttgtcgctggtggagagcggccaagcgccacaggcttcgtcgagggcgtcggcaggcgctgtgggtccagaagcggcgctggtggatgtcaatgtttacttgatcattgccatctgcgcggtgtccagcctgttggtgctcacgttgctgctgtatactgcgctgcggtgctcggcaccgcccaccgagggcgcgtgcgcgccgggcaagcccactctagtgtgctccagcgcggcagggagttggtcgtactcgcagcagaggcggccgagggtgtgctctggggagggcccgcataagacggacctcatggccttcagtcccagccttcctccttgtctgggttctgcagagggaacaggccagagggaggaggactcagaatgcttgaaagagccacgacagcccaaccctgactggcgttactctgcctccctgagagcaggcatgcacagctctgtgcacctagaggaggctggcattctacgggctggtccaggagggcctgatcagcagtggccaacagtatccagtgcaacaccagaaccagaggcaggagaagtgtcccctccagtcggtgcgggtgtcaacagcaacagctggacctttaaatacggaccaggcaaccccaaacaatccggtcccgaacctaaaaagcagacccaagtttcctttctcctccgccgcaaaggagaggcttcccagccccgccagtgagaggttggactctctgccctgtgctccggggatcctgtcttgatgacacttgcagggcaggctgaaaagttttgagattgagcagcttgggagtttgtggccactgggtatgtgtggctaccgcgggtatgcgagtgccagatattggctgagacgagccagcttagactaattggtacaaggaaggcaagaaaacaaagacaaataaacagcggaagttatcagtatggaggggaagtgtaaacttaaagggaccagactttctaaatcttacaactcaagaggtggcagccaccctctaggagacaaaactacccccactgacaaggctttaggagaccctaaagtctgttggctgtgacgtcattatacctaaaatctgcatcatacctgcaagccaacagttcagtgttttaacagagaaccaccctgggaaacagaagcagatctgatgtgtttcctatacatgtcctgtgctcactttattaaaaattcttttgcacacaatgtttatgaaaaggccagatccttttccaatacttatgcaaaagcaaaagaaaaccccgacacctcacctttcgctgtttgttgtttcatagatttatttaaaaaaagagaaagtctatagctataaatctttaaagagaaatatgaatacaattcccctaaactctcctcaaaagagaattcagtctacagccatttaaatgatcattgctgctacagaagtgctttaagagaattgcctgaaacatctgtattatatcggccacctgccaatcacagctttactctttcaggtcactctggggctgcctcttgcatgtattactaaataaaatgatctctctttctctctctctctctcttttctaagaaacaattatgtgcactttgatacacaaccttctctaaccaactatatatcaagacccaaaaattgaagaaaaatattgttttctcatacagtgagcagatttttcaatctactaattctgtgacttgtcttggtgtgctagcctacaccttctctttggtttagttttccttttctataacactctgaattgctaatcttactaacacctatgatgttacctgaaatcaatctcccatatgtatgctgtatgctatgctaagactcctgaaatatacttactctgtgcttgtgtatgtgaatgttaatgcaactattacctagagtgaactttaagctttattgttgaatgtaattccattatatttccttttgtacacctgtgaaaaagtggagtagtgtttttttaaccattgttaatcagcttttgtgtatgaaagacacagtaaaatttctttcttaaatcaagatactggtgattcaaggaattttatttatggtccagccaagagccatctcgtgccaagacttctgctggcaagggaatggataaagctgttttgttctagtaacaattttggaatgaatactgacaatattccatgagggtgtgcaagcacaaattttaccaatctgacctctttgaagttgcagaatgctttgaaattctaatggtatctgaaatatcagctcatagaaagtaacaaaatttgctgtcaccttaaataagacattttaattttgttataatgtacaatttagaagtttgattaattatattatctatttaggcattaatataaaagaggtaggagtctgttatttaaaaaaagcattaaatttaaaaaaaaactgtcttgtctacttttagcttcattctcccatattttgaagggtgtgtaacttcagctctgcaggattgcatggggtaaaacttgttaccaacacatgtgaaccattgctacattgtaggttgtgatcattttgccccactgaagcccatgtatctgaccttacgtgccttttgaactaggagaatcgggctaatttattaatgatgataattataatgtatctgtacagcactttttacatttgcgaagtgctttccaatccatgttagttactagttattacagctgtaaggataaaacacgtcatgtggattcattttgaattggtgctattggtatttcctctgttattgctaataaatgaaaatggtggtatg

SEQ ID NO: 172109 - DNA, 2427 bp, Homo sapiens
  Payload ID: 13815
  Gene Symbol: PCDHA13
  Gene Name: protocadherin alpha 13
  Uniprot ID: Q9Y5I0
  ENST ID: ENST00000617769
  CDS Start-End: 1-2424
atgctgtcttcctggcaaggaggcccaagaccgcggcaactactgctctggcttctgatcctcgcagcctgggagacgggtagtggccagctccactactccgtccccgaggaagcaaaacacggcaccttcgtgggccgcatcgctcaggacctggggctggagctggcggagctggtgccgcgcctgttccgggtggcgtccaaaagacacggggaccttctggaggtaaatctgcagaatggcattttgtttgtgaattctcggatcgaccgcgaggagctgtgtgggcggagcgcggagtgcagcatccacctggaggtgatcgtggacaggcctctgcaggttttccatgtggaggtgaaggtgagggacattaacgacaacccgcccatattccctgaaagcaagaaacgaataatcattgcagaatctagacctccggaaactcgatttccactagatggcgcatccgatgcagatattggagtaaactcggcattgacctaccgactggatcccaacgattatttcactttggacgcacaaaacagtcttgagcaaatgtcttcattatcacttgtactgaggaaaacactggacagagaggaaattcaggaacatagtttattactgacagccagtgatggaggtaaacccgagctgactggcacagttcagctgctcatcacgattctggacgtgaatgacaacgccccggaattttaccaatccgtttataaagtgacggtgttagagaacgccttcaatggaacattagtgatcaagctaaatgccacagatcctgatgatggtacaaatggagatatagtttactcatttagaaggcctgtatggcctgcagtggtatatgcatttaccataaatccgaacaatggagaaattaggacaaaaggcaaactagatttcgaagaaaagaaattatatgaaatatccgtggaggcagttgacaaaggaaatattccaatggcgggtcattgtacccttttggtggaagtactagatgtaaatgataacgccccagaggttaccatcacttctttgtcactccccatcagagaagacactcagcctagcgccattattgccctaatcagtgtgtccgatcgtgactctggctcaaatggacaggtcacctgcaccttgacgccgcatgtccccttcaagctggtgtccacctacaagaactactactcattagtgctggacagcgccctggaccgcgagagcgtatcagcctatgaactggtggtgaccgcgcgggacgggggctcgccttcgctgtgggccacggccagcgtgtcggtgggggtggccgacgtgaacgacaacgcgccggcgttcgcgcagcccgagtacacggtgttcgtgaaggaaaacaatccgccgggctgccacatcttcacggtgtctgctcaggacgcggacgcacaggagaacgcgctggtctcctactcgctggtggagcggcgggtgggcgagcgtgcgctgtcgagctacgtgtcggtgcacgcggagagcggcaaggtgtacgcgctgcagccgttggaccacgaggagctggagctgttgcagttccaggtgagcgcgcgcgactctggcgtgccgcctctgggcagcaacgtgacgctgcaggtgttcgtgctggacgagaacgacaacgctccggcgctgctgacgcccggggctggcagcgcgggaggcacagtgagcgagctgatgccgcggtcggtgggtgcaggccacgtggtggcgaaggtgcgcgcggtggacgccgattcgggctacaatgcgtggctttcgtatgaattgcagctggcggcggtcggcgcgcgcatcccgttccgcgtggggctgtacactggcgagatcagcacgacgcgccctctggacgaggtggacgcgccgcaccaccgccttctggtgctggtgaaggaccacggtgagcccgcgctgacggccacggcaacggtgctgttgtcgctggtggagagcggccaagcgccacaggcttcgtcgagggcgtcggcaggcgctgtgggtccagaagcggcgctggtggatgtcaatgtttacttgatcattgccatctgcgcggtgtccagcctgttggtgctcacgttgctgctgtatactgcgctgcggtgctcggcaccgcccaccgagggcgcgtgcgcgccgggcaagcccactctagtgtgctccagcgcggcagggagttggtcgtactcgcagcagaggcggccgagggtgtgctctggggagggcccgcataagacggacctcatggccttcagtcccagccttcctccttgtctgggttctgcagagggaacaggccagagggaggaggactcagaatgcttgaaagaggtaagcttatattttaaaaaattgtcttagtaa

SEQ ID NO: 172110 - DNA, 2626 bp, Homo sapiens
  Payload ID: 13816
  Gene Symbol: PCDHA2
  Gene Name: protocadherin alpha 2
  Uniprot ID: Q9Y5H9
  ENST ID: ENST00000378132
  CDS Start-End: 114-2588
acttcagagaagcggaggaataagagaagcagcaggactttaacagagactagaatatttaaatttttgcaaaacatgctcttctaatttgatcaaaacattgaggattggtaatggcgtcttctatcagaaggggccgaggggcctggacacggctgctctcgcttctgctcctcgcagcctgggaggtggggagcggccagctccgctactccgtccccgaggaggccaaacacggcaccttcgtgggccgcatcgcgcaggacctggggctggagctggaggagctggtgccgcgcctgttccgggtggcgtccaaaagacacggggaccttctggaggtaaatctgcagaatggcattttgtttgtgaattctcggatcgaccgggaggagctgtgcgggcggagcgcggaatgtagcatccacgtggaggtgatcgtggacaggccgctgcaggttttccatgtggaagtggaggtgaaggacattaacgacaacccgccaatatttccaatgacagtaaagactatccggtttcccgaatcaaggctgcttgattctcggtttcctctagagggagcatctgatgcagatataggagtaaatgctcttctctcctacaagctcagctccagtgagtttttcttcctagatatacaggcaaatgatgaactaagcgaatctttgtctctcgtgctggggaaatcgctggacagagaggaaactgctgaggttaatttgttactggtggctactgatgggggcaaacctgagctcacgggcaccgttcaaatacttattaaggtattagatgtaaatgacaatgaaccaacttttgcccaatcagtttacaaagtaaaattgttagagaatacggcaaatgggaccttagtggttaagttaaacgcttctgatgcagatgaaggaccgaacagcgagattgtgtattcactcggtagtgatgtgtcctccactatacagactaagtttaccatagatcccatctcaggggaaatcagaactaagggaaaattagattatgaagaagcaaagtcctacgagattcaggtcactgcaactgacaaaggaaccccttcaatgtcaggacattgtaaaatttcattaaaacttgtggacatcaatgataacacaccagaagtctcaataacgtctctctcacttcccatctcagagaacgcttccctgggcactgtcattgctctcatcacggtgtcggatcgcgactctggtacgaatggacatgtcacctgctccctgacgccccacgtccctttcaagctggtgtccaccttcaagaattactactcgttggtgctggacagcgccctggaccgcgagagcgtgtcagcctatgagctggtggtgaccgcacgggacgggggctcgccttcactgtgggccaccaccagcgtgtccatcgaggtggccgacgtgaacgacaacgcgccggcgttcgcacagcctgagtacacagtattcgtgaaggagaacaacccgccgggctgccacatcttcacggtgtcagcgtgggatgcggacgcgcaggagaacgcgctggtgtcctactcgctggtggagcggcgggtgggcgagcgcgcgttgtcgagctacgtttcggtgcacgcggagagcggcaaggtgtacgcgctgcagccgctggaccacgaggaagtggagctgctgcagttccaggtgagcgcgcgggatgcgggcgtgccgcctctgggcagcaacgtgacgctgcaggtgttcgtgctggacgagaacgacaacgcgccggcactgttggcgcctagggctggcaccgctgctggcgcagtgagtgagctggtgccgtggtcggtgggtgcagggcacgtggtggcgaaggtgcgcgcagtggacgctgactcaggctacaacgcgtggctttcgtacgagcttcagctgggtactggcagcgctcgcatcccgttccgcgtggggctatacacgggtgagatcagcacgacacgtgccctagacgaggctgactcccctcgacaccgcctactcgtgctggtgaaggaccacggcgaaccagcgttgacagccacggccaccgtgttagtgtcgttggtggaaagtggccaggcacccaaggcctcgtcgcgggcgtgggtgggcgccgcgggctcagaggctacgctggtggatgtcaacgtgtacctgatcatcgccatctgcgcggtatccagcctgttggtgctcacggtgctgctgtacactgcgctgcggtgctcggtgccacccaccgagggtgcgcgcgcgccaggaaagcccacgctggtgtgctccagcgccgtggggagctggtcttactcgcagcagaggcggcagagggtgtgctctggggaggacccccccaagacggacctcatggccttcagccctagcttatctcaaggtccagactccgcagaagagaaacagctctcagaatcagaatacgtaggaaaggtgagtcttttactttttcttgccaattctaaaattgttctttttaaaaaattctatatgatttctactagttatttagattcatagttcttcatttattttatatcatcctaccgtgcgatttt

SEQ ID NO: 172111 - DNA, 3056 bp, Homo sapiens
  Payload ID: 13816
  Gene Symbol: PCDHA2
  Gene Name: protocadherin alpha 2
  Uniprot ID: Q9Y5H9
  ENST ID: ENST00000520672
  CDS Start-End: 107-2533
agaagcggaggaataagagaagcagcaggactttaacagagactagaatatttaaatttttgcaaaacatgctcttctaatttgatcaaaacattgaggattggtaatggcgtcttctatcagaaggggccgaggggcctggacacggctgctctcgcttctgctcctcgcagcctgggaggtggggagcggccagctccgctactccgtccccgaggaggccaaacacggcaccttcgtgggccgcatcgcgcaggacctggggctggagctggaggagctggtgccgcgcctgttccgggtggcgtccaaaagacacggggaccttctggaggtaaatctgcagaatggcattttgtttgtgaattctcggatcgaccgggaggagctgtgcgggcggagcgcggaatgtagcatccacgtggaggtgatcgtggacaggccgctgcaggttttccatgtggaagtggaggtgaaggacattaacgacaacccgccaatatttccaatgacagtaaagactatccggtttcccgaatcaaggctgcttgattctcggtttcctctagagggagcatctgatgcagatataggagtaaatgctcttctctcctacaagctcagctccagtgagtttttcttcctagatatacaggcaaatgatgaactaagcgaatctttgtctctcgtgctggggaaatcgctggacagagaggaaactgctgaggttaatttgttactggtggctactgatgggggcaaacctgagctcacgggcaccgttcaaatacttattaaggtattagatgtaaatgacaatgaaccaacttttgcccaatcagtttacaaagtaaaattgttagagaatacggcaaatgggaccttagtggttaagttaaacgcttctgatgcagatgaaggaccgaacagcgagattgtgtattcactcggtagtgatgtgtcctccactatacagactaagtttaccatagatcccatctcaggggaaatcagaactaagggaaaattagattatgaagaagcaaagtcctacgagattcaggtcactgcaactgacaaaggaaccccttcaatgtcaggacattgtaaaatttcattaaaacttgtggacatcaatgataacacaccagaagtctcaataacgtctctctcacttcccatctcagagaacgcttccctgggcactgtcattgctctcatcacggtgtcggatcgcgactctggtacgaatggacatgtcacctgctccctgacgccccacgtccctttcaagctggtgtccaccttcaagaattactactcgttggtgctggacagcgccctggaccgcgagagcgtgtcagcctatgagctggtggtgaccgcacgggacgggggctcgccttcactgtgggccaccaccagcgtgtccatcgaggtggccgacgtgaacgacaacgcgccggcgttcgcacagcctgagtacacagtattcgtgaaggagaacaacccgccgggctgccacatcttcacggtgtcagcgtgggatgcggacgcgcaggagaacgcgctggtgtcctactcgctggtggagcggcgggtgggcgagcgcgcgttgtcgagctacgtttcggtgcacgcggagagcggcaaggtgtacgcgctgcagccgctggaccacgaggaagtggagctgctgcagttccaggtgagcgcgcgggatgcgggcgtgccgcctctgggcagcaacgtgacgctgcaggtgttcgtgctggacgagaacgacaacgcgccggcactgttggcgcctagggctggcaccgctgctggcgcagtgagtgagctggtgccgtggtcggtgggtgcagggcacgtggtggcgaaggtgcgcgcagtggacgctgactcaggctacaacgcgtggctttcgtacgagcttcagctgggtactggcagcgctcgcatcccgttccgcgtggggctatacacgggtgagatcagcacgacacgtgccctagacgaggctgactcccctcgacaccgcctactcgtgctggtgaaggaccacggcgaaccagcgttgacagccacggccaccgtgttagtgtcgttggtggaaagtggccaggcacccaaggcctcgtcgcgggcgtgggtgggcgccgcgggctcagaggctacgctggtggatgtcaacgtgtacctgatcatcgccatctgcgcggtatccagcctgttggtgctcacggtgctgctgtacactgcgctgcggtgctcggtgccacccaccgagggtgcgcgcgcgccaggaaagcccacgctggtgtgctccagcgccgtggggagctggtcttactcgcagcagaggcggcagagggtgtgctctggggaggacccccccaagacggacctcatggccttcagccctagcttatctcaaggtccagactccgcagaagagaaacagctctcagaatcagaatacgtaggaaagatatggaacttcaatcttcaaatccagcttgcctcttgaaactattgtctaacaagactcttggcaaagacattttgaagactttggaattttcacttcacagatgtactgatgctatgccaaataaatattgaatagctaccaaataaacattgttttctattctgctgcattccccatctgtacattaaaatacctggtaaatgaaaatattacaaatgaaatgggtgaaaatggaattcttcctccttttttccaatgtgcttgatgtcaatgatcattttgtaaaaatatagtttgggtccccacatagtgaaagtactctggtttctgtttgattcagaaatttggtgggttttttgttgttgttttggtttttgtgtgtgtgtgtttgtgtgagtgtagttcttcaatagagagggagcgtaaagctattttcactagattgattttttgtttagacaaacaggatgaaaataactttatggatataggaggcaaggaaagtttttaaatggctaccattatgtctttatatattaaatttctttatgtaagaaaa

SEQ ID NO: 172112 - DNA, 5254 bp, Homo sapiens
  Payload ID: 13816
  Gene Symbol: PCDHA2
  Gene Name: protocadherin alpha 2
  Uniprot ID: Q9Y5H9
  ENST ID: ENST00000526136
  CDS Start-End: 1-2847
atggcgtcttctatcagaaggggccgaggggcctggacacggctgctctcgcttctgctcctcgcagcctgggaggtggggagcggccagctccgctactccgtccccgaggaggccaaacacggcaccttcgtgggccgcatcgcgcaggacctggggctggagctggaggagctggtgccgcgcctgttccgggtggcgtccaaaagacacggggaccttctggaggtaaatctgcagaatggcattttgtttgtgaattctcggatcgaccgggaggagctgtgcgggcggagcgcggaatgtagcatccacgtggaggtgatcgtggacaggccgctgcaggttttccatgtggaagtggaggtgaaggacattaacgacaacccgccaatatttccaatgacagtaaagactatccggtttcccgaatcaaggctgcttgattctcggtttcctctagagggagcatctgatgcagatataggagtaaatgctcttctctcctacaagctcagctccagtgagtttttcttcctagatatacaggcaaatgatgaactaagcgaatctttgtctctcgtgctggggaaatcgctggacagagaggaaactgctgaggttaatttgttactggtggctactgatgggggcaaacctgagctcacgggcaccgttcaaatacttattaaggtattagatgtaaatgacaatgaaccaacttttgcccaatcagtttacaaagtaaaattgttagagaatacggcaaatgggaccttagtggttaagttaaacgcttctgatgcagatgaaggaccgaacagcgagattgtgtattcactcggtagtgatgtgtcctccactatacagactaagtttaccatagatcccatctcaggggaaatcagaactaagggaaaattagattatgaagaagcaaagtcctacgagattcaggtcactgcaactgacaaaggaaccccttcaatgtcaggacattgtaaaatttcattaaaacttgtggacatcaatgataacacaccagaagtctcaataacgtctctctcacttcccatctcagagaacgcttccctgggcactgtcattgctctcatcacggtgtcggatcgcgactctggtacgaatggacatgtcacctgctccctgacgccccacgtccctttcaagctggtgtccaccttcaagaattactactcgttggtgctggacagcgccctggaccgcgagagcgtgtcagcctatgagctggtggtgaccgcacgggacgggggctcgccttcactgtgggccaccaccagcgtgtccatcgaggtggccgacgtgaacgacaacgcgccggcgttcgcacagcctgagtacacagtattcgtgaaggagaacaacccgccgggctgccacatcttcacggtgtcagcgtgggatgcggacgcgcaggagaacgcgctggtgtcctactcgctggtggagcggcgggtgggcgagcgcgcgttgtcgagctacgtttcggtgcacgcggagagcggcaaggtgtacgcgctgcagccgctggaccacgaggaagtggagctgctgcagttccaggtgagcgcgcgggatgcgggcgtgccgcctctgggcagcaacgtgacgctgcaggtgttcgtgctggacgagaacgacaacgcgccggcactgttggcgcctagggctggcaccgctgctggcgcagtgagtgagctggtgccgtggtcggtgggtgcagggcacgtggtggcgaaggtgcgcgcagtggacgctgactcaggctacaacgcgtggctttcgtacgagcttcagctgggtactggcagcgctcgcatcccgttccgcgtggggctatacacgggtgagatcagcacgacacgtgccctagacgaggctgactcccctcgacaccgcctactcgtgctggtgaaggaccacggcgaaccagcgttgacagccacggccaccgtgttagtgtcgttggtggaaagtggccaggcacccaaggcctcgtcgcgggcgtgggtgggcgccgcgggctcagaggctacgctggtggatgtcaacgtgtacctgatcatcgccatctgcgcggtatccagcctgttggtgctcacggtgctgctgtacactgcgctgcggtgctcggtgccacccaccgagggtgcgcgcgcgccaggaaagcccacgctggtgtgctccagcgccgtggggagctggtcttactcgcagcagaggcggcagagggtgtgctctggggaggacccccccaagacggacctcatggccttcagccctagcttatctcaaggtccagactccgcagaagagaaacagctctcagaatcagaatacgtaggaaagccacgacagcccaaccctgactggcgttactctgcctccctgagagcaggcatgcacagctctgtgcacctagaggaggctggcattctacgggctggtccaggagggcctgatcagcagtggccaacagtatccagtgcaacaccagaaccagaggcaggagaagtgtcccctccagtcggtgcgggtgtcaacagcaacagctggacctttaaatacggaccaggcaaccccaaacaatccggtcccggtgagttgcccgacaaattcattatcccaggatctcctgcaatcatctccatccggcaggagcctactaacagccaaattgacaaaagtgacttcataaccttcggcaaaaaggaggagaccaagaaaaagaagaaaaagaagaagggtaacaagacccaggagaaaaaagagaaagggaacagcacgactgacaacagtgaccagtgaggtcctcaaatggaaacaagccacttagccagtttttgtaataatggcaaatctctcccatgtagcaattccctgctcctttttcctatctacatgagccctcttagagacctcagaaatctgcagaaagttccctgtgtctgtctagaacgcatttaacaggttttgtcgtaaaagctttactaagtctggtgttaactctttctctccactctggcttgttttcagaacctaaaaagcagacccaagtttcctttctcctccgccgcaaaggagaggcttcccagccccgccagtgagaggttggactctctgccctgtgctccggggatcctgtcttgatgacacttgcagggcaggctgaaaagttttgagattgagcagcttgggagtttgtggccactgggtatgtgtggctaccgcgggtatgcgagtgccagatattggctgagacgagccagcttagactaattggtacaaggaaggcaagaaaacaaagacaaataaacagcggaagttatcagtatggaggggaagtgtaaacttaaagggaccagactttctaaatcttacaactcaagaggtggcagccaccctctaggagacaaaactacccccactgacaaggctttaggagaccctaaagtctgttggctgtgacgtcattatacctaaaatctgcatcatacctgcaagccaacagttcagtgttttaacagagaaccaccctgggaaacagaagcagatctgatgtgtttcctatacatgtcctgtgctcactttattaaaaattcttttgcacacaatgtttatgaaaaggccagatccttttccaatacttatgcaaaagcaaaagaaaaccccgacacctcacctttcgctgtttgttgtttcatagatttatttaaaaaaagagaaagtctatagctataaatctttaaagagaaatatgaatacaattcccctaaactctcctcaaaagagaattcagtctacagccatttaaatgatcattgctgctacagaagtgctttaagagaattgcctgaaacatctgtattatatcggccacctgccaatcacagctttactctttcaggtcactctggggctgcctcttgcatgtattactaaataaaatgatctctctttctctctctctctctcttttctaagaaacaattatgtgcactttgatacacaaccttctctaaccaactatatatcaagacccaaaaattgaagaaaaatattgttttctcatacagtgagcagatttttcaatctactaattctgtgacttgtcttggtgtgctagcctacaccttctctttggtttagttttccttttctataacactctgaattgctaatcttactaacacctatgatgttacctgaaatcaatctcccatatgtatgctgtatgctatgctaagactcctgaaatatacttactctgtgcttgtgtatgtgaatgttaatgcaactattacctagagtgaactttaagctttattgttgaatgtaattccattatatttccttttgtacacctgtgaaaaagtggagtagtgtttttttaaccattgttaatcagcttttgtgtatgaaagacacagtaaaatttctttcttaaatcaagatactggtgattcaaggaattttatttatggtccagccaagagccatctcgtgccaagacttctgctggcaagggaatggataaagctgttttgttctagtaacaattttggaatgaatactgacaatattccatgagggtgtgcaagcacaaattttaccaatctgacctctttgaagttgcagaatgctttgaaattctaatggtatctgaaatatcagctcatagaaagtaacaaaatttgctgtcaccttaaataagacattttaattttgttataatgtacaatttagaagtttgattaattatattatctatttaggcattaatataaaagaggtaggagtctgttatttaaaaaaagcattaaatttaaaaaaaaactgtcttgtctacttttagcttcattctcccatattttgaagggtgtgtaacttcagctctgcaggattgcatggggtaaaacttgttaccaacacatgtgaaccattgctacattgtaggttgtgatcattttgccccactgaagcccatgtatctgaccttacgtgccttttgaactaggagaatcgggctaatttattaatgatgataattataatgtatctgtacagcactttttacatttgcgaagtgctttccaatccatgttagttactagttattacagctgtaaggataaaacacgtcatgtggattcattttgaattggtgctattggtatttcctctgttattgctaataaatgaaaatggtggtatg

SEQ ID NO: 172113 - DNA, 5260 bp, Homo sapiens
  Payload ID: 13817
  Gene Symbol: PCDHA3
  Gene Name: protocadherin alpha 3
  Uniprot ID: Q9Y5H8
  ENST ID: ENST00000522353
  CDS Start-End: 1-2853
atgttgttctcctggcgagaagatcctggagcccagtgcctgctgctttctcttctgctcctcgcagcctcggaggtggggagcggccagctccactactccgtctctgaggaggccaagcatggcaccttcgtgggccgcatcgcgcaggacctggggctggagctggcggagctggtgccgcgcctgttccgggtggcgtccaaaagacacggggaccttctggaggtaaatctgcagaatggcattttgtttgtgaattctcggatagaccgcgaggaactgtgcgggcggagcgcggagtgcagcatccacctggaggtgatcgtggacaggccgctgcaggttttccatgtggaggtggaagtgaaggacattaatgacaacgcgccagtttttccaatggctgtaaagaatctgtttatttccgaatcccgacagcctggctctcggttttcgctagagggcgcatcagatgcagatatcggaacaaattcgttgttgacttacagtcttgattccactgaatattttaccttggacgttaaaagaaatgatgaggaaattaaatcccttggactcgtgttgaaaaaaaatttaaatcgagaggacactcctaagcattatttactaataacagcaattgatggtgggaaaccagagctcactggcacgactcaactaaagatcactgttttagatgtaaacgacaacgccccagcgtttgagaggacgatctataaagtcagattactcgaaaatgcaccaaatggtaccctagtggtgaccgttaacgccaccgatttggatgaaggagtaaataaggatatcgcgtattctttcaatacggacatgtcagcagatattctgtcaaaattccatttagatccagtcaatggacaaatcagtgtaaagggtaacatagatttcgaggaaagtaagtcatatgaaatccaggtagaagccacggataaaggaaatcccccaatgtcagatcactgcacagttctactcgaaattgtggacatcaatgataatgtacctgagttagttattcaatcactatctttacctgtattagaagactctccacttagcacagtcatcgctctgatcagcgtgtccgaccgcgactcaggagtcaatggacaggtcacctgctcgctgacgccccacgtccccttcaagctggtgtccaccttcaagaattactactcattggtgctggacagccctctggaccgcgagagcgtgtcggcctatgagctggtggtgactgctcgggacgggggctcgccttcactgtgggccacggccagcgtgtccgtggaggtggccgacgtgaacgacaatgcgccggcattctcgcagtccgagtacacggtgttcgtgaaggagaacaacccgccgggctgccacatcttcacggtgtctgcgcgggacgcggacgcgcaggagaacgccctggtgtcctactcgctggtggaacggcgggtgggggagcgcgcgctgtcgagctacgtgtcggtacacgcggagagcggcaaggtgtacgcgctgcagccgctggaccacgaggagctagagctgctgcagttccaggtgagtgcgcgcgatgcgggcgtgccgcctctgggcagcaacgtgacgctgcaggtgttcgtgctggacgagaacgacaacgcgccggcactgctgatgcctcgggtgggtggcatcggtggcgcagtgagcgagctggtgccgcggtcagtgggtgcgggccacgtggtagcgaaggtgcgcgcagtggatgcagactcaggctacaacgcgtggctttcgtatgagctgcagcctgggaccggcggtgcgcgcatcccgtttcgcgtggggctgtacacgggagagatcagcacgacccgtgccctggacgaggtggacgccccgcgccatcgcctactggtgctggtgaaggaccacggtgaaccctcattgaccgccacggccactgtgctggtgtcgctggtggagagtggccaggcacccaaggcctcgtcccaggcgtccgctggcgccacgggcccggaagctgcactggtggatgtcaacgtgtacttgatcgtcgccatctgcgcggtgtccagtctgttggtgctcacactgctgctatatactgctctgcggtgctccgcgccgccaaccgaaggcgactgtgggccgggcaagcccacgctggtgtgctccagcgcggtggggagctggtcatactcgcagcagaggcagcagagggtgtgctctggagaggggttgcccaagaccgacctcatggcttttagccctagccttcctccttgtccaattagccgggatagagaggagaaacaggatgtggacgttgatctctcagccaaaccacgacagcccaaccctgactggcgttactctgcctccctgagagcaggcatgcacagctctgtgcacctagaggaggctggcattctacgggctggtccaggagggcctgatcagcagtggccaacagtatccagtgcaacaccagaaccagaggcaggagaagtgtcccctccagtcggtgcgggtgtcaacagcaacagctggacctttaaatacggaccaggcaaccccaaacaatccggtcccggtgagttgcccgacaaattcattatcccaggatctcctgcaatcatctccatccggcaggagcctactaacagccaaattgacaaaagtgacttcataaccttcggcaaaaaggaggagaccaagaaaaagaagaaaaagaagaagggtaacaagacccaggagaaaaaagagaaagggaacagcacgactgacaacagtgaccagtgaggtcctcaaatggaaacaagccacttagccagtttttgtaataatggcaaatctctcccatgtagcaattccctgctcctttttcctatctacatgagccctcttagagacctcagaaatctgcagaaagttccctgtgtctgtctagaacgcatttaacaggttttgtcgtaaaagctttactaagtctggtgttaactctttctctccactctggcttgttttcagaacctaaaaagcagacccaagtttcctttctcctccgccgcaaaggagaggcttcccagccccgccagtgagaggttggactctctgccctgtgctccggggatcctgtcttgatgacacttgcagggcaggctgaaaagttttgagattgagcagcttgggagtttgtggccactgggtatgtgtggctaccgcgggtatgcgagtgccagatattggctgagacgagccagcttagactaattggtacaaggaaggcaagaaaacaaagacaaataaacagcggaagttatcagtatggaggggaagtgtaaacttaaagggaccagactttctaaatcttacaactcaagaggtggcagccaccctctaggagacaaaactacccccactgacaaggctttaggagaccctaaagtctgttggctgtgacgtcattatacctaaaatctgcatcatacctgcaagccaacagttcagtgttttaacagagaaccaccctgggaaacagaagcagatctgatgtgtttcctatacatgtcctgtgctcactttattaaaaattcttttgcacacaatgtttatgaaaaggccagatccttttccaatacttatgcaaaagcaaaagaaaaccccgacacctcacctttcgctgtttgttgtttcatagatttatttaaaaaaagagaaagtctatagctataaatctttaaagagaaatatgaatacaattcccctaaactctcctcaaaagagaattcagtctacagccatttaaatgatcattgctgctacagaagtgctttaagagaattgcctgaaacatctgtattatatcggccacctgccaatcacagctttactctttcaggtcactctggggctgcctcttgcatgtattactaaataaaatgatctctctttctctctctctctctcttttctaagaaacaattatgtgcactttgatacacaaccttctctaaccaactatatatcaagacccaaaaattgaagaaaaatattgttttctcatacagtgagcagatttttcaatctactaattctgtgacttgtcttggtgtgctagcctacaccttctctttggtttagttttccttttctataacactctgaattgctaatcttactaacacctatgatgttacctgaaatcaatctcccatatgtatgctgtatgctatgctaagactcctgaaatatacttactctgtgcttgtgtatgtgaatgttaatgcaactattacctagagtgaactttaagctttattgttgaatgtaattccattatatttccttttgtacacctgtgaaaaagtggagtagtgtttttttaaccattgttaatcagcttttgtgtatgaaagacacagtaaaatttctttcttaaatcaagatactggtgattcaaggaattttatttatggtccagccaagagccatctcgtgccaagacttctgctggcaagggaatggataaagctgttttgttctagtaacaattttggaatgaatactgacaatattccatgagggtgtgcaagcacaaattttaccaatctgacctctttgaagttgcagaatgctttgaaattctaatggtatctgaaatatcagctcatagaaagtaacaaaatttgctgtcaccttaaataagacattttaattttgttataatgtacaatttagaagtttgattaattatattatctatttaggcattaatataaaagaggtaggagtctgttatttaaaaaaagcattaaatttaaaaaaaaactgtcttgtctacttttagcttcattctcccatattttgaagggtgtgtaacttcagctctgcaggattgcatggggtaaaacttgttaccaacacatgtgaaccattgctacattgtaggttgtgatcattttgccccactgaagcccatgtatctgaccttacgtgccttttgaactaggagaatcgggctaatttattaatgatgataattataatgtatctgtacagcactttttacatttgcgaagtgctttccaatccatgttagttactagttattacagctgtaaggataaaacacgtcatgtggattcattttgaattggtgctattggtatttcctctgttattgctaataaatgaaaatggtggtatg

SEQ ID NO: 172114 - DNA, 4594 bp, Homo sapiens
  Payload ID: 13817
  Gene Symbol: PCDHA3
  Gene Name: protocadherin alpha 3
  Uniprot ID: Q9Y5H8
  ENST ID: ENST00000532566
  CDS Start-End: 171-2645
ctttctccacaaaagaaataacagcgtgcattacgtattcagatactgctttgcttcatcctctctaaaatttaacaccgaggagtttaagaaatgaagataaggaactcgaattatttttaaactttggatcaatgtaaaggcaatctaatatttggaaaatacttgcaatgttgttctcctggcgagaagatcctggagcccagtgcctgctgctttctcttctgctcctcgcagcctcggaggtggggagcggccagctccactactccgtctctgaggaggccaagcatggcaccttcgtgggccgcatcgcgcaggacctggggctggagctggcggagctggtgccgcgcctgttccgggtggcgtccaaaagacacggggaccttctggaggtaaatctgcagaatggcattttgtttgtgaattctcggatagaccgcgaggaactgtgcgggcggagcgcggagtgcagcatccacctggaggtgatcgtggacaggccgctgcaggttttccatgtggaggtggaagtgaaggacattaatgacaacgcgccagtttttccaatggctgtaaagaatctgtttatttccgaatcccgacagcctggctctcggttttcgctagagggcgcatcagatgcagatatcggaacaaattcgttgttgacttacagtcttgattccactgaatattttaccttggacgttaaaagaaatgatgaggaaattaaatcccttggactcgtgttgaaaaaaaatttaaatcgagaggacactcctaagcattatttactaataacagcaattgatggtgggaaaccagagctcactggcacgactcaactaaagatcactgttttagatgtaaacgacaacgccccagcgtttgagaggacgatctataaagtcagattactcgaaaatgcaccaaatggtaccctagtggtgaccgttaacgccaccgatttggatgaaggagtaaataaggatatcgcgtattctttcaatacggacatgtcagcagatattctgtcaaaattccatttagatccagtcaatggacaaatcagtgtaaagggtaacatagatttcgaggaaagtaagtcatatgaaatccaggtagaagccacggataaaggaaatcccccaatgtcagatcactgcacagttctactcgaaattgtggacatcaatgataatgtacctgagttagttattcaatcactatctttacctgtattagaagactctccacttagcacagtcatcgctctgatcagcgtgtccgaccgcgactcaggagtcaatggacaggtcacctgctcgctgacgccccacgtccccttcaagctggtgtccaccttcaagaattactactcattggtgctggacagccctctggaccgcgagagcgtgtcggcctatgagctggtggtgactgctcgggacgggggctcgccttcactgtgggccacggccagcgtgtccgtggaggtggccgacgtgaacgacaatgcgccggcattctcgcagtccgagtacacggtgttcgtgaaggagaacaacccgccgggctgccacatcttcacggtgtctgcgcgggacgcggacgcgcaggagaacgccctggtgtcctactcgctggtggaacggcgggtgggggagcgcgcgctgtcgagctacgtgtcggtacacgcggagagcggcaaggtgtacgcgctgcagccgctggaccacgaggagctagagctgctgcagttccaggtgagtgcgcgcgatgcgggcgtgccgcctctgggcagcaacgtgacgctgcaggtgttcgtgctggacgagaacgacaacgcgccggcactgctgatgcctcgggtgggtggcatcggtggcgcagtgagcgagctggtgccgcggtcagtgggtgcgggccacgtggtagcgaaggtgcgcgcagtggatgcagactcaggctacaacgcgtggctttcgtatgagctgcagcctgggaccggcggtgcgcgcatcccgtttcgcgtggggctgtacacgggagagatcagcacgacccgtgccctggacgaggtggacgccccgcgccatcgcctactggtgctggtgaaggaccacggtgaaccctcattgaccgccacggccactgtgctggtgtcgctggtggagagtggccaggcacccaaggcctcgtcccaggcgtccgctggcgccacgggcccggaagctgcactggtggatgtcaacgtgtacttgatcgtcgccatctgcgcggtgtccagtctgttggtgctcacactgctgctatatactgctctgcggtgctccgcgccgccaaccgaaggcgactgtgggccgggcaagcccacgctggtgtgctccagcgcggtggggagctggtcatactcgcagcagaggcagcagagggtgtgctctggagaggggttgcccaagaccgacctcatggcttttagccctagccttcctccttgtccaattagccgggatagagaggagaaacaggatgtggacgttgatctctcagccaaagtgagtaatttttatttattctttccaaaatgtctttgtttttcattcctcaatgtttccactcctctggaaatacattaatagttaagtatgaattatgtgattcataattagacttttccagttttgtggttttgtggttaaaacggtaagatttttgttgctaatttttgaaccaaatcagcagtaagttatgatatccacacttgtaattttgttttgttattaggtgcagtagtagaattattttattgctaaatgcctgggtataagacaaatattttttcttagatgaattgcattatttagagaatctgacttcgacttgttttatacttatccctatacaatgcttcttcaatatcttttgccacttttcatttggacttcctactacctgttagtacaaatgttacttgctcattttatgagttcacctaatgcttataactccctattgattatgcttttccaccttcagtttcaaaaattagatcattacacctgttgtcttttatggaacctcttttattctcttattcacttgtttggagtctcaatccttattttttacttgaatatgattcattttaggccttgtgctctaatttggcaataccgtttattgtttcttgatttcccagttgggaaaaaaatcgagaataacaattgcatttagaattgcatctttgttcatctttagtttatcactactttatttaatactactttaataatactactgtattatatgttaaaatttattactaataactaaaatatcaatatgaagtgaaaatttaatagttgtatagtatatttatatattcattttaaaagaatgttttaaatcttgttaaaaataattttcaatctgaacaatatcttgaaaataattatggtatctaattttaaaactatccctactagcaaaactttttattcattagtgtcttttgcataccatactaaggatgctaatatgaaataagtttgataagccaatgttataatgttattactggttaacttctctgaatagcatcctgcctattaatgtgtgccatgcaataagtagaaaactccaaataaccagaaccaaatgaaattgaaggtagacttttttctaatcactacccctacatatttggttatctcctctagcaattagttggactcccatttaagtttccctaccactggagagaaatagtaaccaactgaaacctggttaatactcattgacagtgtgggaggtctaacacgtaaaatagatatttttcttgactcctctccttcccctcacttccattttctttatttccttttttggcactatcctttgttgctcccttgtccatgaagtagtagccatagtgtgtccatctcaggtcagtattttaaaaatttagttctgttatcagcttcttgaatataatagagtcagccaaagtacttgtcttcccagatatggaacttcaatcttcaaatccagcttgcctcttgaaactattgtctaacaagactcttggcaaagacattttgaagactttggaattttcacttcacagatgtactgatgctatgccaaataaatattgaatagctaccaaataaacattgttttctattctgctgcattccccatctgtacattaaaatacctggtaaatgaaaatattacaaatgaaatgggtgaaaatggaattcttcctccttttttccaatgtgcttgatgtcaatgatcattttgtaaaaatatagtttgggtccccacatagtgaaagtactctggtttctgtttgattcagaaatttggtgggttttttgttgttgttttggtttttgtgtgtgtgtgtttgtgtgagtgtagttcttcaatagagagggagcgtaaagctattttcactagattgattttttgtttagacaaacaggatgaaaataactttatggatataggaggcaaggaaagtttttaaatggctaccattatgtctttatatattaaatttctttatgtaagaaaa

SEQ ID NO: 172115 - DNA, 2328 bp, Homo sapiens
  Payload ID: 13818
  Gene Symbol: PCDHA4
  Gene Name: protocadherin alpha 4
  ENST ID: ENST00000378125
  CDS Start-End: 1-2328
gtagtttacagtagagtcggccaggaatcccggcgtctgctgctcttacttcttctcctcgcagcctgggaggcagggaacggtcagctccactactcggtctccgaggaggccaaacacggcaccttcgtgggccgcatcgcgcaggacctgggactggagctggcggagctggtgccgcgcctgttccgggtggcgtccaagggccgcggaggccttctggaggtaaatctgcagaatggcattttgtttgtgaattctcggatcgaccgggaggagctgtgccggcggagcgcggagtgcagcatccacctggaggtgatcgtagacaggccgctgcaggttttccatgtggacgtggaggtgagggacattaacgataacccgccggtgttcccagcaacacaaaagaacctgtccatcgcggaatccaggccgcttgactctcggtttccactagagggcgcctcggatgcagatatcggggagaacgccctgctcacttacagactgagcccaaatgaatacttttctctggaaaaaccacctgatgacgagctggtaaaaggtcttgggcttatattacggaaatctttagacagagaagaagctccggagatttttttagtgctcacagccactgatggaggcaaacccgagttgactggcaccgttcagttactcatcacagtactggatgccaatgacaatgccccagcttttgacagaaccatttataaggtgagattactagaaaatgttcctaatggaacattggtaattaaacttaacgcctcagatttagacgaaggattgaatggggacattgtttattcattctcaaatgatatttcgccaaatgtgaaatccaagtttcacatagatccaattactggacaaattattgtaaagggatatattgactttgaagaaagcaaatcctatgaaattattgtagagggcattgataagggacagctcccactttctggccattgtagagttattgtggaagtagaagacaacaacgataatgtcccagatttggaattcaagtctttatcacttccaattagagaggacgctccactgggtacagtcatcgccctgatcagcgtgtccgacaaagacatgggtgtcaatgggctggtcacctgctccttgacgtcccacgtccccttcaagctggtgtccaccttcaagaattactactcgttggtgctggacagtgccctggaccgcgagagcgtgtcagcctatgagctggtggtgaccgcgcgagacgggggctcgccttcgctgtgggccacggccagtgtttctgtggaggtggctgatgtgaacgacaacgctccggcgttcgcgcagcccgagtacacagtgttcgtgaaggagaacaacccgccgggctgccacatcttcactgtgtctgcgtgggacgcggacgcgcaggagaacgcgctggtgtcctactcgctggtagagcggcgggtaggggagcgcgcgctgtcgagctacgtttcggtgcatgcggagagcggcaaggtgtacgcgctgcagccgctggaccacgaggagctagagctgctgcagtttcaggtgaccgctcgcgatgccggcgtgccacctctgggcagcaacgtgacgctgcaggtgttcgtgctggacgaaaacgacaacgcgccagcactgctagcgcctcgggcgggtggcactggtggcgcagtgagcgagctggtgccatggtcggtgggtgtgggccacgtggtggcaaaggtgcgcgcggtggatgctgactcgggctacaacgcgtggctttcgtacgagctgcagccggggactggtggcgcgcgcatcccgttccgcgtggggctgtacactggcgagatcagcacaacgcgtgccctggacgaaacggacgctccgcgccaccgcctactggtactggtgaaggaccacggcgagcccgcgctgacggccacggccactgtgctggtgtcacttgtggagagtggacaggcgccaaaggcctcctcacgggcgttggtgggcgctgtgggtcccgatgctgcgctggtggatgtcaacgtatacctgatcattgccatctgcgcggtgtccagccttttggtgctcacgctgctgctgtacaccgcgctgcggtgctctgcgctgcccaccgagggcgcgtgcgctccgggcaagcccacgctggtgtgctccagtgcggtggggagctggtcatactcgcagcagaggaggccgagggtgtgctctggtgagggcccacccaagaccgacctcatggccttcagccccagtttacct

SEQ ID NO: 172116 - DNA, 4163 bp, Homo sapiens
  Payload ID: 13818
  Gene Symbol: PCDHA4
  Gene Name: protocadherin alpha 4
  ENST ID: ENST00000512229
  CDS Start-End: 115-2820
actctttggagtctgaaatatggaggatgcagctgcacttgactgaccgattaaaagatttcccttgactttgagaaacgatatttaatcagaacaaaatactgtgcactaaagatggagttttcctggggaagcggccaggaatcccggcgtctgctgctcttacttcttctcctcgcagcctgggaggcagggaacggtcagctccactactcggtctccgaggaggccaaacacggcaccttcgtgggccgcatcgcgcaggacctgggactggagctggcggagctggtgccgcgcctgttccgggtggcgtccaagggccgcggaggccttctggaggtaaatctgcagaatggcattttgtttgtgaattctcggatcgaccgggaggagctgtgccggcggagcgcggagtgcagcatccacctggaggtgatcgtagacaggccgctgcaggttttccatgtggacgtggaggtgagggacattaacgataacccgccggtgttcccagcaacacaaaagaacctgtccatcgcggaatccaggccgcttgactctcggtttccactagagggcgcctcggatgcagatatcggggagaacgccctgctcacttacagactgagcccaaatgaatacttttctctggaaaaaccacctgatgacgagctggtaaaaggtcttgggcttatattacggaaatctttagacagagaagaagctccggagatttttttagtgctcacagccactgatggaggcaaacccgagttgactggcaccgttcagttactcatcacagtactggatgccaatgacaatgccccagcttttgacagaaccatttataaggtgagattactagaaaatgttcctaatggaacattggtaattaaacttaacgcctcagatttagacgaaggattgaatggggacattgtttattcattctcaaatgatatttcgccaaatgtgaaatccaagtttcacatagatccaattactggacaaattattgtaaagggatatattgactttgaagaaagcaaatcctatgaaattattgtagagggcattgataagggacagctcccactttctggccattgtagagttattgtggaagtagaagacaacaacgataatgtcccagatttggaattcaagtctttatcacttccaattagagaggacgctccactgggtacagtcatcgccctgatcagcgtgtccgacaaagacatgggtgtcaatgggctggtcacctgctccttgacgtcccacgtccccttcaagctggtgtccaccttcaagaattactactcgttggtgctggacagtgccctggaccgcgagagcgtgtcagcctatgagctggtggtgaccgcgcgagacgggggctcgccttcgctgtgggccacggccagtgtttctgtggaggtggctgatgtgaacgacaacgctccggcgttcgcgcagcccgagtacacagtgttcgtgaaggagaacaacccgccgggctgccacatcttcactgtgtctgcgtgggacgcggacgcgcaggagaacgcgctggtgtcctactcgctggtagagcggcgggtaggggagcgcgcgctgtcgagctacgtttcggtgcatgcggagagcggcaaggtgtacgcgctgcagccgctggaccacgaggagctagagctgctgcagtttcaggtgaccgctcgcgatgccggcgtgccacctctgggcagcaacgtgacgctgcaggtgttcgtgctggacgaaaacgacaacgcgccagcactgctagcgcctcgggcgggtggcactggtggcgcagtgagcgagctggtgccatggtcggtgggtgtgggccacgtggtggcaaaggtgcgcgcggtggatgctgactcgggctacaacgcgtggctttcgtacgagctgcagccggggactggtggcgcgcgcatcccgttccgcgtggggctgtacactggcgagatcagcacaacgcgtgccctggacgaaacggacgctccgcgccaccgcctactggtactggtgaaggaccacggcgagcccgcgctgacggccacggccactgtgctggtgtcacttgtggagagtggacaggcgccaaaggcctcctcacgggcgttggtgggcgctgtgggtcccgatgctgcgctggtggatgtcaacgtatacctgatcattgccatctgcgcggtgtccagccttttggtgctcacgctgctgctgtacaccgcgctgcggtgctctgcgctgcccaccgagggcgcgtgcgctccgggcaagcccacgctggtgtgctccagtgcggtggggagctggtcatactcgcagcagaggaggccgagggtgtgctctggtgagggcccacccaagaccgacctcatggccttcagccccagtttacctgactctagggacagagaagatcagctgcagacaactgaggaatcctttgcaaagccacgacagcccaaccctgactggcgttactctgcctccctgagagcaggcatgcacagctctgtgcacctagaggaggctggcattctacgggctggtccaggagggcctgatcagcagtggccaacagtatccagtgcaacaccagaaccagaggcaggagaagtgtcccctccagtcggtgcgggtgtcaacagcaacagctggacctttaaatacggaccaggcaaccccaaacaatccggtcccgaacctaaaaagcagacccaagtttcctttctcctccgccgcaaaggagaggcttcccagccccgccagtgagaggttggactctctgccctgtgctccggggatcctgtcttgatgacacttgcagggcaggctgaaaagttttgagattgagcagcttgggagtttgtggccactgggtatgtgtggctaccgcgggtatgcgagtgccagatattggctgagacgagccagcttagactaattggtacaaggaaggcaagaaaacaaagacaaataaacagcggaagttatcagtatggaggggaagtgtaaacttaaagggaccagactttctaaatcttacaactcaagaggtggcagccaccctctaggagacaaaactacccccactgacaaggctttaggagaccctaaagtctgttggctgtgacgtcattatacctaaaatctgcatcatacctgcaagccaacagttcagtgttttaacagagaaccaccctgggaaacagaagcagatctgatgtgtttcctatacatgtcctgtgctcactttattaaaaattcttttgcacacaatgtttatgaaaaggccagatccttttccaatacttatgcaaaagcaaaagaaaaccccgacacctcacctttcgctgtttgttgtttcatagatttatttaaaaaaagagaaagtctatagctataaatctttaaagagaaatatgaatacaattcccctaaactctcctcaaaagagaattcagtctacagccatttaaatgatcattgctgctacagaagtgctttaagagaattgcctgaaacatctgtattatatcggccacctgccaatcacagctttactctttcaggtcactctggggctgcctcttgcatgtattactaaataaaatgatctctctttctctctctctctctcttttctaagaaacaattatgtgcactttgatacacaaccttctctaaccaactatatatcaagacccaaaaattgaagaaaaatattgttttctcatacagtgagcagatttttcaatctactaattctgtgacttgtcttggtgtgctagcctacaccttctctttggtttagttttccttttctataacactctgaattgctaatcttactaacacctatgatgttacctgaaatcaatctcccatatgtatgctgtatgctatgctaagactcctgaaatatacttactctgtgcttgtgtatgtgaatgttaatgcaactattacctagagtgaactttaagctttattgttgaatgtaattccattatatttccttttgtacacctgtgaaaaagtggagtagtgtttttttaaccattgttaatcagcttttgtgtatgaaagacacagtaaaatttctttcttaaatc

SEQ ID NO: 172117 - DNA, 5251 bp, Homo sapiens
  Payload ID: 13818
  Gene Symbol: PCDHA4
  Gene Name: protocadherin alpha 4
  Uniprot ID: Q9UN74
  ENST ID: ENST00000530339
  CDS Start-End: 1-2844
atggagttttcctggggaagcggccaggaatcccggcgtctgctgctcttacttcttctcctcgcagcctgggaggcagggaacggtcagctccactactcggtctccgaggaggccaaacacggcaccttcgtgggccgcatcgcgcaggacctgggactggagctggcggagctggtgccgcgcctgttccgggtggcgtccaagggccgcggaggccttctggaggtaaatctgcagaatggcattttgtttgtgaattctcggatcgaccgggaggagctgtgccggcggagcgcggagtgcagcatccacctggaggtgatcgtagacaggccgctgcaggttttccatgtggacgtggaggtgagggacattaacgataacccgccggtgttcccagcaacacaaaagaacctgtccatcgcggaatccaggccgcttgactctcggtttccactagagggcgcctcggatgcagatatcggggagaacgccctgctcacttacagactgagcccaaatgaatacttttctctggaaaaaccacctgatgacgagctggtaaaaggtcttgggcttatattacggaaatctttagacagagaagaagctccggagatttttttagtgctcacagccactgatggaggcaaacccgagttgactggcaccgttcagttactcatcacagtactggatgccaatgacaatgccccagcttttgacagaaccatttataaggtgagattactagaaaatgttcctaatggaacattggtaattaaacttaacgcctcagatttagacgaaggattgaatggggacattgtttattcattctcaaatgatatttcgccaaatgtgaaatccaagtttcacatagatccaattactggacaaattattgtaaagggatatattgactttgaagaaagcaaatcctatgaaattattgtagagggcattgataagggacagctcccactttctggccattgtagagttattgtggaagtagaagacaacaacgataatgtcccagatttggaattcaagtctttatcacttccaattagagaggacgctccactgggtacagtcatcgccctgatcagcgtgtccgacaaagacatgggtgtcaatgggctggtcacctgctccttgacgtcccacgtccccttcaagctggtgtccaccttcaagaattactactcgttggtgctggacagtgccctggaccgcgagagcgtgtcagcctatgagctggtggtgaccgcgcgagacgggggctcgccttcgctgtgggccacggccagtgtttctgtggaggtggctgatgtgaacgacaacgctccggcgttcgcgcagcccgagtacacagtgttcgtgaaggagaacaacccgccgggctgccacatcttcactgtgtctgcgtgggacgcggacgcgcaggagaacgcgctggtgtcctactcgctggtagagcggcgggtaggggagcgcgcgctgtcgagctacgtttcggtgcatgcggagagcggcaaggtgtacgcgctgcagccgctggaccacgaggagctagagctgctgcagtttcaggtgaccgctcgcgatgccggcgtgccacctctgggcagcaacgtgacgctgcaggtgttcgtgctggacgaaaacgacaacgcgccagcactgctagcgcctcgggcgggtggcactggtggcgcagtgagcgagctggtgccatggtcggtgggtgtgggccacgtggtggcaaaggtgcgcgcggtggatgctgactcgggctacaacgcgtggctttcgtacgagctgcagccggggactggtggcgcgcgcatcccgttccgcgtggggctgtacactggcgagatcagcacaacgcgtgccctggacgaaacggacgctccgcgccaccgcctactggtactggtgaaggaccacggcgagcccgcgctgacggccacggccactgtgctggtgtcacttgtggagagtggacaggcgccaaaggcctcctcacgggcgttggtgggcgctgtgggtcccgatgctgcgctggtggatgtcaacgtatacctgatcattgccatctgcgcggtgtccagccttttggtgctcacgctgctgctgtacaccgcgctgcggtgctctgcgctgcccaccgagggcgcgtgcgctccgggcaagcccacgctggtgtgctccagtgcggtggggagctggtcatactcgcagcagaggaggccgagggtgtgctctggtgagggcccacccaagaccgacctcatggccttcagccccagtttacctgactctagggacagagaagatcagctgcagacaactgaggaatcctttgcaaagccacgacagcccaaccctgactggcgttactctgcctccctgagagcaggcatgcacagctctgtgcacctagaggaggctggcattctacgggctggtccaggagggcctgatcagcagtggccaacagtatccagtgcaacaccagaaccagaggcaggagaagtgtcccctccagtcggtgcgggtgtcaacagcaacagctggacctttaaatacggaccaggcaaccccaaacaatccggtcccggtgagttgcccgacaaattcattatcccaggatctcctgcaatcatctccatccggcaggagcctactaacagccaaattgacaaaagtgacttcataaccttcggcaaaaaggaggagaccaagaaaaagaagaaaaagaagaagggtaacaagacccaggagaaaaaagagaaagggaacagcacgactgacaacagtgaccagtgaggtcctcaaatggaaacaagccacttagccagtttttgtaataatggcaaatctctcccatgtagcaattccctgctcctttttcctatctacatgagccctcttagagacctcagaaatctgcagaaagttccctgtgtctgtctagaacgcatttaacaggttttgtcgtaaaagctttactaagtctggtgttaactctttctctccactctggcttgttttcagaacctaaaaagcagacccaagtttcctttctcctccgccgcaaaggagaggcttcccagccccgccagtgagaggttggactctctgccctgtgctccggggatcctgtcttgatgacacttgcagggcaggctgaaaagttttgagattgagcagcttgggagtttgtggccactgggtatgtgtggctaccgcgggtatgcgagtgccagatattggctgagacgagccagcttagactaattggtacaaggaaggcaagaaaacaaagacaaataaacagcggaagttatcagtatggaggggaagtgtaaacttaaagggaccagactttctaaatcttacaactcaagaggtggcagccaccctctaggagacaaaactacccccactgacaaggctttaggagaccctaaagtctgttggctgtgacgtcattatacctaaaatctgcatcatacctgcaagccaacagttcagtgttttaacagagaaccaccctgggaaacagaagcagatctgatgtgtttcctatacatgtcctgtgctcactttattaaaaattcttttgcacacaatgtttatgaaaaggccagatccttttccaatacttatgcaaaagcaaaagaaaaccccgacacctcacctttcgctgtttgttgtttcatagatttatttaaaaaaagagaaagtctatagctataaatctttaaagagaaatatgaatacaattcccctaaactctcctcaaaagagaattcagtctacagccatttaaatgatcattgctgctacagaagtgctttaagagaattgcctgaaacatctgtattatatcggccacctgccaatcacagctttactctttcaggtcactctggggctgcctcttgcatgtattactaaataaaatgatctctctttctctctctctctctcttttctaagaaacaattatgtgcactttgatacacaaccttctctaaccaactatatatcaagacccaaaaattgaagaaaaatattgttttctcatacagtgagcagatttttcaatctactaattctgtgacttgtcttggtgtgctagcctacaccttctctttggtttagttttccttttctataacactctgaattgctaatcttactaacacctatgatgttacctgaaatcaatctcccatatgtatgctgtatgctatgctaagactcctgaaatatacttactctgtgcttgtgtatgtgaatgttaatgcaactattacctagagtgaactttaagctttattgttgaatgtaattccattatatttccttttgtacacctgtgaaaaagtggagtagtgtttttttaaccattgttaatcagcttttgtgtatgaaagacacagtaaaatttctttcttaaatcaagatactggtgattcaaggaattttatttatggtccagccaagagccatctcgtgccaagacttctgctggcaagggaatggataaagctgttttgttctagtaacaattttggaatgaatactgacaatattccatgagggtgtgcaagcacaaattttaccaatctgacctctttgaagttgcagaatgctttgaaattctaatggtatctgaaatatcagctcatagaaagtaacaaaatttgctgtcaccttaaataagacattttaattttgttataatgtacaatttagaagtttgattaattatattatctatttaggcattaatataaaagaggtaggagtctgttatttaaaaaaagcattaaatttaaaaaaaaactgtcttgtctacttttagcttcattctcccatattttgaagggtgtgtaacttcagctctgcaggattgcatggggtaaaacttgttaccaacacatgtgaaccattgctacattgtaggttgtgatcattttgccccactgaagcccatgtatctgaccttacgtgccttttgaactaggagaatcgggctaatttattaatgatgataattataatgtatctgtacagcactttttacatttgcgaagtgctttccaatccatgttagttactagttattacagctgtaaggataaaacacgtcatgtggattcattttgaattggtgctattggtatttcctctgttattgctaataaatgaaaatggtggtatg

SEQ ID NO: 172118 - DNA, 10557 bp, Homo sapiens
  Payload ID: 13818
  Gene Symbol: PCDHA4
  Gene Name: protocadherin alpha 4
  Uniprot ID: Q9UN74
  ENST ID: ENST00000618834
  CDS Start-End: 152-2548
aaaattccttctattcttactggaaggaaccatatacactctttggagtctgaaatatggaggatgcagctgcacttgactgaccgattaaaagatttcccttgactttgagaaacgatatttaatcagaacaaaatactgtgcactaaagatggagttttcctggggaagcggccaggaatcccggcgtctgctgctcttacttcttctcctcgcagcctgggaggcagggaacggtcagctccactactcggtctccgaggaggccaaacacggcaccttcgtgggccgcatcgcgcaggacctgggactggagctggcggagctggtgccgcgcctgttccgggtggcgtccaagggccgcggaggccttctggaggtaaatctgcagaatggcattttgtttgtgaattctcggatcgaccgggaggagctgtgccggcggagcgcggagtgcagcatccacctggaggtgatcgtagacaggccgctgcaggttttccatgtggacgtggaggtgagggacattaacgataacccgccggtgttcccagcaacacaaaagaacctgtccatcgcggaatccaggccgcttgactctcggtttccactagagggcgcctcggatgcagatatcggggagaacgccctgctcacttacagactgagcccaaatgaatacttttctctggaaaaaccacctgatgacgagctggtaaaaggtcttgggcttatattacggaaatctttagacagagaagaagctccggagatttttttagtgctcacagccactgatggaggcaaacccgagttgactggcaccgttcagttactcatcacagtactggatgccaatgacaatgccccagcttttgacagaaccatttataaggtgagattactagaaaatgttcctaatggaacattggtaattaaacttaacgcctcagatttagacgaaggattgaatggggacattgtttattcattctcaaatgatatttcgccaaatgtgaaatccaagtttcacatagatccaattactggacaaattattgtaaagggatatattgactttgaagaaagcaaatcctatgaaattattgtagagggcattgataagggacagctcccactttctggccattgtagagttattgtggaagtagaagacaacaacgataatgtcccagatttggaattcaagtctttatcacttccaattagagaggacgctccactgggtacagtcatcgccctgatcagcgtgtccgacaaagacatgggtgtcaatgggctggtcacctgctccttgacgtcccacgtccccttcaagctggtgtccaccttcaagaattactactcgttggtgctggacagtgccctggaccgcgagagcgtgtcagcctatgagctggtggtgaccgcgcgagacgggggctcgccttcgctgtgggccacggccagtgtttctgtggaggtggctgatgtgaacgacaacgctccggcgttcgcgcagcccgagtacacagtgttcgtgaaggagaacaacccgccgggctgccacatcttcactgtgtctgcgtgggacgcggacgcgcaggagaacgcgctggtgtcctactcgctggtagagcggcgggtaggggagcgcgcgctgtcgagctacgtttcggtgcatgcggagagcggcaaggtgtacgcgctgcagccgctggaccacgaggagctagagctgctgcagtttcaggtgaccgctcgcgatgccggcgtgccacctctgggcagcaacgtgacgctgcaggtgttcgtgctggacgaaaacgacaacgcgccagcactgctagcgcctcgggcgggtggcactggtggcgcagtgagcgagctggtgccatggtcggtgggtgtgggccacgtggtggcaaaggtgcgcgcggtggatgctgactcgggctacaacgcgtggctttcgtacgagctgcagccggggactggtggcgcgcgcatcccgttccgcgtggggctgtacactggcgagatcagcacaacgcgtgccctggacgaaacggacgctccgcgccaccgcctactggtactggtgaaggaccacggcgagcccgcgctgacggccacggccactgtgctggtgtcacttgtggagagtggacaggcgccaaaggcctcctcacgggcgttggtgggcgctgtgggtcccgatgctgcgctggtggatgtcaacgtatacctgatcattgccatctgcgcggtgtccagccttttggtgctcacgctgctgctgtacaccgcgctgcggtgctctgcgctgcccaccgagggcgcgtgcgctccgggcaagcccacgctggtgtgctccagtgcggtggggagctggtcatactcgcagcagaggaggccgagggtgtgctctggtgagggcccacccaagaccgacctcatggccttcagccccagtttacctgactctagggacagagaagatcagctgcagacaactgaggaatcctttgcaaaggttagtgtataacatccttttgtttaattttcgtattgtttttctctatcaacttcttcgtaaatttatttctaagagtcaaatttccctgggttaaaattttacctctttttacatatccattttaactaaagtcttttggaattataggacatcagagcaatatatattgccttccttcattttatgctgcattattcaatgcatattaacagaactgtaatttctagtaaattttcactatattcaccctctttgtttttggtaataatcaacattttagaaaacattttactattatttaacctattacatataaacaaatgtgcacaggctgaaataataaagctccataaattgtatgaaagtgaaaagctccgttgcctccatcgctgaagcccctcgcatgcacctgccaaatcacttcccttatttttcctccagtgtaaccgcacatttgccttttataactgtttgttcggggcctgttttgggaacgttatctaattggacttgcacaacatgtattgtctgtgcatttgtgtgttatttgtatttatcactcattgtttatgaaattatccatgttgttatatgtagttgtagtttatttatttctgtttctagtactatttcataaatatactataccttatttattctactgttcaggaatttgcattgtgcctcaatgtctatttcaaataatgccatcataaatatattgtacatttctttgatgcccatgtacacagatttctctcaggtttttgcctaagagttgtgtttgtgggtcacagaatatgtgtgtatctttgtcttttgtagctaacaccaaccaattttccaagatgtttttacctgtttacattcctagtagtgcataaggctttctgctgggccacatcatctctacatttgtcaggttattttcatgttagccattttactgggtgacttttgtaatctcattttgaaattattttatatttaaatgaagttgagtacctttctattttattttggcaatttttataccttattttgtgcaatagctgctcaaatctcctatttctctagtctgttgtttttcttttcttttttctcttctttttgcttccatagaactttatttatttccttatcttgtttttcttattacttaaacaaatcttgtattctgaacataactcctttttttagtagttttcaacctcatggctagtttttaattcttttttgtcttttggtgaatagaaagtcataattttgattaaactcaatttatcaatttttgcttctgatcctatttcacaaagataattttctgtggtatcttttatttcattgtttacattacatctacaatccatttggaatatacatatttttatcattgttgtgaggtaggggtcaagatttatttttatttcttcttattatttttattatactttaagttctaggatacatgtgcacaacgtgcaggtttgttacataggtatacatgtgtgccatgttcgtttgctgcacccatcaactcatcatttacattaggtatttctcctaatgctatccctcccccagtcccccacacctcaacaggccccagtgtgtgatgttccccaccctgtgtccaagtgctctcgttgttcaattcccacctatgagtgagaacatgcagtgtttggttttctgtgcttgtgatagtttgctcagaatgacggtttccagcttcatccatgtctctacaaaggacatgaactcacccttttttacggctgcatagtcttccatggtgtatatgtgtcacattttcttaatccggtctatcattgatggacatttgggttggttccaagtctttgctattgtgaatagtgtcgcaataaacatacatgtgcatgtgtctttatagtagcatgatttataatcctttagatatatacccagtaatgggtcaaatggtatttctagttccagatccttgaggaatcgccacactgtcttccacaatggttgaactagtttacactcccaccaacggtgtaaaagcgttactatttctccacatcctctccagcatgtgttgtttcctgactttttaatgattgccattctaactggtgtgagatggtatctcattgtggttttgatttgcatttctctgatgaccagtgatgatgggcattttttcatgtgtctgttggctgcataaatgtcttcttttgagaagtgtctgttcatatcctttgcccactttttgatagggttttttgtttttttcttgtaaatgtgtttaggttctttgtagattctggatattagccctttgtcagatgggtagattgcaaaaattttctcccattctgtaggttgcctgttcactctgattgtagtttcttttgaagatttattttttactaccatttttttgttggacttttaaaatgagtttggaagtgttccctctccttcaattttttttttttggaagagtttgaaaacaattatcattgattcttctttaaaagtttggtagaattctccaggaaagatatctggttttgggcttttgttgttgttgttgttaggaggtttggattactgattcaatctccttactagttacagctttgtttagattttttatgattatgtcttggtagtttgtatgtttctaggaattaatcaatttcttctaggttattgaattttttggtatatgattttaaaagcctcttataattgtggcatcaggtgtaatgccacctcttttgtttctgacttccagtctttttgtttttttcttagtctagctaaggggcttgtcagttttgttgttttttcaaaaaatcaactaagtttaaaaacttaatttaaactttttttcatttatttttgctctaatctttattatagtatttcctccctttgctttgggcttcctcatttgtcctttttttctagttccttgagttgttaagttttttatttgagatctttcttctttcttcatttttagtgtaggcatttacaactcccttctttgtttttgttttcatgtttaagagacaagatctcactatgatgtacagaggcacgatcatagctccctgcaagtgatccttgtgccttggattcccaaagcactgggattacaggcgtgagccactgagcttgcccagcttaatattccttcttagtactgcttttgttgtatcctgtaagtttttattgtgttgtgttttcatttttgtttatcttaacatattttctaattcatcttttgatttcccctttcattcaaatgaaattttgaacagaatttcgttcaaaattctgttgtttaatttctacatatttgcagattttccagttttaattccagtattgatttctagttttattccactgtggtcagaaaagatatttagtaggatttcaaccttcttgaatttgttaagacttgttttgtgacctgacgtgtgatttatcctggaaaatgctctgagtgtgcttgagaagactgtatatttgctgctgttgggtggaattttctgtatatgtctgttagttccatttcagctatagtgttgttcaagtcctctgcttccttgctgattttctgtctgaatgttctattccttattgaaagtaggataccaaaatctcctactacagtcattggagatacattctgagaattgtatcattctgagatttcatcactgtgcaaacatgagagtgtacttacatatttacacaaacctagatagtatagcctactacagacctaggttacatgatctattgcttctaggctacaaacctgtacatatgttaactgtactgaatactatagggaattgtaacacaatggtaagtatttgtatacctaaatatatctaaacatctaaaaggtacagtaaaaacattgtacagatttttaaaatggtacacctgaatagggtacttaccctatgaatggagactgcggggctggaaatttatctgcatgagtcaatgagtgaatggtgagtgaatgtgaaggcccaggacattactgtgcactaatgtagactttaaagcactatacatttaggctacactcaatttatcaaaaaattttctttttacaggctggtcatggtggctcatgcctgtaatcccagcactttgggaggctgaggaaggaggatcacttaagcccaggagttcaagaccagcctgggcaatatagtgagaccctgtctctagaaaataatttttaaaaattagctaggtgtggtgacacacacttgtagttccagctactcaggaggctgaagtgggaggatccttgacttgaggaggtcaaggctacagtgagctatggtcgtgccactgcactccagcctgagcaacagagtgagactctgtctcaattttttttctttcttcagtaataaattaaccttagcttactgtaacttttcaactttgtaaacttaaattttttaaccttttgactcttttgtaataacgcttagcttaaaacacaaacacattgtacagctgtacaaaaatattttctctttatatccttattttacaagtttttttgacttttaatttttttatttttttcacttttacttagtgtttttttttgttgttgttgttaaaaatgaagatataaacacccatactagcctaggactgtattgggtcaggatcatcaatatcattgtcttccacctccatatcttgtcccactggaaggtcttctggggcagttacacatgcgatgctatcatctcctatgataacaatatcttctagtggaatacttcccaaaagactttcctgaggctgttttgtggtgaccttttttcttttttttttttgagttaatgtattttttataagtagaaagagtacactgtaaaataccactaaaaagtatagtaaatacataaagcagtaacatttactatctgtatcaagtattatgtactgtaaattactgtacataattgtatgtgctatcttgtacttttatataactggtagtgcaataggtttgtttacaccaacatcaccacaaacatgtgagtaatgtgctacaacattatgactgctacatcatcactaggtgataggaatttttcagctccattataatcttatgggactactcttgtacatgtggtctgttattggttgaaacgttgttatacaacacttgactttattgtattgctatctatttctccatttctgtgaatgtttgcctcatatatttaggtgttttaatgttgggtgcatatgtatttataattgctatgtccttctggtgaattgaccttttatcattatataatgtccttctttgtctcttatgacactttttgacttaaagactattttgtgtgatgtagctgtttccacatttgcactcttttggttacaatttgcatgaaatttttttaatatcctttaactttcaggctatccaggtctttaaatctaaagcaaatctcttgtagttagcatataattgggtctttaaaaaaaatcaattcaaccactttgtatcttttgattgggggagtttatcccatttttatttaaagtaattattgatagggcataacttactgttgcctctttgttaattgttgtttgcagcttgtagactttttgctcctctttcctcctcttactgtcttcctttgtgttttattgagaattgtaatgctatgtttttgttcctttcctgttttcttttgtatatcttccataggtattttctttgtggttaccatggggcttacattttaaaactcttataaaaatgtattttaaactgatagcatctttactacaatcacaaaacaaaactcattatgtttacttctcccctacccaaattttatgttattgatgtcataaatacatctttttatattgtgtatacattattttatagttagtttttctgtacttttgtcttttaatcagattttaaaatatcagattttaaagtgacttttgtaccaccattacagtattatagtattctgtttttatctatatatttatctttactagtgagctttatactttaataaaatacctatgtatttctgtttagcatcccctaattttaactcaaaaggccccctcttaacatttcttgtaaggcaagtctaattgtgatcaccttcagcttttgtttaactgggaaggtctttatctctttttcatttttgaagacaaactttggtggatttggtattcttggctggcagttctttttcttttcagcactttcagtataacatctcacccctttctggatggcaaggtttctactgagaaatctactggtagagttaggggtgttcttttgtacgtgatgaggcatttttcttttgctgctttctaaattcttaacatttcttggatcttgatgtccatttccttcctcatatttgggaagttttcagatgtaattttaaaaaataagctgtctgtccttttctcttatggcttcttcttttgaaactgtcataatgagtagagcagcctgctcgaggatgtcctatcaatttcttaggctttctttactctctttcatttcttgctctttttgctactctgtctggataatttcaaatgatgtgtccttgagttcactgactcattcttctacttgattaagtctgctgttgaacatgtctgtaaaattttcagttcaattattgtattcttcagttccaaaatttctttttagttcttttgaatattttctatctgctgaaattctgattctgcttatgcattattttcctgagctcactgaacatctttatgacaattattttgaatactttgtcaagtaattcacatagctctatttctttaggtttggtttctggaggtgtgtttgtgtgtgtgtgtgtgtgtgtgtgtgggcacgcactatttgattgggccatgtttcctgttttctcatattccttattactttgtgttgatatctatacatttcaaaaaaacaaaaaacaacaacacaccagctacctcttccagtctttatggactggatttgtacatggaaagatctttactaatcaggctggctagagattctagggacctctcaaaccttttctgtggatgcatcttctatggacttgtgtgtataattcctaattagagggatctgccagcttttttttttaagatgctctaatctttttccctctgtggtgtctgtgtgctgtactgtgggccctctggagcagcagtattcactcagctcttttaggttctgagaagccctcagttatagattctgctgaatcctatcagtgcctggagtcaagtgagacagaaacttggactgcccactaaaattcaggaactttggatgcattttactctctctttccctcatgagagagagagtgctgagctgagtttctctctgtgtgctgtatcacaggtcctgaggagcatcagcccgccacccagctctttattattctgagctgccctcaggattttagaatatgccaggttccatcagtgctctgagatatgcaagacagctcccctgaaaagtcagaacactgaatgcatgctttactttctctttcccttctcagggagaagacaggagctgggaatttccccctgtttgaatggaactgtgctgctggatgggactatagggaaagtgccccagaaaagtgcccagctagttttacacttgcttggagcccaggaccctcttaactggtttcggcacttatcaccatgggaattggtccttgtattgttgttgagttggtatacctgtggagggtctggggattcctataacagcatcttgctgatgtcactacctctgttatctttttaagctatatatgcttttacaaattattttattgatttcctcttttgttgattataacacacatccttgacttattacctcaattaaatcaataattttaataattcca

SEQ ID NO: 172119 - DNA, 4157 bp, Homo sapiens
  Payload ID: 13819
  Gene Symbol: PCDHA5
  Gene Name: protocadherin alpha 5
  Uniprot ID: Q9Y5H7
  ENST ID: ENST00000529619
  CDS Start-End: 140-2812
aagaaccttccatttttggctgtgccaagaagctcagaaaggcgataatataaaaaatatatagttaattgggaattgaatttacaaaatacattgtgtggtgatgcaatagaaagctcataattggaacgagattgagatggtatattcccggagaggaagtctgggatcccggctcctgctgctctggcttctccttgcctactggaaggcagggagcggccagctccactactcgatcccggaggaagccaaacacggaaccttcgttggccgcatcgcgcaggacctagggctggagctggcggagctggtgccgcgcctgttccgggtggcgtccaagggccgcggggaccttctggaggtaaatctgcagaatggcattttgtttgtgaattctcggatcgaccgggaggagctgtgccggcggagggcggagtgcagcatccacctggaggtgatcgtggacaggccgctgcaggttttccatgtggaggtggcagtgaaggacatcaatgacaatccgcccaggttctccagacaagaacaaagattattcattttagagtcaagaatgccagattcgcggtttccgctagagggcgcgtcggatttggatattggagcaaatgcacaattgagatacaggttaaatccaaacgaatattttgacttagatgttaaaacaaatgaagaagaaacgaactttttagagctggttttgaggaaatccttagatagagaagaaacacaagaacaccgtttattagtgattgcaactgatggaggaaaacccgaactaacaggtacagttcagttgttgatcaatgtattggatgctaatgataacgccccagaatttgataaatccatttataatgtcagattgttggaaaatgcaccaagtgggacattagttattaaactgaacgcctcagatgcagatgagggcatcaataaggaaatagtgtatttctttagtaatcttgttcttgacgatgtaaagtccaaatttataattaattctaatactggtgaaataaaagttaacggggaactggattatgaagactataactcatatgaaattaatattgatgccatggataaaagtacattcccattatcaggacactgtaaagtagtagtgaaactcctggatgtgaatgataataccccagagatggccataaccacccttttcctgcctgtcaaagaggacgctccactcagcacggtcattgctctgatcagcgtgtctgaccgtgactcaggtgccaacgggcaggtgacctgctccctaatgccccacgttcccttcaagctggtgtccaccttcaagaattactactcgttggtgctggacagcgccctggaccgcgagagcgtgtcggtctatgagctggtggtgaccgcgcgggacgggggctcgccttcgctgtgggccaccgccagcgtgtctgtggaagtggccgacgtgaacgacaacgctccggcgttcgcgcagccccagtataccgtgttcgtgaaggagaacaacccgccaggctgccacatcttcacggtgtctgcacgggacgcggacgcgcaggagaacgccctggtgtcctactcgctggtggagcggcgggtgggcgagcgcccgctgtcgagttacgtttcggtgcacgcggagagcggcaaggtgtacgcgctgcagccgctggaccacgaggaagtggagctgctgcagttccaggtgagcgcgcgcgacgcgggcgtgccgcctctgggcagcaacgtgacgctgcaggtgttcgtgctggacgagaacgacaacgcgccggcgctgctggtgcctcgagtgggtggcaccggcggcgcagtgagcgagctggtgccgaggtcagtgggtgcgggccacgtggtggcgaaggtgcgcgcagtggaccctgattcgggctacaacgcttggctttcgtatgagctgcagccagcgcctggcagtgcgcgcatcccgttccgcgtggggctgtacacaggcgagatcagcacaacacgctctctggatgagaccgaagcaccgcgccaccgccttctggtgctggtgaaggaccatggagagcccccgctgacagccacagccacagtgctggtgtcgctggtggaaagtggccaggcgccgaaggcctcatcgcgggcgtcggcgggcgctgtgggtcccgaggctgccctggtggatgtcaacgtgtacctgatcatcgccatctgtgcggtgtccagcctgctggtgctcacgctgctgctgtacaccgcgctgcggtgctcggcgcagcccaccgaggccgtgtgcacacggggcaagcccactctgttgtgctccagcgcggtggggagctggtcgtactcgcagcagaggagacagagggtgtgctctggggaagctccacccaaaacagacctcatggccttcagtccaagccttcctcagggtcccacctctacagacaacccacgacagcccaaccctgactggcgttactctgcctccctgagagcaggcatgcacagctctgtgcacctagaggaggctggcattctacgggctggtccaggagggcctgatcagcagtggccaacagtatccagtgcaacaccagaaccagaggcaggagaagtgtcccctccagtcggtgcgggtgtcaacagcaacagctggacctttaaatacggaccaggcaaccccaaacaatccggtcccgaacctaaaaagcagacccaagtttcctttctcctccgccgcaaaggagaggcttcccagccccgccagtgagaggttggactctctgccctgtgctccggggatcctgtcttgatgacacttgcagggcaggctgaaaagttttgagattgagcagcttgggagtttgtggccactgggtatgtgtggctaccgcgggtatgcgagtgccagatattggctgagacgagccagcttagactaattggtacaaggaaggcaagaaaacaaagacaaataaacagcggaagttatcagtatggaggggaagtgtaaacttaaagggaccagactttctaaatcttacaactcaagaggtggcagccaccctctaggagacaaaactacccccactgacaaggctttaggagaccctaaagtctgttggctgtgacgtcattatacctaaaatctgcatcatacctgcaagccaacagttcagtgttttaacagagaaccaccctgggaaacagaagcagatctgatgtgtttcctatacatgtcctgtgctcactttattaaaaattcttttgcacacaatgtttatgaaaaggccagatccttttccaatacttatgcaaaagcaaaagaaaaccccgacacctcacctttcgctgtttgttgtttcatagatttatttaaaaaaagagaaagtctatagctataaatctttaaagagaaatatgaatacaattcccctaaactctcctcaaaagagaattcagtctacagccatttaaatgatcattgctgctacagaagtgctttaagagaattgcctgaaacatctgtattatatcggccacctgccaatcacagctttactctttcaggtcactctggggctgcctcttgcatgtattactaaataaaatgatctctctttctctctctctctctcttttctaagaaacaattatgtgcactttgatacacaaccttctctaaccaactatatatcaagacccaaaaattgaagaaaaatattgttttctcatacagtgagcagatttttcaatctactaattctgtgacttgtcttggtgtgctagcctacaccttctctttggtttagttttccttttctataacactctgaattgctaatcttactaacacctatgatgttacctgaaatcaatctcccatatgtatgctgtatgctatgctaagactcctgaaatatacttactctgtgcttgtgtatgtgaatgttaatgcaactattacctagagtgaactttaagctttattgttgaatgtaattccattatatttccttttgtacacctgtgaaaaagtggagtagtgtttttttaaccattgttaatcagcttttgtgtatgaaagacacagtaaaatttctttcttaaatcaa

SEQ ID NO: 172120 - DNA, 5218 bp, Homo sapiens
  Payload ID: 13819
  Gene Symbol: PCDHA5
  Gene Name: protocadherin alpha 5
  Uniprot ID: Q9Y5H7
  ENST ID: ENST00000529859
  CDS Start-End: 1-2811
atggtatattcccggagaggaagtctgggatcccggctcctgctgctctggcttctccttgcctactggaaggcagggagcggccagctccactactcgatcccggaggaagccaaacacggaaccttcgttggccgcatcgcgcaggacctagggctggagctggcggagctggtgccgcgcctgttccgggtggcgtccaagggccgcggggaccttctggaggtaaatctgcagaatggcattttgtttgtgaattctcggatcgaccgggaggagctgtgccggcggagggcggagtgcagcatccacctggaggtgatcgtggacaggccgctgcaggttttccatgtggaggtggcagtgaaggacatcaatgacaatccgcccaggttctccagacaagaacaaagattattcattttagagtcaagaatgccagattcgcggtttccgctagagggcgcgtcggatttggatattggagcaaatgcacaattgagatacaggttaaatccaaacgaatattttgacttagatgttaaaacaaatgaagaagaaacgaactttttagagctggttttgaggaaatccttagatagagaagaaacacaagaacaccgtttattagtgattgcaactgatggaggaaaacccgaactaacaggtacagttcagttgttgatcaatgtattggatgctaatgataacgccccagaatttgataaatccatttataatgtcagattgttggaaaatgcaccaagtgggacattagttattaaactgaacgcctcagatgcagatgagggcatcaataaggaaatagtgtatttctttagtaatcttgttcttgacgatgtaaagtccaaatttataattaattctaatactggtgaaataaaagttaacggggaactggattatgaagactataactcatatgaaattaatattgatgccatggataaaagtacattcccattatcaggacactgtaaagtagtagtgaaactcctggatgtgaatgataataccccagagatggccataaccacccttttcctgcctgtcaaagaggacgctccactcagcacggtcattgctctgatcagcgtgtctgaccgtgactcaggtgccaacgggcaggtgacctgctccctaatgccccacgttcccttcaagctggtgtccaccttcaagaattactactcgttggtgctggacagcgccctggaccgcgagagcgtgtcggtctatgagctggtggtgaccgcgcgggacgggggctcgccttcgctgtgggccaccgccagcgtgtctgtggaagtggccgacgtgaacgacaacgctccggcgttcgcgcagccccagtataccgtgttcgtgaaggagaacaacccgccaggctgccacatcttcacggtgtctgcacgggacgcggacgcgcaggagaacgccctggtgtcctactcgctggtggagcggcgggtgggcgagcgcccgctgtcgagttacgtttcggtgcacgcggagagcggcaaggtgtacgcgctgcagccgctggaccacgaggaagtggagctgctgcagttccaggtgagcgcgcgcgacgcgggcgtgccgcctctgggcagcaacgtgacgctgcaggtgttcgtgctggacgagaacgacaacgcgccggcgctgctggtgcctcgagtgggtggcaccggcggcgcagtgagcgagctggtgccgaggtcagtgggtgcgggccacgtggtggcgaaggtgcgcgcagtggaccctgattcgggctacaacgcttggctttcgtatgagctgcagccagcgcctggcagtgcgcgcatcccgttccgcgtggggctgtacacaggcgagatcagcacaacacgctctctggatgagaccgaagcaccgcgccaccgccttctggtgctggtgaaggaccatggagagcccccgctgacagccacagccacagtgctggtgtcgctggtggaaagtggccaggcgccgaaggcctcatcgcgggcgtcggcgggcgctgtgggtcccgaggctgccctggtggatgtcaacgtgtacctgatcatcgccatctgtgcggtgtccagcctgctggtgctcacgctgctgctgtacaccgcgctgcggtgctcggcgcagcccaccgaggccgtgtgcacacggggcaagcccactctgttgtgctccagcgcggtggggagctggtcgtactcgcagcagaggagacagagggtgtgctctggggaagctccacccaaaacagacctcatggccttcagtccaagccttcctcagggtcccacctctacagacaacccacgacagcccaaccctgactggcgttactctgcctccctgagagcaggcatgcacagctctgtgcacctagaggaggctggcattctacgggctggtccaggagggcctgatcagcagtggccaacagtatccagtgcaacaccagaaccagaggcaggagaagtgtcccctccagtcggtgcgggtgtcaacagcaacagctggacctttaaatacggaccaggcaaccccaaacaatccggtcccggtgagttgcccgacaaattcattatcccaggatctcctgcaatcatctccatccggcaggagcctactaacagccaaattgacaaaagtgacttcataaccttcggcaaaaaggaggagaccaagaaaaagaagaaaaagaagaagggtaacaagacccaggagaaaaaagagaaagggaacagcacgactgacaacagtgaccagtgaggtcctcaaatggaaacaagccacttagccagtttttgtaataatggcaaatctctcccatgtagcaattccctgctcctttttcctatctacatgagccctcttagagacctcagaaatctgcagaaagttccctgtgtctgtctagaacgcatttaacaggttttgtcgtaaaagctttactaagtctggtgttaactctttctctccactctggcttgttttcagaacctaaaaagcagacccaagtttcctttctcctccgccgcaaaggagaggcttcccagccccgccagtgagaggttggactctctgccctgtgctccggggatcctgtcttgatgacacttgcagggcaggctgaaaagttttgagattgagcagcttgggagtttgtggccactgggtatgtgtggctaccgcgggtatgcgagtgccagatattggctgagacgagccagcttagactaattggtacaaggaaggcaagaaaacaaagacaaataaacagcggaagttatcagtatggaggggaagtgtaaacttaaagggaccagactttctaaatcttacaactcaagaggtggcagccaccctctaggagacaaaactacccccactgacaaggctttaggagaccctaaagtctgttggctgtgacgtcattatacctaaaatctgcatcatacctgcaagccaacagttcagtgttttaacagagaaccaccctgggaaacagaagcagatctgatgtgtttcctatacatgtcctgtgctcactttattaaaaattcttttgcacacaatgtttatgaaaaggccagatccttttccaatacttatgcaaaagcaaaagaaaaccccgacacctcacctttcgctgtttgttgtttcatagatttatttaaaaaaagagaaagtctatagctataaatctttaaagagaaatatgaatacaattcccctaaactctcctcaaaagagaattcagtctacagccatttaaatgatcattgctgctacagaagtgctttaagagaattgcctgaaacatctgtattatatcggccacctgccaatcacagctttactctttcaggtcactctggggctgcctcttgcatgtattactaaataaaatgatctctctttctctctctctctctcttttctaagaaacaattatgtgcactttgatacacaaccttctctaaccaactatatatcaagacccaaaaattgaagaaaaatattgttttctcatacagtgagcagatttttcaatctactaattctgtgacttgtcttggtgtgctagcctacaccttctctttggtttagttttccttttctataacactctgaattgctaatcttactaacacctatgatgttacctgaaatcaatctcccatatgtatgctgtatgctatgctaagactcctgaaatatacttactctgtgcttgtgtatgtgaatgttaatgcaactattacctagagtgaactttaagctttattgttgaatgtaattccattatatttccttttgtacacctgtgaaaaagtggagtagtgtttttttaaccattgttaatcagcttttgtgtatgaaagacacagtaaaatttctttcttaaatcaagatactggtgattcaaggaattttatttatggtccagccaagagccatctcgtgccaagacttctgctggcaagggaatggataaagctgttttgttctagtaacaattttggaatgaatactgacaatattccatgagggtgtgcaagcacaaattttaccaatctgacctctttgaagttgcagaatgctttgaaattctaatggtatctgaaatatcagctcatagaaagtaacaaaatttgctgtcaccttaaataagacattttaattttgttataatgtacaatttagaagtttgattaattatattatctatttaggcattaatataaaagaggtaggagtctgttatttaaaaaaagcattaaatttaaaaaaaaactgtcttgtctacttttagcttcattctcccatattttgaagggtgtgtaacttcagctctgcaggattgcatggggtaaaacttgttaccaacacatgtgaaccattgctacattgtaggttgtgatcattttgccccactgaagcccatgtatctgaccttacgtgccttttgaactaggagaatcgggctaatttattaatgatgataattataatgtatctgtacagcactttttacatttgcgaagtgctttccaatccatgttagttactagttattacagctgtaaggataaaacacgtcatgtggattcattttgaattggtgctattggtatttcctctgttattgctaataaatgaaaatggtggtatg

SEQ ID NO: 172121 - DNA, 4248 bp, Homo sapiens
  Payload ID: 13819
  Gene Symbol: PCDHA5
  Gene Name: protocadherin alpha 5
  Uniprot ID: Q9Y5H7
  ENST ID: ENST00000614258
  CDS Start-End: 173-2623
acagtgagtagattttccttagacagaaaggaaaagaaccttccatttttggctgtgccaagaagctcagaaaggcgataatataaaaaatatatagttaattgggaattgaatttacaaaatacattgtgtggtgatgcaatagaaagctcataattggaacgagattgagatggtatattcccggagaggaagtctgggatcccggctcctgctgctctggcttctccttgcctactggaaggcagggagcggccagctccactactcgatcccggaggaagccaaacacggaaccttcgttggccgcatcgcgcaggacctagggctggagctggcggagctggtgccgcgcctgttccgggtggcgtccaagggccgcggggaccttctggaggtaaatctgcagaatggcattttgtttgtgaattctcggatcgaccgggaggagctgtgccggcggagggcggagtgcagcatccacctggaggtgatcgtggacaggccgctgcaggttttccatgtggaggtggcagtgaaggacatcaatgacaatccgcccaggttctccagacaagaacaaagattattcattttagagtcaagaatgccagattcgcggtttccgctagagggcgcgtcggatttggatattggagcaaatgcacaattgagatacaggttaaatccaaacgaatattttgacttagatgttaaaacaaatgaagaagaaacgaactttttagagctggttttgaggaaatccttagatagagaagaaacacaagaacaccgtttattagtgattgcaactgatggaggaaaacccgaactaacaggtacagttcagttgttgatcaatgtattggatgctaatgataacgccccagaatttgataaatccatttataatgtcagattgttggaaaatgcaccaagtgggacattagttattaaactgaacgcctcagatgcagatgagggcatcaataaggaaatagtgtatttctttagtaatcttgttcttgacgatgtaaagtccaaatttataattaattctaatactggtgaaataaaagttaacggggaactggattatgaagactataactcatatgaaattaatattgatgccatggataaaagtacattcccattatcaggacactgtaaagtagtagtgaaactcctggatgtgaatgataataccccagagatggccataaccacccttttcctgcctgtcaaagaggacgctccactcagcacggtcattgctctgatcagcgtgtctgaccgtgactcaggtgccaacgggcaggtgacctgctccctaatgccccacgttcccttcaagctggtgtccaccttcaagaattactactcgttggtgctggacagcgccctggaccgcgagagcgtgtcggtctatgagctggtggtgaccgcgcgggacgggggctcgccttcgctgtgggccaccgccagcgtgtctgtggaagtggccgacgtgaacgacaacgctccggcgttcgcgcagccccagtataccgtgttcgtgaaggagaacaacccgccaggctgccacatcttcacggtgtctgcacgggacgcggacgcgcaggagaacgccctggtgtcctactcgctggtggagcggcgggtgggcgagcgcccgctgtcgagttacgtttcggtgcacgcggagagcggcaaggtgtacgcgctgcagccgctggaccacgaggaagtggagctgctgcagttccaggtgagcgcgcgcgacgcgggcgtgccgcctctgggcagcaacgtgacgctgcaggtgttcgtgctggacgagaacgacaacgcgccggcgctgctggtgcctcgagtgggtggcaccggcggcgcagtgagcgagctggtgccgaggtcagtgggtgcgggccacgtggtggcgaaggtgcgcgcagtggaccctgattcgggctacaacgcttggctttcgtatgagctgcagccagcgcctggcagtgcgcgcatcccgttccgcgtggggctgtacacaggcgagatcagcacaacacgctctctggatgagaccgaagcaccgcgccaccgccttctggtgctggtgaaggaccatggagagcccccgctgacagccacagccacagtgctggtgtcgctggtggaaagtggccaggcgccgaaggcctcatcgcgggcgtcggcgggcgctgtgggtcccgaggctgccctggtggatgtcaacgtgtacctgatcatcgccatctgtgcggtgtccagcctgctggtgctcacgctgctgctgtacaccgcgctgcggtgctcggcgcagcccaccgaggccgtgtgcacacggggcaagcccactctgttgtgctccagcgcggtggggagctggtcgtactcgcagcagaggagacagagggtgtgctctggggaagctccacccaaaacagacctcatggccttcagtccaagccttcctcagggtcccacctctacagacaacgtgagttttctaatattaacatccatctttccctcccaattttcaaatattaaatgtcacattcacccactttttttgtatttaaaaattatgtcttagtacacaaatattgtggtacacaattattgcactaattcatgtattatatgctttttatgaggcttttctgctggggtaatagattcatcagctttctgtgatattaagtgtttttaaaataatattttatattagcatttgaattttgcatctctaaaaatgtaggataataattgtaagacatagtttggagtcattctcaaagtttcagtttatgactacatgaaaatttattttattttattgttattttttagagaccctttgttgcttagtctgcagtgatctgatcatagctcaccgaagcctgaaactcctgggctcaagtgatcctcctatctcagccgcccaagtagctggactacatgcacatgctaattaaagttttttttttttttttttttttattttctgtagagataggggtcttgctactttgcccaggctggtcttgaactcctggtttgaagccatgctcccgtctcagcctcccgaagtactaagattacaggattgagcaagagtgcctggcctataaaaatgttttaacaccacccttccaattttgcctttttgtttctattgaatttaaattaattattattttattacactaatttagtttgttttcaattgtatttttgcagcatatggtttatttcaactttgcctaagcagttcacctgtatacccatgatgaatttgataattgtaatttaaaaattatatttttcattttattgattttttgaataggaaacacatatacatggtttactgttctaaaggtgcaaaagaatacagttaaattttccctttcacctccttcatgaagccaaaacattctctggtatccttctagagatttttttcatatacaaataaacttccctacccccttaaaaaacatatgagtattgattttaatcttgcttttttcatttactaatgtatcttgatgatcatgaattatcattactgaagtagatttgtttttcttttatctggatctatggtgttccattgtgtaggtatgtgattggttatttttcccttaacattaacatttagtggaacaatgatttaattttctggaaatttgcatatttttcaatatatctaatatatattagatatataaatatctaaaatatctaatatatatctaatatattatatattttatataatatatataataaatatataataataatatatatcagatattttgatacagaattttgctcttgttgcccaaacgagtgcaatggtacaatcttggcctcccaggttcaagcgattctcctgccttatcttcccaagtagctgggattacaggcatgtgcccacacctggctaattttttgtatttactagagacggggtttcaccatgttggtcatggtggtctcgaactcctaatctcaggtgatttacccgcctcggcctcccaaagtgctgggattgcaggcatgagccatcgcgcctggcctaaattattatattgatgaggagtaactgtgaatctcctcagttgtgcaaattctactatattttggttgggaaattttactgcttgttgttacttttagattaaaaaaataaatataccatgatacaaa

SEQ ID NO: 172122 - DNA, 3267 bp, Homo sapiens
  Payload ID: 13820
  Gene Symbol: PCDHA6
  Gene Name: protocadherin alpha 6
  Uniprot ID: Q9UN73
  ENST ID: ENST00000378126
  CDS Start-End: 135-2546
ctattactgcatcattccctgactgttgaatgatggcggacgcagaagaaatggattaataaattccggaacatacagtattttatctttatgcggaagatcttctaatggaaataaaaccagaggtatttgacatggtgtttaccccggaggatagattgggaaagcaatgtctgctcctcccgcttctgctcctcgcagcctggaaggtggggagcggccagctccactactccgtacccgaggaggccaaacacggcaccttcgtgggccggatcgcgcaggacctggggctggagctggcggagctggtgccgcgcctgttcaggatggcctccaaagaccgcgaggaccttctggaggtaaatctgcagaatggcattttgtttgtgaattctcggatcgaccgcgaggagctgtgcgggcggagcgcggagtgcagcatccacctggaggtgatcgtggacaggccgctgcaggttttccatgtggacgtggaggtgagggacattaacgacaacccgcccttgttcccggtagaggaacaaagagtgctgatttacgaatctaggctgccagattctgtgtttccactggagggcgcgtccgatgcagatgttggctcaaattccatcttaacctataaactcagttctagcgaatacttcgggctagatgtgaaaataaacagtgatgacaataaacaaattgggctcttattaaagaaatccttggacagagaggaagctcctgcacacaacttattcctgacagccacagatgggggcaaacctgagctcacaggcactgttcagctgctggtcacagtgctggatgtgaatgataatgctcccactttcgaacagtctgaatacgaagtaagaatattcgaaaatgcagacaacggaacaacagttatcagactgaatgcttctgatcgggatgaaggagcgaatggggcaatttcatattcttttaatagccttgttgcagccatggttattgaccactttagcatagatcgaaatacgggagaaatagtgattcggggtaatttggattttgaacaagaaaacttatacaaaatcctcattgacgccacggacaaaggccatcctcccatggcgggtcattgcaccgttttagtgagaattttggataaaaatgataacgtccctgagatagcactgacttccttatccttgcctgtacgtgaagacgctcaatttggtactgtcatcgccctaattagcgtgaacgacctcgattcaggtgccaacgggcaggtgaactgctcgctgacgcctcacgtccctttcaagctggtgtccaccttcaagaattactactcgttggtgctggacagtgccctggaccgcgagagcgtgtcggcctatgagttggtggtaaccgcgcgggacgggggctcgccttcgctgtgggccaccgccagcttgtctgtggaggtggccgacatgaatgacaatgctccggcgttcgcgcagcccgagtacacagtgttcgtgaaggagaacaacccgccgggctgccacatcttcacggtgtctgcgcgagacgcggacgcgcaggagaacgcgctggtgtcctactcgctggtggagcggcgggtgggcgagcgcgcgttgtcgagctacatttcggtgcacgcggagagcggcaaggtgtacgcgctgcagccgctggaccacgaggagctagagctgctgcagtttcaggtgagcgcgcgcgacgcgggcgtgccgcctctgggcagcaacgtgacgctgcaggtgttcgtgctggacgagaacgacaacgcgccggcgctgctggcgcctcgggtgggtggtactggtggtgcagtgagcgagctggtgccgcggtcactgggtgcaggccaagtggtggcgaaggtgcgcgcagttgacgccgactcaggctacaacgcgtggctttcgtatgagctgcagcccccggcaagcagcgctcgcttcccgtttcgcgtggggctgtacacgggcgagatcagcaccactcgtgtcctggacgaagcggactctccgcgccaccggctgctggtgctggtgaaagaccacggtgagccggcgctgacagcgacggccacggttctggtgtcgctggtggagagtggccaggctccaaaggcgtcatcacgggcgtcggtgggcgccgcgggcccagaggcggcgctggtggatgtcaacgtgtacctgatcatcgccatctgcgcggtatccagcctgctggtcctcacgctactgctgtacacagcgctgcggtgctcggcgccacccaccgagggcgcgtgcacggcggacaagcccacgctggtgtgctccagcgcagtggggagctggtcgtactcgcagcagaggcggcagagggtgtgctccggggagggcccacccaagatggatctcatggcctttagccccagcctttcaccttgtcctattatgatgggtaaggcggagaatcaggatttaaatgaagatcatgatgccaaagtaagtgaattttcataattaacagttaatttttattttaaatttataattgttttcctcatatttgtcttctatatttctgtttttaatttttaattaattttacaaaattacatattttcattttattgtgtttcttattttaatctctttgcttctttaatattcataatttaagtgaaattagaaatcactgtccacaatctgcacctcagaatttttgtcttcaaaccaaaatattcttggatatgtcgttttctgttgcattttaattcagaatcatagtagcatttttttctgattaattatatgggattttcatttgtttgcctttgagctttaggataatttttttacatatactcttttttgatcatatattgaaatttgagcaccagtgtatcacttatgtttttacactttccatttcaatgtttttctgtcgacacttttattaagctaacgctttgattttatccattttgtgtaagaactctgatcatcatagtttttatctgtggttcccttttcagacttgtgattccgggaggcaatagtgttcatttattgtcccccttttaaaccattgaggaataaaggacaaaaacaatagttatcagcctgaatacttctggttgttatggttattgatttatttactaccgatctaaataatggaaaaatagtgattcaacagaatttagaccttgtgatcaagtaaatttatatgaaaactgca

SEQ ID NO: 172123 - DNA, 5374 bp, Homo sapiens
  Payload ID: 13820
  Gene Symbol: PCDHA6
  Gene Name: protocadherin alpha 6
  Uniprot ID: Q9UN73
  ENST ID: ENST00000529310
  CDS Start-End: 115-2967
gactgttgaatgatggcggacgcagaagaaatggattaataaattccggaacatacagtattttatctttatgcggaagatcttctaatggaaataaaaccagaggtatttgacatggtgtttaccccggaggatagattgggaaagcaatgtctgctcctcccgcttctgctcctcgcagcctggaaggtggggagcggccagctccactactccgtacccgaggaggccaaacacggcaccttcgtgggccggatcgcgcaggacctggggctggagctggcggagctggtgccgcgcctgttcaggatggcctccaaagaccgcgaggaccttctggaggtaaatctgcagaatggcattttgtttgtgaattctcggatcgaccgcgaggagctgtgcgggcggagcgcggagtgcagcatccacctggaggtgatcgtggacaggccgctgcaggttttccatgtggacgtggaggtgagggacattaacgacaacccgcccttgttcccggtagaggaacaaagagtgctgatttacgaatctaggctgccagattctgtgtttccactggagggcgcgtccgatgcagatgttggctcaaattccatcttaacctataaactcagttctagcgaatacttcgggctagatgtgaaaataaacagtgatgacaataaacaaattgggctcttattaaagaaatccttggacagagaggaagctcctgcacacaacttattcctgacagccacagatgggggcaaacctgagctcacaggcactgttcagctgctggtcacagtgctggatgtgaatgataatgctcccactttcgaacagtctgaatacgaagtaagaatattcgaaaatgcagacaacggaacaacagttatcagactgaatgcttctgatcgggatgaaggagcgaatggggcaatttcatattcttttaatagccttgttgcagccatggttattgaccactttagcatagatcgaaatacgggagaaatagtgattcggggtaatttggattttgaacaagaaaacttatacaaaatcctcattgacgccacggacaaaggccatcctcccatggcgggtcattgcaccgttttagtgagaattttggataaaaatgataacgtccctgagatagcactgacttccttatccttgcctgtacgtgaagacgctcaatttggtactgtcatcgccctaattagcgtgaacgacctcgattcaggtgccaacgggcaggtgaactgctcgctgacgcctcacgtccctttcaagctggtgtccaccttcaagaattactactcgttggtgctggacagtgccctggaccgcgagagcgtgtcggcctatgagttggtggtaaccgcgcgggacgggggctcgccttcgctgtgggccaccgccagcttgtctgtggaggtggccgacatgaatgacaatgctccggcgttcgcgcagcccgagtacacagtgttcgtgaaggagaacaacccgccgggctgccacatcttcacggtgtctgcgcgagacgcggacgcgcaggagaacgcgctggtgtcctactcgctggtggagcggcgggtgggcgagcgcgcgttgtcgagctacatttcggtgcacgcggagagcggcaaggtgtacgcgctgcagccgctggaccacgaggagctagagctgctgcagtttcaggtgagcgcgcgcgacgcgggcgtgccgcctctgggcagcaacgtgacgctgcaggtgttcgtgctggacgagaacgacaacgcgccggcgctgctggcgcctcgggtgggtggtactggtggtgcagtgagcgagctggtgccgcggtcactgggtgcaggccaagtggtggcgaaggtgcgcgcagttgacgccgactcaggctacaacgcgtggctttcgtatgagctgcagcccccggcaagcagcgctcgcttcccgtttcgcgtggggctgtacacgggcgagatcagcaccactcgtgtcctggacgaagcggactctccgcgccaccggctgctggtgctggtgaaagaccacggtgagccggcgctgacagcgacggccacggttctggtgtcgctggtggagagtggccaggctccaaaggcgtcatcacgggcgtcggtgggcgccgcgggcccagaggcggcgctggtggatgtcaacgtgtacctgatcatcgccatctgcgcggtatccagcctgctggtcctcacgctactgctgtacacagcgctgcggtgctcggcgccacccaccgagggcgcgtgcacggcggacaagcccacgctggtgtgctccagcgcagtggggagctggtcgtactcgcagcagaggcggcagagggtgtgctccggggagggcccacccaagatggatctcatggcctttagccccagcctttcaccttgtcctattatgatgggtaaggcggagaatcaggatttaaatgaagatcatgatgccaaaccacgacagcccaaccctgactggcgttactctgcctccctgagagcaggcatgcacagctctgtgcacctagaggaggctggcattctacgggctggtccaggagggcctgatcagcagtggccaacagtatccagtgcaacaccagaaccagaggcaggagaagtgtcccctccagtcggtgcgggtgtcaacagcaacagctggacctttaaatacggaccaggcaaccccaaacaatccggtcccggtgagttgcccgacaaattcattatcccaggatctcctgcaatcatctccatccggcaggagcctactaacagccaaattgacaaaagtgacttcataaccttcggcaaaaaggaggagaccaagaaaaagaagaaaaagaagaagggtaacaagacccaggagaaaaaagagaaagggaacagcacgactgacaacagtgaccagtgaggtcctcaaatggaaacaagccacttagccagtttttgtaataatggcaaatctctcccatgtagcaattccctgctcctttttcctatctacatgagccctcttagagacctcagaaatctgcagaaagttccctgtgtctgtctagaacgcatttaacaggttttgtcgtaaaagctttactaagtctggtgttaactctttctctccactctggcttgttttcagaacctaaaaagcagacccaagtttcctttctcctccgccgcaaaggagaggcttcccagccccgccagtgagaggttggactctctgccctgtgctccggggatcctgtcttgatgacacttgcagggcaggctgaaaagttttgagattgagcagcttgggagtttgtggccactgggtatgtgtggctaccgcgggtatgcgagtgccagatattggctgagacgagccagcttagactaattggtacaaggaaggcaagaaaacaaagacaaataaacagcggaagttatcagtatggaggggaagtgtaaacttaaagggaccagactttctaaatcttacaactcaagaggtggcagccaccctctaggagacaaaactacccccactgacaaggctttaggagaccctaaagtctgttggctgtgacgtcattatacctaaaatctgcatcatacctgcaagccaacagttcagtgttttaacagagaaccaccctgggaaacagaagcagatctgatgtgtttcctatacatgtcctgtgctcactttattaaaaattcttttgcacacaatgtttatgaaaaggccagatccttttccaatacttatgcaaaagcaaaagaaaaccccgacacctcacctttcgctgtttgttgtttcatagatttatttaaaaaaagagaaagtctatagctataaatctttaaagagaaatatgaatacaattcccctaaactctcctcaaaagagaattcagtctacagccatttaaatgatcattgctgctacagaagtgctttaagagaattgcctgaaacatctgtattatatcggccacctgccaatcacagctttactctttcaggtcactctggggctgcctcttgcatgtattactaaataaaatgatctctctttctctctctctctctcttttctaagaaacaattatgtgcactttgatacacaaccttctctaaccaactatatatcaagacccaaaaattgaagaaaaatattgttttctcatacagtgagcagatttttcaatctactaattctgtgacttgtcttggtgtgctagcctacaccttctctttggtttagttttccttttctataacactctgaattgctaatcttactaacacctatgatgttacctgaaatcaatctcccatatgtatgctgtatgctatgctaagactcctgaaatatacttactctgtgcttgtgtatgtgaatgttaatgcaactattacctagagtgaactttaagctttattgttgaatgtaattccattatatttccttttgtacacctgtgaaaaagtggagtagtgtttttttaaccattgttaatcagcttttgtgtatgaaagacacagtaaaatttctttcttaaatcaagatactggtgattcaaggaattttatttatggtccagccaagagccatctcgtgccaagacttctgctggcaagggaatggataaagctgttttgttctagtaacaattttggaatgaatactgacaatattccatgagggtgtgcaagcacaaattttaccaatctgacctctttgaagttgcagaatgctttgaaattctaatggtatctgaaatatcagctcatagaaagtaacaaaatttgctgtcaccttaaataagacattttaattttgttataatgtacaatttagaagtttgattaattatattatctatttaggcattaatataaaagaggtaggagtctgttatttaaaaaaagcattaaatttaaaaaaaaactgtcttgtctacttttagcttcattctcccatattttgaagggtgtgtaacttcagctctgcaggattgcatggggtaaaacttgttaccaacacatgtgaaccattgctacattgtaggttgtgatcattttgccccactgaagcccatgtatctgaccttacgtgccttttgaactaggagaatcgggctaatttattaatgatgataattataatgtatctgtacagcactttttacatttgcgaagtgctttccaatccatgttagttactagttattacagctgtaaggataaaacacgtcatgtggattcattttgaattggtgctattggtatttcctctgttattgctaataaatgaaaatggtggtatg

SEQ ID NO: 172124 - DNA, 2231 bp, Homo sapiens
  Payload ID: 13820
  Gene Symbol: PCDHA6
  Gene Name: protocadherin alpha 6
  Uniprot ID: Q9UN73
  ENST ID: ENST00000527624
  CDS Start-End: 28-2088
atggaaataaaaccagaggtatttgacatggtgtttaccccggaggatagattgggaaagcaatgtctgctcctcccgcttctgctcctcgcagcctggaaggtggggagcggccagctccactactccgtacccgaggaggccaaacacggcaccttcgtgggccggatcgcgcaggacctggggctggagctggcggagctggtgccgcgcctgttcaggatggcctccaaagaccgcgaggaccttctggaggtaaatctgcagaatggcattttgtttgtgaattctcggatcgaccgcgaggagctgtgcgggcggagcgcggagtgcagcatccacctggaggtgatcgtggacaggccgctgcaggttttccatgtggacgtggaggtgagggacattaacgacaacccgcccttgttcccggtagaggaacaaagagtgctgatttacgaatctaggctgccagattctgtgtttccactggagggcgcgtccgatgcagatgttggctcaaattccatcttaacctataaactcagttctagcgaatacttcgggctagatgtgaaaataaacagtgatgacaataaacaaattgggctcttattaaagaaatccttggacagagaggaagctcctgcacacaacttattcctgacagccacagatgggggcaaacctgagctcacaggcactgttcagctgctggtcacagtgctggatgtgaatgataatgctcccactttcgaacagtctgaatacgaagtaagaatattcgaaaatgcagacaacggaacaacagttatcagactgaatgcttctgatcgggatgaaggagcgaatggggcaatttcatattcttttaatagccttgttgcagccatggttattgaccactttagcatagatcgaaatacgggagaaatagtgattcggggtaatttggattttgaacaagaaaacttatacaaaatcctcattgacgccacggacaaaggccatcctcccatggcgggtcattgcaccgttttagtgagaattttggataaaaatgataacgtccctgagatagcactgacttccttatccttgcctgtacgtgaagacgctcaatttggtactgtcatcgccctaattagcgtgaacgacctcgattcaggtgccaacgggcaggtgaactgctcgctgacgcctcacgtccctttcaagctggtgtccaccttcaagaattactactcgttggtgctggacagtgccctggaccgcgagagcgtgtcggcctatgagttggtggtaaccgcgcgggacgggggctcgccttcgctgtgggccaccgccagcttgtctgtggaggtggccgacatgaatgacaatgctccggcgttcgcgcagcccgagtacacagtgttcgtgaaggagaacaacccgccgggctgccacatcttcacggtgtctgcgcgagacgcggacgcgcaggagaacgcgctggtgtcctactcgctggtggagcggcgggtgggcgagcgcgcgttgtcgagctacatttcggtgcacgcggagagcggcaaggtgtacgcgctgcagccgctggaccacgaggagctagagctgctgcagtttcagccacgacagcccaaccctgactggcgttactctgcctccctgagagcaggcatgcacagctctgtgcacctagaggaggctggcattctacgggctggtccaggagggcctgatcagcagtggccaacagtatccagtgcaacaccagaaccagaggcaggagaagtgtcccctccagtcggtgcgggtgtcaacagcaacagctggacctttaaatacggaccaggcaaccccaaacaatccggtcccggtgagttgcccgacaaattcattatcccaggatctcctgcaatcatctccatccggcaggagcctactaacagccaaattgacaaaagtgacttcataaccttcggcaaaaaggaggagaccaagaaaaagaagaaaaagaagaagggtaacaagacccaggagaaaaaagagaaagggaacagcacgactgacaacagtgaccagtgaggtcctcaaatggaaacaagccacttagccagtttttgtaataatggcaaatctctcccatgtagcaattccctgctcctttttcctatctacatgagccctcttagagacctcagaaatctgcagaaagttccctgtgtctg

SEQ ID NO: 172125 - DNA, 2922 bp, Homo sapiens
  Payload ID: 13821
  Gene Symbol: PCDHA7
  Gene Name: protocadherin alpha 7
  Uniprot ID: Q9UN72
  ENST ID: ENST00000356878
  CDS Start-End: 137-2506
aaagacgctccactctctttcactctttggatgcacaacaatggccacacatcgagattgaaatgaagggataaaaacattcctataaattcgaaggcaagttttgctgactagaaaaacaagccaataatttgaaatggtgtgcccgaatggatacgacccagggggccgacatctactgctgtttattataattctagcagcttgggaggcagggagaggccagctccactactcggtccccgaggaggctaaacatggcaacttcgtgggccgcatcgcgcaggacctggggctggagctggcggagctggtgccgcgcctgttccgggcggtgtgcaaattccgtggggatcttctggaggtaaatctgcagaatggcattttgtttgtgaattctcggatcgaccgcgaggagctgtgcgggcggagcgcggagtgcagcatccacctggaggtgatcgtggaaaggccgctgcaggttttccatgtggacgtggaggtgaaggacattaacgacaaccctccggtgttcccagcgacacaaaggaatctgttcatcgcggaatccaggccgcttgactctcggtttccactagagggcgcgtccgatgcagatatcggggagaacgccctgctcacttacagactgagccccaatgagtatttcttcctggacgtgccaaccagcaaccagcaggtaaaacctcttggacttgtattacggaaacttttagacagagaagaaactccggagcttcatttattgctcacggccaccgatggaggcaaacccgagctgactggcaccgttcaattactcatcacggtactggacaacaatgacaatgccccagtgttcgacagaaccctgtatacggtgaaattaccagaaaacgtttctatcggaacgctggtgattcaccccaatgcctcagatttagacgaaggcttgaatggggatattatttactccttctccagtgatgtttctccagatataaaatccaagttccacatggaccccttaagtggggcaatcacagtgataggacatatggattttgaagaaagtagagcacacaagatcccagtcgaggctgtcgataaaggcttcccacccctggctggtcattgtacagttcttgtggaagttgtggatgtaaatgacaatgctccacagttgactctcacttccctgtctctccctattccagaggacgcccaaccaggtaccgtcatcacattgattagcgtgtttgaccgagattttggagtcaacggacaggttacctgctccctgacgccccgcgttcccttcaagttggtgtccaccttcaagaattactattcattggtgctggacagcgctctggaccgcgagagtgtgtccgcctatgagctggtggttaccgcgcgggacgggggctcgccttctctgtgggccactgctagcgtgtccgtggaggtggccgacgtgaacgacaacgccccggcgttcgcgcagcccgagtatacggtgttcgtgaaggagaacaacccgccgggctgccacatcttcactgtgtcggcgggggacgcggacgcgcagaagaacgcgctggtgtcctactcgctggtggagctgcgggtgggcgagcgcgcgctgtcgagctacgtgtcagtgcacgcggagagcggcaaggtgtacgcgctgcagccgttggaccacgaggagctggagctgttgcagttccaggtgagcgcgcgcgatgcgggcgtgccgcctctgggcagcaacgtgacgctgcaggtgttcgtgctggacgagaacgacaacgcgccggcactgctggcgcctcgggtgggtggcactggtggcgcagtgagagagcttgtgccgcggtctgtgggcgcgggccatgtggtggcgaaggtacgtgcagttgacgctgactcaggctacaacgcgtggctttcgtatgagttgcaaccggtggcggccggtgcgagcatcccgttccgcgtggggctgtacactggtgagatcagcacgacacgagccctagatgagacggacgcaccgcgccaccgccttctggtgcttgtgaaggaccacggggagccctcgctgacagccacagccaccgtgctggtgtcgctggtggaaagcggccaggcaccaaaggcgtcgtcgcgggcatcgttgggcattgcaggcccagagaccgagctggtggatgtcaacgtgtacctgatcatcgccatctgcgcggtgtccagtctgttggtgcttaccctgctgctgtacacggcgttgcggtgctcagcgccgtcctctgagggcgcatgtagtttggtaaagcccactctggtgtgctccagcgcggtggggagctggtcattctcccagcagaggcggcagagggtgtgctctggggagggcccacccaagacagacctcatggccttcagtcccagccttcctcagggtccatcctctacagacaatgtgagtcataaataatcttgtttccaacaattttaaaacaattagttcaattggtctccttaaattttctttcataatttcttttttagttgatagctttatgtataattattattttttaatgttatgctgtatttgcactaattatttggaagtacgtttaatatacacttttgttttgggatgcgtaatactatagatcaaaatctatggtttatgttggctactctccatttttggaggaggactttgctaactggagcaatggattcacctttcttctatagtgtatttacaaaatcaaatatttacatttccatattttgataatcaatacctataaatgttatagtaaacaaatttaatatatatgttacctaatattttattctatgtattgtcctcattttataaaatatagctgtgtcaaa

SEQ ID NO: 172126 - DNA, 5221 bp, Homo sapiens
  Payload ID: 13821
  Gene Symbol: PCDHA7
  Gene Name: protocadherin alpha 7
  Uniprot ID: Q9UN72
  ENST ID: ENST00000525929
  CDS Start-End: 1-2814
atggtgtgcccgaatggatacgacccagggggccgacatctactgctgtttattataattctagcagcttgggaggcagggagaggccagctccactactcggtccccgaggaggctaaacatggcaacttcgtgggccgcatcgcgcaggacctggggctggagctggcggagctggtgccgcgcctgttccgggcggtgtgcaaattccgtggggatcttctggaggtaaatctgcagaatggcattttgtttgtgaattctcggatcgaccgcgaggagctgtgcgggcggagcgcggagtgcagcatccacctggaggtgatcgtggaaaggccgctgcaggttttccatgtggacgtggaggtgaaggacattaacgacaaccctccggtgttcccagcgacacaaaggaatctgttcatcgcggaatccaggccgcttgactctcggtttccactagagggcgcgtccgatgcagatatcggggagaacgccctgctcacttacagactgagccccaatgagtatttcttcctggacgtgccaaccagcaaccagcaggtaaaacctcttggacttgtattacggaaacttttagacagagaagaaactccggagcttcatttattgctcacggccaccgatggaggcaaacccgagctgactggcaccgttcaattactcatcacggtactggacaacaatgacaatgccccagtgttcgacagaaccctgtatacggtgaaattaccagaaaacgtttctatcggaacgctggtgattcaccccaatgcctcagatttagacgaaggcttgaatggggatattatttactccttctccagtgatgtttctccagatataaaatccaagttccacatggaccccttaagtggggcaatcacagtgataggacatatggattttgaagaaagtagagcacacaagatcccagtcgaggctgtcgataaaggcttcccacccctggctggtcattgtacagttcttgtggaagttgtggatgtaaatgacaatgctccacagttgactctcacttccctgtctctccctattccagaggacgcccaaccaggtaccgtcatcacattgattagcgtgtttgaccgagattttggagtcaacggacaggttacctgctccctgacgccccgcgttcccttcaagttggtgtccaccttcaagaattactattcattggtgctggacagcgctctggaccgcgagagtgtgtccgcctatgagctggtggttaccgcgcgggacgggggctcgccttctctgtgggccactgctagcgtgtccgtggaggtggccgacgtgaacgacaacgccccggcgttcgcgcagcccgagtatacggtgttcgtgaaggagaacaacccgccgggctgccacatcttcactgtgtcggcgggggacgcggacgcgcagaagaacgcgctggtgtcctactcgctggtggagctgcgggtgggcgagcgcgcgctgtcgagctacgtgtcagtgcacgcggagagcggcaaggtgtacgcgctgcagccgttggaccacgaggagctggagctgttgcagttccaggtgagcgcgcgcgatgcgggcgtgccgcctctgggcagcaacgtgacgctgcaggtgttcgtgctggacgagaacgacaacgcgccggcactgctggcgcctcgggtgggtggcactggtggcgcagtgagagagcttgtgccgcggtctgtgggcgcgggccatgtggtggcgaaggtacgtgcagttgacgctgactcaggctacaacgcgtggctttcgtatgagttgcaaccggtggcggccggtgcgagcatcccgttccgcgtggggctgtacactggtgagatcagcacgacacgagccctagatgagacggacgcaccgcgccaccgccttctggtgcttgtgaaggaccacggggagccctcgctgacagccacagccaccgtgctggtgtcgctggtggaaagcggccaggcaccaaaggcgtcgtcgcgggcatcgttgggcattgcaggcccagagaccgagctggtggatgtcaacgtgtacctgatcatcgccatctgcgcggtgtccagtctgttggtgcttaccctgctgctgtacacggcgttgcggtgctcagcgccgtcctctgagggcgcatgtagtttggtaaagcccactctggtgtgctccagcgcggtggggagctggtcattctcccagcagaggcggcagagggtgtgctctggggagggcccacccaagacagacctcatggccttcagtcccagccttcctcagggtccatcctctacagacaatccacgacagcccaaccctgactggcgttactctgcctccctgagagcaggcatgcacagctctgtgcacctagaggaggctggcattctacgggctggtccaggagggcctgatcagcagtggccaacagtatccagtgcaacaccagaaccagaggcaggagaagtgtcccctccagtcggtgcgggtgtcaacagcaacagctggacctttaaatacggaccaggcaaccccaaacaatccggtcccggtgagttgcccgacaaattcattatcccaggatctcctgcaatcatctccatccggcaggagcctactaacagccaaattgacaaaagtgacttcataaccttcggcaaaaaggaggagaccaagaaaaagaagaaaaagaagaagggtaacaagacccaggagaaaaaagagaaagggaacagcacgactgacaacagtgaccagtgaggtcctcaaatggaaacaagccacttagccagtttttgtaataatggcaaatctctcccatgtagcaattccctgctcctttttcctatctacatgagccctcttagagacctcagaaatctgcagaaagttccctgtgtctgtctagaacgcatttaacaggttttgtcgtaaaagctttactaagtctggtgttaactctttctctccactctggcttgttttcagaacctaaaaagcagacccaagtttcctttctcctccgccgcaaaggagaggcttcccagccccgccagtgagaggttggactctctgccctgtgctccggggatcctgtcttgatgacacttgcagggcaggctgaaaagttttgagattgagcagcttgggagtttgtggccactgggtatgtgtggctaccgcgggtatgcgagtgccagatattggctgagacgagccagcttagactaattggtacaaggaaggcaagaaaacaaagacaaataaacagcggaagttatcagtatggaggggaagtgtaaacttaaagggaccagactttctaaatcttacaactcaagaggtggcagccaccctctaggagacaaaactacccccactgacaaggctttaggagaccctaaagtctgttggctgtgacgtcattatacctaaaatctgcatcatacctgcaagccaacagttcagtgttttaacagagaaccaccctgggaaacagaagcagatctgatgtgtttcctatacatgtcctgtgctcactttattaaaaattcttttgcacacaatgtttatgaaaaggccagatccttttccaatacttatgcaaaagcaaaagaaaaccccgacacctcacctttcgctgtttgttgtttcatagatttatttaaaaaaagagaaagtctatagctataaatctttaaagagaaatatgaatacaattcccctaaactctcctcaaaagagaattcagtctacagccatttaaatgatcattgctgctacagaagtgctttaagagaattgcctgaaacatctgtattatatcggccacctgccaatcacagctttactctttcaggtcactctggggctgcctcttgcatgtattactaaataaaatgatctctctttctctctctctctctcttttctaagaaacaattatgtgcactttgatacacaaccttctctaaccaactatatatcaagacccaaaaattgaagaaaaatattgttttctcatacagtgagcagatttttcaatctactaattctgtgacttgtcttggtgtgctagcctacaccttctctttggtttagttttccttttctataacactctgaattgctaatcttactaacacctatgatgttacctgaaatcaatctcccatatgtatgctgtatgctatgctaagactcctgaaatatacttactctgtgcttgtgtatgtgaatgttaatgcaactattacctagagtgaactttaagctttattgttgaatgtaattccattatatttccttttgtacacctgtgaaaaagtggagtagtgtttttttaaccattgttaatcagcttttgtgtatgaaagacacagtaaaatttctttcttaaatcaagatactggtgattcaaggaattttatttatggtccagccaagagccatctcgtgccaagacttctgctggcaagggaatggataaagctgttttgttctagtaacaattttggaatgaatactgacaatattccatgagggtgtgcaagcacaaattttaccaatctgacctctttgaagttgcagaatgctttgaaattctaatggtatctgaaatatcagctcatagaaagtaacaaaatttgctgtcaccttaaataagacattttaattttgttataatgtacaatttagaagtttgattaattatattatctatttaggcattaatataaaagaggtaggagtctgttatttaaaaaaagcattaaatttaaaaaaaaactgtcttgtctacttttagcttcattctcccatattttgaagggtgtgtaacttcagctctgcaggattgcatggggtaaaacttgttaccaacacatgtgaaccattgctacattgtaggttgtgatcattttgccccactgaagcccatgtatctgaccttacgtgccttttgaactaggagaatcgggctaatttattaatgatgataattataatgtatctgtacagcactttttacatttgcgaagtgctttccaatccatgttagttactagttattacagctgtaaggataaaacacgtcatgtggattcattttgaattggtgctattggtatttcctctgttattgctaataaatgaaaatggtggtatg

SEQ ID NO: 172127 - DNA, 2616 bp, Homo sapiens
  Payload ID: 13822
  Gene Symbol: PCDHA8
  Gene Name: protocadherin alpha 8
  Uniprot ID: Q9Y5H6
  ENST ID: ENST00000378123
  CDS Start-End: 136-2580
cttttctctgacagcatctgtctctaaaggccgaacaacgggagatgcagcggaattggattaaaagactctgaaagtacagtcgttcatctttatattaagataatattttctgataggaaacgactatttaacatggattatcactggcgaggagagctgggatcctggcgactactactcttgcttctgctcctcgcagcctggaaggtggggagcggccagctccactactccgtccccgaggaggccaaacacggcaccttcgtgggccggatcgcgcaggacctggggctggagctggcggagctggtgccgcgcctgttccgggtggcgtccaaaagacaccgggaccttctggaggtaagtctgcagaatggcattttgtttgtgaattctcggatcgaccgcgaggagctgtgcgggcggagcgcggagtgcagcatccacctggaggtgatcgtggacaggccgctgcaggttttccatgtggacgtggaggtgaaggatgttaatgacaacccgccagtgttccgggtaaaagaccaaaagctgtttgtttcagaatccagaatgccagactctcggtttccgctagagggcgcgtccgatgcagatgttggagctaactccgtgttaacctacaggcttagctctcatgattacttcatgctagatgtgaattcaaagaacgatgagaataaactggttgagctcgtattaagaaaatccttggacagagaggacgctcctgcgcaccacttattcctgacagccacagatgggggcaaacctgagctcacaggcactgttcagctgctggtcacagtgctggatgtgaatgataatgctcccactttcgaacagtctgaatacgaagtaagaatattcgaaaacgcagacaacggaacaacagttatcaaactgaatgcttctgatccggatgaaggagccaatggggcaatttcatattcttttaatagccttgttgaaactatggttattgaccactttagcatagatcgaaatacgggagaaatagtgattcggggtaatttggattttgaacaagaaaacttatacaaaatcctcattgacgccacggacaaaggccatcctcccatggcgggtcattgcaccgttttagtgagaattttggataaaaatgataacgtccctgagatagcactgacttccttatccttgcctgtacgtgaagacgctcaatttggtactgtcatcgccctaattagcgtgaacgacctcgattcaggtgccaacgggcaggtgacctgctccctgatgccccatgtccccttcaagctggtgtccaccttcaagaattactactcgttggtgctggacagcgccctggaccgcgagagagtgtcggcctatgagttggtggtaaccgcgcgggacgggggctcgccttcgctgtgggccaccgccagcttgtctgtggaggtggccgacgtgaacgacaatgctccggcgttcgcgcagcccgagtacacggtgttcgtgaaggagaacaacccgccgggctgccacatcttcacggtgtctgcgcgagacgcggacgcgcaggagaacgcgctggtgtcctactcgcttgtggagcggcgggtgggcgagcgctcgctgtcgagctacatttcggtgcacacggagagcggcaaggtgtacgcgctgcagccgctggaccacgaggagctagagctgctgcagttccaggtgagcgcgcgcgacgcgggcgtgccgcctctgggcagcaacgtgacgctgcaggtgttcgtgctggacgagaatgacaacgcgccggcactgctggagcctcgggtgggtggcactggtggcgcagcgagcaagctggtgccgcggtctgtgggcgcgggccacgtggtagcgaaggtgcgcgcagtggacgccgactcgggctacaacgcgtggctttcgtatgagctgcagccagctgcaagcagccctcgcatcccgttccgcgtggggctgtacacgggcgagatcagcaccactcgtgtcctggacgaagcggactctccgcgccaccgtctgctggtcctggtgaaggatcatggtgaacctgcgctgaccgccacggccacggttctggtgtcgctggtggagagcggccaggctccaaaagcgtcatcgaggcagtcggctggcgttttgggtccggaagcggcgctggtggatgtcaacgtgtacctgatcatcgccatctgcgcggtatccagcctgctggtgctcacgctgctgctgtacactgcgctgcggtgctcagcactgcccactgagggcgggtgccgggcgggcaagcccactctggtgtgctccagtgcggtggggagctggtcatactcgcaacaacagccgcagagggtgtgctctggtgaggggccaccgaagacggacctcatggccttcagcccctgccttcctcctgatctgggatcagttgatgtaggcgaagagcaagatttaaatgttgatcatggcctcaaagtaagtccatttaaatttagaactcataaattctatttgtggaaattgtagttactttaaaagtgtttcagatttagtttttcaccg

SEQ ID NO: 172128 - DNA, 5260 bp, Homo sapiens
  Payload ID: 13822
  Gene Symbol: PCDHA8
  Gene Name: protocadherin alpha 8
  Uniprot ID: Q9Y5H6
  ENST ID: ENST00000531613
  CDS Start-End: 1-2853
atggattatcactggcgaggagagctgggatcctggcgactactactcttgcttctgctcctcgcagcctggaaggtggggagcggccagctccactactccgtccccgaggaggccaaacacggcaccttcgtgggccggatcgcgcaggacctggggctggagctggcggagctggtgccgcgcctgttccgggtggcgtccaaaagacaccgggaccttctggaggtaagtctgcagaatggcattttgtttgtgaattctcggatcgaccgcgaggagctgtgcgggcggagcgcggagtgcagcatccacctggaggtgatcgtggacaggccgctgcaggttttccatgtggacgtggaggtgaaggatgttaatgacaacccgccagtgttccgggtaaaagaccaaaagctgtttgtttcagaatccagaatgccagactctcggtttccgctagagggcgcgtccgatgcagatgttggagctaactccgtgttaacctacaggcttagctctcatgattacttcatgctagatgtgaattcaaagaacgatgagaataaactggttgagctcgtattaagaaaatccttggacagagaggacgctcctgcgcaccacttattcctgacagccacagatgggggcaaacctgagctcacaggcactgttcagctgctggtcacagtgctggatgtgaatgataatgctcccactttcgaacagtctgaatacgaagtaagaatattcgaaaacgcagacaacggaacaacagttatcaaactgaatgcttctgatccggatgaaggagccaatggggcaatttcatattcttttaatagccttgttgaaactatggttattgaccactttagcatagatcgaaatacgggagaaatagtgattcggggtaatttggattttgaacaagaaaacttatacaaaatcctcattgacgccacggacaaaggccatcctcccatggcgggtcattgcaccgttttagtgagaattttggataaaaatgataacgtccctgagatagcactgacttccttatccttgcctgtacgtgaagacgctcaatttggtactgtcatcgccctaattagcgtgaacgacctcgattcaggtgccaacgggcaggtgacctgctccctgatgccccatgtccccttcaagctggtgtccaccttcaagaattactactcgttggtgctggacagcgccctggaccgcgagagagtgtcggcctatgagttggtggtaaccgcgcgggacgggggctcgccttcgctgtgggccaccgccagcttgtctgtggaggtggccgacgtgaacgacaatgctccggcgttcgcgcagcccgagtacacggtgttcgtgaaggagaacaacccgccgggctgccacatcttcacggtgtctgcgcgagacgcggacgcgcaggagaacgcgctggtgtcctactcgcttgtggagcggcgggtgggcgagcgctcgctgtcgagctacatttcggtgcacacggagagcggcaaggtgtacgcgctgcagccgctggaccacgaggagctagagctgctgcagttccaggtgagcgcgcgcgacgcgggcgtgccgcctctgggcagcaacgtgacgctgcaggtgttcgtgctggacgagaatgacaacgcgccggcactgctggagcctcgggtgggtggcactggtggcgcagcgagcaagctggtgccgcggtctgtgggcgcgggccacgtggtagcgaaggtgcgcgcagtggacgccgactcgggctacaacgcgtggctttcgtatgagctgcagccagctgcaagcagccctcgcatcccgttccgcgtggggctgtacacgggcgagatcagcaccactcgtgtcctggacgaagcggactctccgcgccaccgtctgctggtcctggtgaaggatcatggtgaacctgcgctgaccgccacggccacggttctggtgtcgctggtggagagcggccaggctccaaaagcgtcatcgaggcagtcggctggcgttttgggtccggaagcggcgctggtggatgtcaacgtgtacctgatcatcgccatctgcgcggtatccagcctgctggtgctcacgctgctgctgtacactgcgctgcggtgctcagcactgcccactgagggcgggtgccgggcgggcaagcccactctggtgtgctccagtgcggtggggagctggtcatactcgcaacaacagccgcagagggtgtgctctggtgaggggccaccgaagacggacctcatggccttcagcccctgccttcctcctgatctgggatcagttgatgtaggcgaagagcaagatttaaatgttgatcatggcctcaaaccacgacagcccaaccctgactggcgttactctgcctccctgagagcaggcatgcacagctctgtgcacctagaggaggctggcattctacgggctggtccaggagggcctgatcagcagtggccaacagtatccagtgcaacaccagaaccagaggcaggagaagtgtcccctccagtcggtgcgggtgtcaacagcaacagctggacctttaaatacggaccaggcaaccccaaacaatccggtcccggtgagttgcccgacaaattcattatcccaggatctcctgcaatcatctccatccggcaggagcctactaacagccaaattgacaaaagtgacttcataaccttcggcaaaaaggaggagaccaagaaaaagaagaaaaagaagaagggtaacaagacccaggagaaaaaagagaaagggaacagcacgactgacaacagtgaccagtgaggtcctcaaatggaaacaagccacttagccagtttttgtaataatggcaaatctctcccatgtagcaattccctgctcctttttcctatctacatgagccctcttagagacctcagaaatctgcagaaagttccctgtgtctgtctagaacgcatttaacaggttttgtcgtaaaagctttactaagtctggtgttaactctttctctccactctggcttgttttcagaacctaaaaagcagacccaagtttcctttctcctccgccgcaaaggagaggcttcccagccccgccagtgagaggttggactctctgccctgtgctccggggatcctgtcttgatgacacttgcagggcaggctgaaaagttttgagattgagcagcttgggagtttgtggccactgggtatgtgtggctaccgcgggtatgcgagtgccagatattggctgagacgagccagcttagactaattggtacaaggaaggcaagaaaacaaagacaaataaacagcggaagttatcagtatggaggggaagtgtaaacttaaagggaccagactttctaaatcttacaactcaagaggtggcagccaccctctaggagacaaaactacccccactgacaaggctttaggagaccctaaagtctgttggctgtgacgtcattatacctaaaatctgcatcatacctgcaagccaacagttcagtgttttaacagagaaccaccctgggaaacagaagcagatctgatgtgtttcctatacatgtcctgtgctcactttattaaaaattcttttgcacacaatgtttatgaaaaggccagatccttttccaatacttatgcaaaagcaaaagaaaaccccgacacctcacctttcgctgtttgttgtttcatagatttatttaaaaaaagagaaagtctatagctataaatctttaaagagaaatatgaatacaattcccctaaactctcctcaaaagagaattcagtctacagccatttaaatgatcattgctgctacagaagtgctttaagagaattgcctgaaacatctgtattatatcggccacctgccaatcacagctttactctttcaggtcactctggggctgcctcttgcatgtattactaaataaaatgatctctctttctctctctctctctcttttctaagaaacaattatgtgcactttgatacacaaccttctctaaccaactatatatcaagacccaaaaattgaagaaaaatattgttttctcatacagtgagcagatttttcaatctactaattctgtgacttgtcttggtgtgctagcctacaccttctctttggtttagttttccttttctataacactctgaattgctaatcttactaacacctatgatgttacctgaaatcaatctcccatatgtatgctgtatgctatgctaagactcctgaaatatacttactctgtgcttgtgtatgtgaatgttaatgcaactattacctagagtgaactttaagctttattgttgaatgtaattccattatatttccttttgtacacctgtgaaaaagtggagtagtgtttttttaaccattgttaatcagcttttgtgtatgaaagacacagtaaaatttctttcttaaatcaagatactggtgattcaaggaattttatttatggtccagccaagagccatctcgtgccaagacttctgctggcaagggaatggataaagctgttttgttctagtaacaattttggaatgaatactgacaatattccatgagggtgtgcaagcacaaattttaccaatctgacctctttgaagttgcagaatgctttgaaattctaatggtatctgaaatatcagctcatagaaagtaacaaaatttgctgtcaccttaaataagacattttaattttgttataatgtacaatttagaagtttgattaattatattatctatttaggcattaatataaaagaggtaggagtctgttatttaaaaaaagcattaaatttaaaaaaaaactgtcttgtctacttttagcttcattctcccatattttgaagggtgtgtaacttcagctctgcaggattgcatggggtaaaacttgttaccaacacatgtgaaccattgctacattgtaggttgtgatcattttgccccactgaagcccatgtatctgaccttacgtgccttttgaactaggagaatcgggctaatttattaatgatgataattataatgtatctgtacagcactttttacatttgcgaagtgctttccaatccatgttagttactagttattacagctgtaaggataaaacacgtcatgtggattcattttgaattggtgctattggtatttcctctgttattgctaataaatgaaaatggtggtatg

SEQ ID NO: 172129 - DNA, 6900 bp, Homo sapiens
  Payload ID: 13823
  Gene Symbol: PCDHA9
  Gene Name: protocadherin alpha 9
  Uniprot ID: Q9Y5H5
  ENST ID: ENST00000378122
  CDS Start-End: 725-3253
ctcgcttttcttgcaatattttataccttttcaattcatagaattactcaagaaaactacctcagttggttgctactttttgttgattccttttaccagacatgactaagtttctttttcatcagtagatttctgggctcctatattcactagagattgcaactcctggatttctcttacactagaatcctatttcgagccatatgggagattctgaattccagaacaaaagaattttgtaatttaaaattcgtgattgctcaatggaatcattttaattgttacttcatttctgtcgttatttaaaacttaagtggagagttttctcagggataagaaaaccacaatcaaggtcatacaaaacttttagaggcagtcagtctgctaagaaggctccagcaagagaaacgggatcttctgtttcaacaatcattacttaagaaaaaattaagaaaatgaaataagttttgcagaataactgtgaaatttttattcatgaaatatgtacttacactttgggccacgtgatgtcactctttgccgcgatgttctctctgaatccagacaaatacagcccttttcccatgggaaagaggctcaattctttttcactctctctgtgctgaacgatggcgaacacagcagaatgggactgacgaaatcagatgatttcttctaatttggaggcaattttcactaattagaagaagactgagtatttgaaatgttatactcaagtcgaggagatccagagggtcagcctctactgctctcgcttctgatcctcgcaatgtgggtggtggggagcggccagctccactactccgtcccggaggaagccgaacacggcaccttcgtgggccgcatcgcgcaggacctggggctggagctggcggagctggtgccgcgcctgttccagttggattccaaaggccgcggggaccttctggaggtaaatctgcagaatggcattttgtttgtgaattctcggatcgaccgcgaggagctgtgcgggcggagcgcggagtgcagcatccacctggaggtgatcgtagacaggccgctgcaggttttccatgtggacgtggaggtgaaggacattaacgacaaccctccagtgttcccagcgacacaaaagaatctgttcatcgcggaatccaggccgcttgactctcggtttccactagagggcgcgtccgatgcagatatcggggagaacgccctgctcacttacagactgagccccaatgagtatttcttcctggacgtgccaaccagcaaccagcaggtaaaacctcttggacttgtattacggaaacttttagacagagaagaaactccggagcttcatttattgctcacggccaccgatggaggcaaacccgagctgactggcaccgttcaattactcatcacggtactggacaacaatgacaatgccccagtgttcgacagaaccctgtatacggtgaaattaccagaaaacgtttctatcggaacgctggtgattcaccccaatgcctcagatttagacgaaggcttgaatggggatattatttactccttctccagtgatgtttctccagatataaaatccaagttccacatggaccccttaagtggggcaatcacagtgataggacatatggattttgaagaaagtagagcacacaagatcccagtcgaggctgtcgataaaggcttcccacccctggctggtcattgtacacttcttgtggaagttgtggatgtaaatgacaatgctccacagttgactatcaaaacgctctcggttcctgtaaaagaggacgcacaactggggacagttattgccctgattagtgtgatcgacctagacgcagatgccaacgggcaggttacctgctccctgacgccccacgtccccttcaagctggtgtccacctacaagaattactactcgttggtgctggacagagctctggaccgcgagagtgtgtccgcctacgagctggtggttaccgcgcgggacgggggctcgccttcactgtgggccacggccagggtgtctgtggaggtggccgacgtgaacgacaacgcaccagcgttcgcgcagtccgagtacacggtgttcgtgaaggagaacaacccgccgggctgccacatcttcacggtgtctgcgcgggacgctgacgcgcaggagaacgccctggtgtcctactcgctggtggagcggcggttgggcgagcgctcgctgtcgagctacgtgtcagtgcacgcggagagcggcaaggtgtacgcgctgcagccgttggaccacgaggagctggagctgctacagttccaggtgagcgcgcgcgacgcgggcgtgccgcctctgggcagcaacgtgacgctgcaggtgttcgtgctggacgagaacgacaatgcgccggcgctgctgacacctcggatgaggggcactgacggcgcagtgagcgagatggtgctgcggtcggtgggcgccggcgtagtggtggggaaggtgcgcgcagtggacgccgactcgggctacaacgcgtggctttcatacgagctgcagccagaaacggccagcgcgagcatcccgttccgcgtggggctgtacacgggcgagatcagcacaacgcgtgccctggacgaaacggacgcaccgcgccagcgcctactggtgctggtgaaagaccacggggagccagcgctgacggccacggccactgtgctggtgtcgctggtggagagcggccaggcgccaaagtcatcgtcgcgggcgtcagtgggtgccacgggccccgaggtgacgctggtggatgtcaacgtgtacctgatcatcgccatctgcgcggtgtctagcctgttggttctcacgctgctgctgtacactgtgctgcggtgctcggcgatgcccaccgagggcgagtgcgcgcctggcaagccgacgctggtgtgttctagcgcggtggggagttggtcgtactcgcagcagaggaggcagagggtgtgctctggcgagggtaagcagaagaccgacctcatggccttcagcccgggcctttctccttgtgctggatctacagagcgaacgggagaaccctctgcttcctcagattcaactgggaaggtgggtttttctagcattttatttatttatataattttttttcttgaaagatattatcgattactcccaggggccgttcaaatagttttattcatttttctagaaatccagcagattttttttctgataaagtaaaccccttaacattggagccgactttgtcttgacttctagtgagaattataaactgtatattaaatagatattttttgggtgctgaatcaattttatttaaatttgtgattaaagtgacattgaatttctgatgctatgctgccataacacttgaaaaccaatttagttgttagtcattcattaaacattaacatcactatcatttatttattgctaaatgatgcatagtattttagtctacttgtattgtttataagaaacccaagcaaaaatatatagcaattgttaccttgttaagtttgtagttctctacatttctctggatggagactgtgaacatctgattgttcagcaaccttcagtatctattattttaataagaaagaaacttcccctaaactttagaaaacagttgctccactttaggaatcaaattatgtcaataaatgttataaacacagccttcatttcaacttatataaaatatgttttaaaatgcctgacaatgtagataattcaagaaatgttgactgaaattttgtctacacttagaacattttttgaaattcagtttacagaaattggagaaaatgctttttaaacaagtgtttcctttcttcaagaagacattctccttttaattgaaattttctccattcagtgataaaatgatcagccatgtgaagattcgaaacttcgagttcttttgaaattcagagtctgtaacttaaaacattacccttatgaatttagatgagaattcacttgttctgtcagtaatccataagacagaaatctgtttttttaaaaatatctttttctcctctcagctcatacataacacaaggcagaaatctggatatgagatttgcctctttaatgtcactacatgttatgtttcctgaattgtagtatgtgactttcaaaatggtggttttccacactctacctttagtgcaagctatttgtttgttttctaatttatagttttaaaaacttcgcttattgagtttttgttatgtggtttatatttttctttctctttcagctattttatttaatattgtgtcagatattttacaaggtatgacctaattaaaaactcagtagagaaagatcagaatggccttgagaatagagccacaaaaataactatgaaaatgccagtaacgtttatttaaaacaaaatattttaatttttaaattttcccttaaaacacacttttggaatatgctacaatattacatgttttttgtctttttatttttctgagacggagtcgttttctgccacccaggctggagtacagtggcatgatcttggctcactgcaacgtctgcctcctgggttcaagcaattctcctgcctcagcctcctgagtagctgggattataggcacatgccaccgcgcccagctaatttttgtatttttagtagagatggggtttcatcatgttggccaggttggtctcgaactcctgaccttgtgatgctcccacctcggcctcccaaagtgctgggattaaagctgtgagccactgtgccaaggcttttttattttttttttttgtcattttctttcaaaacttgagtggtctctgagctcctgtcattaaacctatctatatctgtctatcagcacaactcaccttgaatatagtcttatactttcaagtatctttgtctttgcacgtttttcaagtttcatgtgccatttaaacttggacccaggtatctgattatttgatgtgaatagagggatgctacagatgtcatttgtctcccgccctaagtcctccagtctccttagagctagtacttactaagcatttactatgtcatcaataatcataaaacgtatttttttttttgagtcagagtctcgctctgttgcccaggctggagtgcagtggtgccatcttggctcactccaagctccccctcccgtgttcacgccattctcctgcctcagcctcccgagtagctgggactacaggcgcctgccaccatgcccgcctaatttttttgtatttttagtagagatggggtttcaccgtgttagtcaggatggtctcgatctcctgacctcatgatcctcccgcctcagcctcccaaaatgctgggattacaggcgtgagccaccgcgcctggcctaaaatgtgttctttattattgacggctgtattgatgggattggtaatttagtccttcatattaatctctattctctctcagagtacaagctctcatcatatgcaaattctcagaagggctgtgaacaccttagtaataaatttatcttttgaggtcattagcaaacatgaactcacagggatccagagatggtaaaattcaaaacagcctgtcaagttcaaaacagagaggtgaaagcagaagagacactttcctattttgcctaataggtctccttatatgcatctgtagttaacattcctcaattcaagttagaatcatgaaacaataatgaagctcctcctatgtctcttttcaagttgtaattactatataggaaaaactaagttgtcacccaatatcttagacactttgagagcaaagggggtgctgtaaataagtatacaagatcacagacctaaattgagcctgttccagacaaattggggcctatggtcaacctatccttagacctgctaacgcattagcattagcagcacctaagtcctcattgaatgttctggttcaaggctccacctcagaaattctgaaatgggtagtaagagcaaattttcattttaaagcacacctgagatgattctcatacaaccgaaattttagatccatagccctatttgatacttgacagtgcaagtttctgtaatttaaaaagatgtggtggcctgacacctgcaatcccaacattttgggaggccaaggtgggagggtcccttccttgagcccagcagtttgagaccaatgtagtgagactcatctctgccaaaaaaaaaaaattagccgggcatggtggcacacatctctagtcccaattactcaggaggctgaggcgagagaatcgcttgagcctgggacattgaggctgcagtgaactgtgatggcacaactgcatttcagcccgggtgacagcaagattctgtctcaaaaaaaaaaaaaaaaagagtagtttaactactccctactttttattcaatattggacatctacattgggatatttatgttatcacttggtataaaatgtacattagtagaaattgagtttagtttttattattttgtgcgtggagatgattgatcaatggcaaacttattttacgctccagatagctaaaacaaacgttgatattttgatacataactcattacattttaattcagggtttataaaaaagtaatctctaaaatcagaatttgaatgaattttgatgcaagaggcattccagaggagtagagaagtatagaaacagaatttagtaggacacataaactgatggattaagtgacacccatttctgtcagttttcttattcataaatattgttgctctgtcattcagattttaataaaaaaagtttaaagtaattgacacatttaaaaatattctttagaaaagtcaaaacatcattaaataaaataaattaacccttgcataa

SEQ ID NO: 172130 - DNA, 6293 bp, Homo sapiens
  Payload ID: 13823
  Gene Symbol: PCDHA9
  Gene Name: protocadherin alpha 9
  Uniprot ID: Q9Y5H5
  ENST ID: ENST00000532602
  CDS Start-End: 1034-3886
acttggacgttggaataagatagtaaaactcacaacaaaactttgtagaacttagtcaggaaaagaatctcaagcatagctttaaaaacagaaattgccccgagtactaaggatgagcaataatgaaattaaaacatattgtaataacattacacaaactatattggagactacaaagaagagattattcatagattataaagcttggaaagaatcaaaacaacacatttctggaaacagattgtataaatgctacaaaagagaaaaatatattttctccccacgcaacacaagaccttaaagtcaattctcgcttttcttgcaatattttataccttttcaattcatagaattactcaagaaaactacctcagttggttgctactttttgttgattccttttaccagacatgactaagtttctttttcatcagtagatttctgggctcctatattcactagagattgcaactcctggatttctcttacactagaatcctatttcgagccatatgggagattctgaattccagaacaaaagaattttgtaatttaaaattcgtgattgctcaatggaatcattttaattgttacttcatttctgtcgttatttaaaacttaagtggagagttttctcagggataagaaaaccacaatcaaggtcatacaaaacttttagaggcagtcagtctgctaagaaggctccagcaagagaaacgggatcttctgtttcaacaatcattacttaagaaaaaattaagaaaatgaaataagttttgcagaataactgtgaaatttttattcatgaaatatgtacttacactttgggccacgtgatgtcactctttgccgcgatgttctctctgaatccagacaaatacagcccttttcccatgggaaagaggctcaattctttttcactctctctgtgctgaacgatggcgaacacagcagaatgggactgacgaaatcagatgatttcttctaatttggaggcaattttcactaattagaagaagactgagtatttgaaatgttatactcaagtcgaggagatccagagggtcagcctctactgctctcgcttctgatcctcgcaatgtgggtggtggggagcggccagctccactactccgtcccggaggaagccgaacacggcaccttcgtgggccgcatcgcgcaggacctggggctggagctggcggagctggtgccgcgcctgttccagttggattccaaaggccgcggggaccttctggaggtaaatctgcagaatggcattttgtttgtgaattctcggatcgaccgcgaggagctgtgcgggcggagcgcggagtgcagcatccacctggaggtgatcgtagacaggccgctgcaggttttccatgtggacgtggaggtgaaggacattaacgacaaccctccagtgttcccagcgacacaaaagaatctgttcatcgcggaatccaggccgcttgactctcggtttccactagagggcgcgtccgatgcagatatcggggagaacgccctgctcacttacagactgagccccaatgagtatttcttcctggacgtgccaaccagcaaccagcaggtaaaacctcttggacttgtattacggaaacttttagacagagaagaaactccggagcttcatttattgctcacggccaccgatggaggcaaacccgagctgactggcaccgttcaattactcatcacggtactggacaacaatgacaatgccccagtgttcgacagaaccctgtatacggtgaaattaccagaaaacgtttctatcggaacgctggtgattcaccccaatgcctcagatttagacgaaggcttgaatggggatattatttactccttctccagtgatgtttctccagatataaaatccaagttccacatggaccccttaagtggggcaatcacagtgataggacatatggattttgaagaaagtagagcacacaagatcccagtcgaggctgtcgataaaggcttcccacccctggctggtcattgtacacttcttgtggaagttgtggatgtaaatgacaatgctccacagttgactatcaaaacgctctcggttcctgtaaaagaggacgcacaactggggacagttattgccctgattagtgtgatcgacctagacgcagatgccaacgggcaggttacctgctccctgacgccccacgtccccttcaagctggtgtccacctacaagaattactactcgttggtgctggacagagctctggaccgcgagagtgtgtccgcctacgagctggtggttaccgcgcgggacgggggctcgccttcactgtgggccacggccagggtgtctgtggaggtggccgacgtgaacgacaacgcaccagcgttcgcgcagtccgagtacacggtgttcgtgaaggagaacaacccgccgggctgccacatcttcacggtgtctgcgcgggacgctgacgcgcaggagaacgccctggtgtcctactcgctggtggagcggcggttgggcgagcgctcgctgtcgagctacgtgtcagtgcacgcggagagcggcaaggtgtacgcgctgcagccgttggaccacgaggagctggagctgctacagttccaggtgagcgcgcgcgacgcgggcgtgccgcctctgggcagcaacgtgacgctgcaggtgttcgtgctggacgagaacgacaatgcgccggcgctgctgacacctcggatgaggggcactgacggcgcagtgagcgagatggtgctgcggtcggtgggcgccggcgtagtggtggggaaggtgcgcgcagtggacgccgactcgggctacaacgcgtggctttcatacgagctgcagccagaaacggccagcgcgagcatcccgttccgcgtggggctgtacacgggcgagatcagcacaacgcgtgccctggacgaaacggacgcaccgcgccagcgcctactggtgctggtgaaagaccacggggagccagcgctgacggccacggccactgtgctggtgtcgctggtggagagcggccaggcgccaaagtcatcgtcgcgggcgtcagtgggtgccacgggccccgaggtgacgctggtggatgtcaacgtgtacctgatcatcgccatctgcgcggtgtctagcctgttggttctcacgctgctgctgtacactgtgctgcggtgctcggcgatgcccaccgagggcgagtgcgcgcctggcaagccgacgctggtgtgttctagcgcggtggggagttggtcgtactcgcagcagaggaggcagagggtgtgctctggcgagggtaagcagaagaccgacctcatggccttcagcccgggcctttctccttgtgctggatctacagagcgaacgggagaaccctctgcttcctcagattcaactgggaagccacgacagcccaaccctgactggcgttactctgcctccctgagagcaggcatgcacagctctgtgcacctagaggaggctggcattctacgggctggtccaggagggcctgatcagcagtggccaacagtatccagtgcaacaccagaaccagaggcaggagaagtgtcccctccagtcggtgcgggtgtcaacagcaacagctggacctttaaatacggaccaggcaaccccaaacaatccggtcccggtgagttgcccgacaaattcattatcccaggatctcctgcaatcatctccatccggcaggagcctactaacagccaaattgacaaaagtgacttcataaccttcggcaaaaaggaggagaccaagaaaaagaagaaaaagaagaagggtaacaagacccaggagaaaaaagagaaagggaacagcacgactgacaacagtgaccagtgaggtcctcaaatggaaacaagccacttagccagtttttgtaataatggcaaatctctcccatgtagcaattccctgctcctttttcctatctacatgagccctcttagagacctcagaaatctgcagaaagttccctgtgtctgtctagaacgcatttaacaggttttgtcgtaaaagctttactaagtctggtgttaactctttctctccactctggcttgttttcagaacctaaaaagcagacccaagtttcctttctcctccgccgcaaaggagaggcttcccagccccgccagtgagaggttggactctctgccctgtgctccggggatcctgtcttgatgacacttgcagggcaggctgaaaagttttgagattgagcagcttgggagtttgtggccactgggtatgtgtggctaccgcgggtatgcgagtgccagatattggctgagacgagccagcttagactaattggtacaaggaaggcaagaaaacaaagacaaataaacagcggaagttatcagtatggaggggaagtgtaaacttaaagggaccagactttctaaatcttacaactcaagaggtggcagccaccctctaggagacaaaactacccccactgacaaggctttaggagaccctaaagtctgttggctgtgacgtcattatacctaaaatctgcatcatacctgcaagccaacagttcagtgttttaacagagaaccaccctgggaaacagaagcagatctgatgtgtttcctatacatgtcctgtgctcactttattaaaaattcttttgcacacaatgtttatgaaaaggccagatccttttccaatacttatgcaaaagcaaaagaaaaccccgacacctcacctttcgctgtttgttgtttcatagatttatttaaaaaaagagaaagtctatagctataaatctttaaagagaaatatgaatacaattcccctaaactctcctcaaaagagaattcagtctacagccatttaaatgatcattgctgctacagaagtgctttaagagaattgcctgaaacatctgtattatatcggccacctgccaatcacagctttactctttcaggtcactctggggctgcctcttgcatgtattactaaataaaatgatctctctttctctctctctctctcttttctaagaaacaattatgtgcactttgatacacaaccttctctaaccaactatatatcaagacccaaaaattgaagaaaaatattgttttctcatacagtgagcagatttttcaatctactaattctgtgacttgtcttggtgtgctagcctacaccttctctttggtttagttttccttttctataacactctgaattgctaatcttactaacacctatgatgttacctgaaatcaatctcccatatgtatgctgtatgctatgctaagactcctgaaatatacttactctgtgcttgtgtatgtgaatgttaatgcaactattacctagagtgaactttaagctttattgttgaatgtaattccattatatttccttttgtacacctgtgaaaaagtggagtagtgtttttttaaccattgttaatcagcttttgtgtatgaaagacacagtaaaatttctttcttaaatcaagatactggtgattcaaggaattttatttatggtccagccaagagccatctcgtgccaagacttctgctggcaagggaatggataaagctgttttgttctagtaacaattttggaatgaatactgacaatattccatgagggtgtgcaagcacaaattttaccaatctgacctctttgaagttgcagaatgctttgaaattctaatggtatctgaaatatcagctcatagaaagtaacaaaatttgctgtcaccttaaataagacattttaattttgttataatgtacaatttagaagtttgattaattatattatctatttaggcattaatataaaagaggtaggagtctgttatttaaaaaaagcattaaatttaaaaaaaaactgtcttgtctacttttagcttcattctcccatattttgaagggtgtgtaacttcagctctgcaggattgcatggggtaaaacttgttaccaacacatgtgaaccattgctacattgtaggttgtgatcattttgccccactgaagcccatgtatctgaccttacgtgccttttgaactaggagaatcgggctaatttattaatgatgataattataatgtatctgtacagcactttttacatttgcgaagtgctttccaatccatgttagttactagttattacagctgtaaggataaaacacgtcatgtggattcattttgaattggtgctattggtatttcctctgttattgctaataaatgaaaatggtggtatg

SEQ ID NO: 172131 - DNA, 5299 bp, Homo sapiens
  Payload ID: 13824
  Gene Symbol: PCDHAC1
  Gene Name: protocadherin alpha subfamily C, 1
  Uniprot ID: Q9H158
  ENST ID: ENST00000253807
  CDS Start-End: 1-2892
atggtgggctgtggggtggcagttttatgtttgtgggtttcctgcggcgctgcagcgggacagctcgagtactcagtgccggaggagacggagcggggcgtagccgtaggcaatctctccgcggacttgaggctgccagcggccgctatgtcctcgcggaactttcgcttcctttccagccaccgcgagctctacttcggggtggatctacccagcggcaatttggtggtcagagagccggcggaccgcgaacagctgtgcagggccaaagctgcctgcgtcttgacctacgacctggtgctcgaggacccgctggagctgcacaagattcggattcacgtcctggacaccaatgacaactcacctctctttcctgccggcgacgtgcagctgcacatccccgagttcctgacgcccggagcccgctttactctcccgaatgcccaagatgacgacgagggaagcaatgggatactaagctacagcctaagccccagtcagcactttcgcctggacatgggatcgcgggttgacggcagcgaatacccggagttggtgttggagaaagcactggatcgcgaacagcgcgccacccacctgctggtgcttacagctcgggacggcgggctacctgcccgctcaggagacgcacaagtcaccatcattgtggtggacacaaatgacaacgcgcctgtatttgagcgctccgtataccgcaccaaggttccagagactgcacccaatgggactgtgttattccgagttcaagccttggatccagatgaagggtccaatggggaagtccagtactccctaagcaacagcacgcaagcagagctgcgacaccgctttcacgtgcaccctaaaagtggggaggtgcaagtagctgcttcactaggtccgcctgaaacgctcttggaggcatacattgaggcgagggacgaaggtgtctttggtttagctagcaccgctaaactgctggtggaggtgactgacgtgaacgatcatgcccccgaactggacttcctgactctttcgaacccagtacctgaggacgctgcccctggcacagtgattgctctctttagtgtaaaggatgaagacctcgattctaatggtagggtcatttgtggcatgtctagtgcaggcccttttcagctgacggcttcctttgacaactactacagcctgctgattgatgggcccctggaccgggagcagatcagtgaataccaagtcctgatcacggcctcagatagtggctcacccccacttagcacccgaaggacaatcactgtgtcagttgctgatgtgaatgacaatacaccaaactttcctcaaccccagcaggaacttttcgttgctgaaaacaatggccctggggcctctctaggccgagtgtttgcccaggaccccgacctggggaagaatggccttgtctcttatgagctgttggatgttatctctgaagggccatcagcctctagcttgctggcagtggaatcatccagtggggccatcactgccaaaacttcctttgactttgagcagctcagggggtttcatttccaagtagaaggccgggatggtggcattcctcccagaagtgcaacagtgactataaacttgtttgtggtagataggaatgacaattatccggttatcttgtttcccttgcccagaaatggttctgtcccagtggaaattgtgccccgctctgccaggactggacacttggtcacaaaagtggtagcagaggatgctgacagtggttctaatgcctggctttcctaccacatctcccgggcgtctgactctagtctctttagaatttcagccaatataggtgagctccgtactgctcgcttagttcttcccactgatgcagttaagcagagggtggtggtagtggttcgggaccatggagacccaccactttcctcctctgtcactctgggtgtgctgttgagcaactctgtccctcagttacttccagactttgaagatgtctgggaaccaggagggcagctttctgcccagaacttgtatttagtaattgccttggcttgtatttcctttttatttctggggtgcttacttttcttcgtgtgtaccaagttgcaccagagcccaggctgttgcgctcagagctgctgtcgctctacagaggatctgaggtatggaagtaagatggtttcaaatccttgcatgacatcagccaccatagatgtcactacagttgagagactttctcagacttatctctatcgggcctctctgggacttggttctgataataacagtttgctgttgcgtggggagtacaatgctgccgacctgcgaaatcttgccactggggtaggactgaatttgccaatatcctgtattcagattcggaataggaaaggggatcacgctaatgtcaatgccatgccacgacagcccaaccctgactggcgttactctgcctccctgagagcaggcatgcacagctctgtgcacctagaggaggctggcattctacgggctggtccaggagggcctgatcagcagtggccaacagtatccagtgcaacaccagaaccagaggcaggagaagtgtcccctccagtcggtgcgggtgtcaacagcaacagctggacctttaaatacggaccaggcaaccccaaacaatccggtcccggtgagttgcccgacaaattcattatcccaggatctcctgcaatcatctccatccggcaggagcctactaacagccaaattgacaaaagtgacttcataaccttcggcaaaaaggaggagaccaagaaaaagaagaaaaagaagaagggtaacaagacccaggagaaaaaagagaaagggaacagcacgactgacaacagtgaccagtgaggtcctcaaatggaaacaagccacttagccagtttttgtaataatggcaaatctctcccatgtagcaattccctgctcctttttcctatctacatgagccctcttagagacctcagaaatctgcagaaagttccctgtgtctgtctagaacgcatttaacaggttttgtcgtaaaagctttactaagtctggtgttaactctttctctccactctggcttgttttcagaacctaaaaagcagacccaagtttcctttctcctccgccgcaaaggagaggcttcccagccccgccagtgagaggttggactctctgccctgtgctccggggatcctgtcttgatgacacttgcagggcaggctgaaaagttttgagattgagcagcttgggagtttgtggccactgggtatgtgtggctaccgcgggtatgcgagtgccagatattggctgagacgagccagcttagactaattggtacaaggaaggcaagaaaacaaagacaaataaacagcggaagttatcagtatggaggggaagtgtaaacttaaagggaccagactttctaaatcttacaactcaagaggtggcagccaccctctaggagacaaaactacccccactgacaaggctttaggagaccctaaagtctgttggctgtgacgtcattatacctaaaatctgcatcatacctgcaagccaacagttcagtgttttaacagagaaccaccctgggaaacagaagcagatctgatgtgtttcctatacatgtcctgtgctcactttattaaaaattcttttgcacacaatgtttatgaaaaggccagatccttttccaatacttatgcaaaagcaaaagaaaaccccgacacctcacctttcgctgtttgttgtttcatagatttatttaaaaaaagagaaagtctatagctataaatctttaaagagaaatatgaatacaattcccctaaactctcctcaaaagagaattcagtctacagccatttaaatgatcattgctgctacagaagtgctttaagagaattgcctgaaacatctgtattatatcggccacctgccaatcacagctttactctttcaggtcactctggggctgcctcttgcatgtattactaaataaaatgatctctctttctctctctctctctcttttctaagaaacaattatgtgcactttgatacacaaccttctctaaccaactatatatcaagacccaaaaattgaagaaaaatattgttttctcatacagtgagcagatttttcaatctactaattctgtgacttgtcttggtgtgctagcctacaccttctctttggtttagttttccttttctataacactctgaattgctaatcttactaacacctatgatgttacctgaaatcaatctcccatatgtatgctgtatgctatgctaagactcctgaaatatacttactctgtgcttgtgtatgtgaatgttaatgcaactattacctagagtgaactttaagctttattgttgaatgtaattccattatatttccttttgtacacctgtgaaaaagtggagtagtgtttttttaaccattgttaatcagcttttgtgtatgaaagacacagtaaaatttctttcttaaatcaagatactggtgattcaaggaattttatttatggtccagccaagagccatctcgtgccaagacttctgctggcaagggaatggataaagctgttttgttctagtaacaattttggaatgaatactgacaatattccatgagggtgtgcaagcacaaattttaccaatctgacctctttgaagttgcagaatgctttgaaattctaatggtatctgaaatatcagctcatagaaagtaacaaaatttgctgtcaccttaaataagacattttaattttgttataatgtacaatttagaagtttgattaattatattatctatttaggcattaatataaaagaggtaggagtctgttatttaaaaaaagcattaaatttaaaaaaaaactgtcttgtctacttttagcttcattctcccatattttgaagggtgtgtaacttcagctctgcaggattgcatggggtaaaacttgttaccaacacatgtgaaccattgctacattgtaggttgtgatcattttgccccactgaagcccatgtatctgaccttacgtgccttttgaactaggagaatcgggctaatttattaatgatgataattataatgtatctgtacagcactttttacatttgcgaagtgctttccaatccatgttagttactagttattacagctgtaaggataaaacacgtcatgtggattcattttgaattggtgctattggtatttcctctgttattgctaataaatgaaaatggtggtatg

SEQ ID NO: 172132 - DNA, 4077 bp, Homo sapiens
  Payload ID: 13824
  Gene Symbol: PCDHAC1
  Gene Name: protocadherin alpha subfamily C, 1
  Uniprot ID: Q9H158
  ENST ID: ENST00000409700
  CDS Start-End: 525-2981
aagagcccagctgggctcagccacagttatcagcaatctgcgggcagaggatgtggaggttaagatctgggcagcctcagggcgttgtcctagaaaacaccgtttaaggagagaagtgttagtgtctcggggcgtctcccaggctccgccctgcgcccgcagccagcgtggtggtcgagaccccagcccgctgctactggagacagcacctctcgcgcccgggcgggcggcctcgtctctgcacccctaggcggcgctgcgctcctcaacacccggccggctccgctttcccagacggctgcccagcctccagcctagcaagcccggctcccagctggccagccccggcaatgccggcgttcgggaggcgcaacgtcggcggtcgctgagtatccagcccgcagcagtgacggccggcaggagcgtgctcttccccgcggctcgtgctctccaggagtccggagcatggtcctgggtcaccgttggtgtagcgtgttggtggaacgtggacgcctagagggaggatggtgggctgtggggtggcagttttatgtttgtgggtttcctgcggcgctgcagcgggacagctcgagtactcagtgccggaggagacggagcggggcgtagccgtaggcaatctctccgcggacttgaggctgccagcggccgctatgtcctcgcggaactttcgcttcctttccagccaccgcgagctctacttcggggtggatctacccagcggcaatttggtggtcagagagccggcggaccgcgaacagctgtgcagggccaaagctgcctgcgtcttgacctacgacctggtgctcgaggacccgctggagctgcacaagattcggattcacgtcctggacaccaatgacaactcacctctctttcctgccggcgacgtgcagctgcacatccccgagttcctgacgcccggagcccgctttactctcccgaatgcccaagatgacgacgagggaagcaatgggatactaagctacagcctaagccccagtcagcactttcgcctggacatgggatcgcgggttgacggcagcgaatacccggagttggtgttggagaaagcactggatcgcgaacagcgcgccacccacctgctggtgcttacagctcgggacggcgggctacctgcccgctcaggagacgcacaagtcaccatcattgtggtggacacaaatgacaacgcgcctgtatttgagcgctccgtataccgcaccaaggttccagagactgcacccaatgggactgtgttattccgagttcaagccttggatccagatgaagggtccaatggggaagtccagtactccctaagcaacagcacgcaagcagagctgcgacaccgctttcacgtgcaccctaaaagtggggaggtgcaagtagctgcttcactaggtccgcctgaaacgctcttggaggcatacattgaggcgagggacgaaggtgtctttggtttagctagcaccgctaaactgctggtggaggtgactgacgtgaacgatcatgcccccgaactggacttcctgactctttcgaacccagtacctgaggacgctgcccctggcacagtgattgctctctttagtgtaaaggatgaagacctcgattctaatggtagggtcatttgtggcatgtctagtgcaggcccttttcagctgacggcttcctttgacaactactacagcctgctgattgatgggcccctggaccgggagcagatcagtgaataccaagtcctgatcacggcctcagatagtggctcacccccacttagcacccgaaggacaatcactgtgtcagttgctgatgtgaatgacaatacaccaaactttcctcaaccccagcaggaacttttcgttgctgaaaacaatggccctggggcctctctaggccgagtgtttgcccaggaccccgacctggggaagaatggccttgtctcttatgagctgttggatgttatctctgaagggccatcagcctctagcttgctggcagtggaatcatccagtggggccatcactgccaaaacttcctttgactttgagcagctcagggggtttcatttccaagtagaaggccgggatggtggcattcctcccagaagtgcaacagtgactataaacttgtttgtggtagataggaatgacaattatccggttatcttgtttcccttgcccagaaatggttctgtcccagtggaaattgtgccccgctctgccaggactggacacttggtcacaaaagtggtagcagaggatgctgacagtggttctaatgcctggctttcctaccacatctcccgggcgtctgactctagtctctttagaatttcagccaatataggtgagctccgtactgctcgcttagttcttcccactgatgcagttaagcagagggtggtggtagtggttcgggaccatggagacccaccactttcctcctctgtcactctgggtgtgctgttgagcaactctgtccctcagttacttccagactttgaagatgtctgggaaccaggagggcagctttctgcccagaacttgtatttagtaattgccttggcttgtatttcctttttatttctggggtgcttacttttcttcgtgtgtaccaagttgcaccagagcccaggctgttgcgctcagagctgctgtcgctctacagaggatctgaggtatggaagtaagatggtttcaaatccttgcatgacatcagccaccatagatgtcactacagttgagagactttctcagacttatctctatcgggcctctctgggacttggttctgataataacagtttgctgttgcgtggggagtacaatgctgccgacctgcgaaatcttgccactggggtaggactgaatttgccaatatcctgtattcagattcggaataggaaaggggatcacgctaatgtcaatgccatggtaagcaaattttatggaatttgattcctttggcccggagatggctgctagctgtgttttgaaatatttcttagacaagcctttcacaacatttcatcaattgaactaaacactccttcttagcacttcctgtgccaagaaatctggaagtatagaagtattagaagattgccctaggcctcaagggacttatagtttatttttgagaaacaagggcaaaaattaaaacctatttaagaacaataaaagtaatatgacataaaggtctaaaattaaaaataaaataccaaaatattttataagcaacagatgtgtaaggcactctaatatttaaagtgaagaatgaaaaatatgtaagagtctgctttatatgaatataatatggaaggtgaaacatttacttaaactattgcaatgcattattaaaagatgacgataaccacaaaagatgtaaaaataaattacaatgggggttaaaagaagggagaaagggaacataagagaacatttgagtgaggaggaaggagtcagagaaggctttgtgatagagatcacagatttagttggatctttaatacgatataccatttaataaaaaacagtgtattctctagcctatacttttaatgaataccattttggtgaaggtgtcttctttgggaatgacaccctaaaacatagctgatagctccatagcagtgttttgtaactgctttggagtttttgcttacacaaaaactgtaagcctctctcataacatctatttatactgataggagatcatattgttggatataggacttgacaaccttttgttttgtgtttctattgataatattttacaaagaggaaagatgagtaatttttatgtcagaaatatttatgtgttcaaaggtgcacttaccatccaaagtccattcaacttggatttaatttcttttattttaggggacaaatacacttaacaaataagtaaatatcatatttgagagtaatgtatctaatgaaagttaagtgattcaaatatttcaatttatctgttagtggcccttggcatttcaaaacttcttttttttttttgagacaggggtctcactatgttgcccaggctggtctcaaa

SEQ ID NO: 172133 - DNA, 5963 bp, Homo sapiens
  Payload ID: 13825
  Gene Symbol: PCDHAC2
  Gene Name: protocadherin alpha subfamily C, 2
  Uniprot ID: Q9Y5I4
  ENST ID: ENST00000289269
  CDS Start-End: 533-3556
gttaagcaggggagagacggtggagactggatgaactggacagtgggggtagggagaaagggagtggccgtgttcctgcggtccgctgggatccggcaggtccagggtgaaggagatggggctggagaggctgagcagtccgggttcgctgtccgccacttcggcgcggaatcagagcaggacttgctgagccctcctaccgctccctttccccctccccctctgtcttcccttctgtttccttttccctccccctggagctgtagcggcagcagcagcaggaagccgagccgggttgagcgactcggaggcgagcggaggagctggaatatggggagtcagcgaggacggtggggccaggagcccttgggagggcctacggagggagcggccccaggcgctttctagagcgtgagcggtgggggagcaggcgcagggtggcacgagcggaggcggggcccgggcgtggggcacggctggggaagctgccgcctccggccctgcccggctgcctccgccgcggccagtggctatggagcaggcgggcaccagacctgcggcgacagagcatccacggctccggcggcccatgccctggctgctgctactgcctctcctgctgctgttgctgctgctgctacctggccctgcggcctcccagctgcgatactctgtgccagaggagcaggcacccggcgcgctcgtgggcaacgtggctcgcgcgctggggcttgagctgcggcgcttggggccgggttgcttgcgcatcaaccatctgggtgcgcccagtccgcgctacctggagctggacctgacgagtggagcgctcttcgtcaacgagcgcattgatcgggaggcgctgtgtgagcagcggcctcgctgcctgctcagcttggaagtgctggcgcacaaccccgtggcggtgagcgccgttgaggtggaaatattggacatcaacgacaactcaccgcgtttcccgcggcccaactaccagcttcaggtaagcgaatcggtggcgcctggagcgcgctttcacatagagagtgcgcaggaccccgacgtgggcgccaactcagtacagacctacgagctcagccccagcgagcacttcgagctggaccttaagcccctgcaggagaacagtaaagtgcttgagctggtgctgcgtaagggcctagaccgggagcaggcagccttgcaccacctggttctcacagccgtggatgggggcatcccagcccgctcgggtacggcacagatctctgtgcgtgtcctggacactaacgacaactctcctgcctttgaccagtccacttatcgcgtccagctacgggaggactcacccccaggcacattggtggtgaagctgaatgcctcagacccggatgagggctccaatggtgagctcaggtactccttgagcagctacacgtcggaccgggagaggcagctcttcagcatagatgccagtaccggggaagtgcgagtaattggggggctggattatgaggaagcctcctcctaccagatctatgtgcaggcgactgaccggggtccagtgcccatggcaggtcactgcaaggtgctggtggacatcgtggacgtgaatgacaatgccccagaggtggtgctcacggacctgtatagcccagtgcctgagaatgctacacccaacaccattgtggccgttctcagtgtcaatgaccaagactcaggccccaaccggaaagtgagcctgggtctggaggccacactgcctttccgactgaatggctttggaaactcctatacactggtggtgagcggcccactggaccgagagcgggtggctgtctacaacatcacggtgacagccacagatgggggaataccgcagctcacatccctgcgtacactgaaggttgagatctctgacatcaatgacaatccaccaagcttcctggaggactcctattccatctacatacaggagaacaatttgccaggtgtgttgctctgtactgtgcaagccacagacccagatgaaaaggagaatgcagaggtgacctactcccttctggagagggagattcaagggctgccagtcacctcctatgtctccattaacagtgccagtggcagcctttatgctgtcaactcctttgactatgagaagtttcgggagttctttgtgactgtggaggctcaggacaaggggagcccaccactgagcagcactgtgactgccaacgtatatgtggtggacatgaatgaccatgcccctcacattctgtaccctacctcaaccaactcgtcagcagccttcgagatggtgcctcgaactgcccctgctggctacctggtcaccaaagtcatagctatggactcagactctgggcaaaatgcttggcttttttaccatctagcccagacttctgacctggacctctttaaggtagagctgcacacaggagaaattaggactaccaggaagatgggagatgagagtggtagcactttcaacctgaccgtggtggtccgagataatggagagccatcactatcagcctctgtggccattacagtagctgtggtggatagggtttccaaaatcctccctgacactcagaggcatgttaagagccctcggacatactctgaaattaccctttatctaataatagcattaagcacagtgtcttttatatttcttttgacaatcatcattttgagcatcatcaagtgctaccgctacactgcgtatggcactgcatgctgtggaggcttctgtggagtaagggaaaggtcccctgcagaactgtacaaacaagccaacaacaatattgatgccaggataccgcatggcctcaaagtgcagcctcacttcattgaagttcgagggaatggctccctcaccaagacctactgctacaaggcctgtctgacagcaggctcagggagtgacactttcatgttttacaatacaggggcccagacaggaccagggccttcgggagcccaagcagcagtgactgacagcaggaatctcacaggccaaagtggtcagaatgctgggaacctgattattctcaaaaatgaggctgtttctcaaaatgagccacgacagcccaaccctgactggcgttactctgcctccctgagagcaggcatgcacagctctgtgcacctagaggaggctggcattctacgggctggtccaggagggcctgatcagcagtggccaacagtatccagtgcaacaccagaaccagaggcaggagaagtgtcccctccagtcggtgcgggtgtcaacagcaacagctggacctttaaatacggaccaggcaaccccaaacaatccggtcccggtgagttgcccgacaaattcattatcccaggatctcctgcaatcatctccatccggcaggagcctactaacagccaaattgacaaaagtgacttcataaccttcggcaaaaaggaggagaccaagaaaaagaagaaaaagaagaagggtaacaagacccaggagaaaaaagagaaagggaacagcacgactgacaacagtgaccagtgaggtcctcaaatggaaacaagccacttagccagtttttgtaataatggcaaatctctcccatgtagcaattccctgctcctttttcctatctacatgagccctcttagagacctcagaaatctgcagaaagttccctgtgtctgtctagaacgcatttaacaggttttgtcgtaaaagctttactaagtctggtgttaactctttctctccactctggcttgttttcagaacctaaaaagcagacccaagtttcctttctcctccgccgcaaaggagaggcttcccagccccgccagtgagaggttggactctctgccctgtgctccggggatcctgtcttgatgacacttgcagggcaggctgaaaagttttgagattgagcagcttgggagtttgtggccactgggtatgtgtggctaccgcgggtatgcgagtgccagatattggctgagacgagccagcttagactaattggtacaaggaaggcaagaaaacaaagacaaataaacagcggaagttatcagtatggaggggaagtgtaaacttaaagggaccagactttctaaatcttacaactcaagaggtggcagccaccctctaggagacaaaactacccccactgacaaggctttaggagaccctaaagtctgttggctgtgacgtcattatacctaaaatctgcatcatacctgcaagccaacagttcagtgttttaacagagaaccaccctgggaaacagaagcagatctgatgtgtttcctatacatgtcctgtgctcactttattaaaaattcttttgcacacaatgtttatgaaaaggccagatccttttccaatacttatgcaaaagcaaaagaaaaccccgacacctcacctttcgctgtttgttgtttcatagatttatttaaaaaaagagaaagtctatagctataaatctttaaagagaaatatgaatacaattcccctaaactctcctcaaaagagaattcagtctacagccatttaaatgatcattgctgctacagaagtgctttaagagaattgcctgaaacatctgtattatatcggccacctgccaatcacagctttactctttcaggtcactctggggctgcctcttgcatgtattactaaataaaatgatctctctttctctctctctctctcttttctaagaaacaattatgtgcactttgatacacaaccttctctaaccaactatatatcaagacccaaaaattgaagaaaaatattgttttctcatacagtgagcagatttttcaatctactaattctgtgacttgtcttggtgtgctagcctacaccttctctttggtttagttttccttttctataacactctgaattgctaatcttactaacacctatgatgttacctgaaatcaatctcccatatgtatgctgtatgctatgctaagactcctgaaatatacttactctgtgcttgtgtatgtgaatgttaatgcaactattacctagagtgaactttaagctttattgttgaatgtaattccattatatttccttttgtacacctgtgaaaaagtggagtagtgtttttttaaccattgttaatcagcttttgtgtatgaaagacacagtaaaatttctttcttaaatcaagatactggtgattcaaggaattttatttatggtccagccaagagccatctcgtgccaagacttctgctggcaagggaatggataaagctgttttgttctagtaacaattttggaatgaatactgacaatattccatgagggtgtgcaagcacaaattttaccaatctgacctctttgaagttgcagaatgctttgaaattctaatggtatctgaaatatcagctcatagaaagtaacaaaatttgctgtcaccttaaataagacattttaattttgttataatgtacaatttagaagtttgattaattatattatctatttaggcattaatataaaagaggtaggagtctgttatttaaaaaaagcattaaatttaaaaaaaaactgtcttgtctacttttagcttcattctcccatattttgaagggtgtgtaacttcagctctgcaggattgcatggggtaaaacttgttaccaacacatgtgaaccattgctacattgtaggttgtgatcattttgccccactgaagcccatgtatctgaccttacgtgccttttgaactaggagaatcgggctaatttattaatgatgataattataatgtatctgtacagcactttttacatttgcgaagtgctttccaatccatgttagttactagttattacagctgtaaggataaaacacgtcatgtggattcattttgaattggtgctattggtatttcctctgttattgctaataaatgaaaatggtggtatg

SEQ ID NO: 172134 - DNA, 3011 bp, Homo sapiens
  Payload ID: 13825
  Gene Symbol: PCDHAC2
  Gene Name: protocadherin alpha subfamily C, 2
  Uniprot ID: Q9Y5I4
  ENST ID: ENST00000615316
  CDS Start-End: 298-2952
tgtttccttttccctccccctggagctgtagcggcagcagcagcaggaagccgagccgggttgagcgactcggaggcgagcggaggagctggaatatggggagtcagcgaggacggtggggccaggagcccttgggagggcctacggagggagcggccccaggcgctttctagagcgtgagcggtgggggagcaggcgcagggtggcacgagcggaggcggggcccgggcgtggggcacggctggggaagctgccgcctccggccctgcccggctgcctccgccgcggccagtggctatggagcaggcgggcaccagacctgcggcgacagagcatccacggctccggcggcccatgccctggctgctgctactgcctctcctgctgctgttgctgctgctgctacctggccctgcggcctcccagctgcgatactctgtgccagaggagcaggcacccggcgcgctcgtgggcaacgtggctcgcgcgctggggcttgagctgcggcgcttggggccgggttgcttgcgcatcaaccatctgggtgcgcccagtccgcgctacctggagctggacctgacgagtggagcgctcttcgtcaacgagcgcattgatcgggaggcgctgtgtgagcagcggcctcgctgcctgctcagcttggaagtgctggcgcacaaccccgtggcggtgagcgccgttgaggtggaaatattggacatcaacgacaactcaccgcgtttcccgcggcccaactaccagcttcaggtaagcgaatcggtggcgcctggagcgcgctttcacatagagagtgcgcaggaccccgacgtgggcgccaactcagtacagacctacgagctcagccccagcgagcacttcgagctggaccttaagcccctgcaggagaacagtaaagtgcttgagctggtgctgcgtaagggcctagaccgggagcaggcagccttgcaccacctggttctcacagccgtggatgggggcatcccagcccgctcgggtacggcacagatctctgtgcgtgtcctggacactaacgacaactctcctgcctttgaccagtccacttatcgcgtccagctacgggaggactcacccccaggcacattggtggtgaagctgaatgcctcagacccggatgagggctccaatggtgagctcaggtactccttgagcagctacacgtcggaccgggagaggcagctcttcagcatagatgccagtaccggggaagtgcgagtaattggggggctggattatgaggaagcctcctcctaccagatctatgtgcaggcgactgaccggggtccagtgcccatggcaggtcactgcaaggtgctggtggacatcgtggacgtgaatgacaatgccccagaggtggtgctcacggacctgtatagcccagtgcctgagaatgctacacccaacaccattgtggccgttctcagtgtcaatgaccaagactcaggccccaaccggaaagtgagcctgggtctggaggccacactgcctttccgactgaatggctttggaaactcctatacactggtggtgagcggcccactggaccgagagcgggtggctgtctacaacatcacggtgacagccacagatgggggaataccgcagctcacatccctgcgtacactgaaggttgagatctctgacatcaatgacaatccaccaagcttcctggaggactcctattccatctacatacaggagaacaatttgccaggtgtgttgctctgtactgtgcaagccacagacccagatgaaaaggagaatgcagaggtgacctactcccttctggagagggagattcaagggctgccagtcacctcctatgtctccattaacagtgccagtggcagcctttatgctgtcaactcctttgactatgagaagtttcgggagttctttgtgactgtggaggctcaggacaaggggagcccaccactgagcagcactgtgactgccaacgtatatgtggtggacatgaatgaccatgcccctcacattctgtaccctacctcaaccaactcgtcagcagccttcgagatggtgcctcgaactgcccctgctggctacctggtcaccaaagtcatagctatggactcagactctgggcaaaatgcttggcttttttaccatctagcccagacttctgacctggacctctttaaggtagagctgcacacaggagaaattaggactaccaggaagatgggagatgagagtggtagcactttcaacctgaccgtggtggtccgagataatggagagccatcactatcagcctctgtggccattacagtagctgtggtggatagggtttccaaaatcctccctgacactcagaggcatgttaagagccctcggacatactctgaaattaccctttatctaataatagcattaagcacagtgtcttttatatttcttttgacaatcatcattttgagcatcatcaagtgctaccgctacactgcgtatggcactgcatgctgtggaggcttctgtggagtaagggaaaggtcccctgcagaactgtacaaacaagccaacaacaatattgatgccaggataccgcatggcctcaaagtgcagcctcacttcattgaagttcgagggaatggctccctcaccaagacctactgctacaaggcctgtctgacagcaggctcagggagtgacactttcatgttttacaatacaggggcccagacaggaccagggccttcgggagcccaagcagcagtgactgacagcaggaatctcacaggccaaagtggtcagaatgctgggaacctgattattctcaaaaatgaggctgtttctcaaaatgaggtgagacagtggtcagggggtcttctacaaactcatgcatttgttacacatcccccaatatcctgtgatttggctttattgagtcattaacagtgacaagagttatctggtaaactgagtatatatagtatccacaatttgatcataat

SEQ ID NO: 172135 - DNA, 8210 bp, Homo sapiens
  Payload ID: 13826
  Gene Symbol: PCDHB1
  Gene Name: protocadherin beta 1
  Uniprot ID: Q9Y5F3
  ENST ID: ENST00000306549
  CDS Start-End: 337-2793
tctcattggcttctcaattcccaaggactttttttcctgaaagggaattaacaggtgagtctgttgttgctttggcaacaaactttcaacctctacctaactctccggaatgagaacatatctattaatacattcgctagactggggagttgagtcgctcaatgcaaattttctttcaagtgcaaaacagcttaatgggctcggctagcctttggtggtgctgcagttagaggctagtgaagcggagagcagctgttgcagtaacctgttgcagaaaagtgaaagtatatccgcaacagttggctctgattgcagagagcgcgcttgtgagaactgatggcgggtacgcgcagaaaatctttgcaaaacaggcaagtgggatctcttctcatttttctgtgcatatctgtgggggatgcgacaactatccgctattcagtggcagaggaaatggagagcggctcgtttgtggccaacgtagctaaggacctaggactggaggtagggaagctggctgcgcgcggggcgcggctggtttccgagggcaacaaaatgcatttccggctccaccgcaagacgggagatttgtttgtgaaggagaaactggatcgggagtcactttgtggcaaagccgacccttgtgttctgcactttgaagtagtcctggtggagccgctgcagtccttccgggccgaggtcagggtatttgatatcaatgacaatgccccagttttcctaaacaaggagccgcttttaaagattccggagagcacccctttgggttcacgttttcctctgcagagcgcccaggatctggacgtgggccttaacggtctccagaactacaccctgagtgccaatgggtatttccacctgcacacccgcttctgcagccacgggcctaaatatgctgagctggtgctgaacaaacccctggaccgagaggagcagcctgaagtcaacttgacaattacggcggtggacggcgggtccccgcctaagtctggcacagctcacatccacgtggtggttctggatgtcaacgaccacgtgccccagttctcgcgactggtgtacagagcccaggtatcagagaacagccccaatggctctttggtggccacggtgactgccgtggacctagacgagggcaccaacaaagcgataacttactctttagctcaaaacccagaagcaattctcaagacgtttcagattgaccctcaaaatggagaagttcgactaagaggacccctcgattttgaagccattgaaacatacgacattgacattcaagctacagatggtggaggcctctctgcccacagcaaagtcctggtagaagtggtggatgtgaatgacaatcctcccgaagtgatggtctcctctgtgtccagcccactccctgaagactcaccaccacagacagtagtagcccttttcactatcagagaccgggacattcgagtgggaggaaaagtcacctgcttcctcagagaagaccttccctttgtaatcaaacctacatttgggaattcttactcactggtcactgacagaagcttggatcgggaggaggtctcaggctataatatcaccattgttgccatggatactggaccacctagcttgtctgccgagactatgatagaggtgctaatatccgacgttaatgacaatcctccaatatttcgggaagattcctatatcttgactgttcgagaaaacaacagtcctgcggtttttattggcaaagtccatgctgaggatcttgatttgggtgagaatgcccaaataacatattctctgttgcctccaaaaaacggagatctttcagtctttgcttacatatccataaattcaggcaatgggaagctctacgcgctgagaaccatggattatgaggccattcaagattttcaatttgtggtaaaggcaactgatgggggcttcctgtcactgagtagccaagttactgtcagagtggttgtcctagatgacaatgacaatcgtccaatgatcttatacccactgcagaacggcaccttgccctgcaatgacctggtgcccaggtctgcagaggcaggctacctagtgaccaaagtggtggctgtggatggtgactcaggtcagaattcttggctttcatatcatctacttaaggccactgaccttgggttattttctgttcaaagacaaaatggagaaatccatacattaaggcagatatctgagagagaccccatgatgcagaaattgatcattcttgttcaggatcacggccaaccagctctttccactactgtctcactcaacatcctgctggtagatggcttttcagagccctacctgcagttccaggatccaaccaagcattctagaaaggtaaatccatccactaaatatttggtcatttctctggtcatcctttcctttctctttctcctctctgtcatagtgatcttcattatacatgtctaccaaaagattaaatatagagaaaagttcacaattcaagagcatttctatgatgactgtaatttctctaacaacctggtacaaggacaaggcaatggatccttatctcggccttgtccatatgaaatgtgttcagccactggcactggtaatagtgagtttcgctttcttaagcgttttatgcccaacttccctttccctcatgccactggggagataaaaatggaggctggctccagtttgcccccaaattctgataggaataagtctcagagattagagggccatgaccaggtatctgatgactatatgtagctcctatttacaggctcagtgagagaagagaagcaaaattttatacttggtatgcaaagatgttacatcctcattaaaacaaaaactggtagtagattgcagctttagtaaagataagagtacttagtttggtgaaaatgggaaacctagagtgaggctaggcttactcaatacaaagcagttatcctgatccccagatcatatatctataaccctttctccagttggaattctgtttaaagaaatgtcaccctctataaatgcatatgtggtaggaacttctgcttttccatctctgtgctagcaagtaatgaataagccattattcacattttccttagaagttcattggtcctggcccaggaaatacttagttccatagagagatccttttatttgcctctaaattattttccagtagaaagttatgcatgcatagggaagagaactaccttccctttttgatatattgggaagtgattaggtttgacaagcagagatatagtttattattcaggaatctctaaattcttgtccctgatgagtgattatctttgatcaataccttgcctgcaatcattcataatcataatcatggaaatgcctggtaaatggtgatcttcacaaataatcatggtgggaggaagggtggagaaagaaaaggatttcacttatttgcaaatgtgaataagggcagacataaggataaagagattcagtttaggaatgttctccaaaattaaattagatgtagttgttttttttttttttttttttttttttgagacggagtttttctcttgttgcccagactggagtgcaatggcacgatctcggctcactgcaacctctgcctcctgggttcaagcgattctcctgcctcagcctcctgagtagctaggattacaggcatgcgccaccatgcccagctaattttttggtatttttagtagagacggggtttcaccatgttggccaggctggtcatgaacttctgacctcaggtgatccaccagcctcggaaacccaaagcactgggattacaggcataagccaccacgcccagccagatttgatttcttgattgtttggagccataggcaagtctcaaatctccctcttttatatccagatgtctatccttgcagtcccagagaaaatctatttgaaaaaacggaaatggagggtgggtgaggaaaaaaataaagtatgacggctgggcaccgtggctcatggctgtaatctcagcactctgggagacggagggaggcagatcacctgaggtcaggagttcgagatcaccctggctaacatggcaaaaccctatctctactaaaaatacaaaaattagtcagtcgtggtggcacgcacctgtaatcccaggtactcaagaggctgaggctggagaatcgcttgaacctgggaggtggaggttgcagtgagctgagattgtgccactgcactccagcctgggcaacagagtgagacgctgtctcaaaaacataaaaataaatacataaatacataaatacataaggcctgctgtagttaataagtgttacagaacactctaaactattttgtgccattaagtgtacacaacatttattgtaaaccattttgtagtttgtagagcaaatataaaataaaaagacattaaaattaaaaagttcattaatactaattaagtggcattaaggaaagacacattttcaggtagtactagatttgattgtaagccattttcctctctgagtattctgaagttaacacatgcaaactgagaaaaagtggcatttttagtaaatcattcataaaatgaaatggagtggggagacaacttaagcttctctttgatcaccactgtttgatttcataagctattctgagccctctcattctaaaataagccaatgttaaaacattaacatatttcagggattctcccaacactgctaactgtgccttgaaagtcaaaagtttgctttagagaagggcatggtggctcatacctgtagtcccagctactcaggagtctgaaggaggaggattgctcaagcccaggagttcaggggtgcagtaagctatgattgcacttctgcactccagcctgggcaaaagagtgaaacctcatctcaaaaaaaaaaaaagtgtgctttaatgaggctttaattatattccttattttataaaaatgtgtgtaaattcagactcactagaatacatcctcttggtattttaagggtagagcattatcttttaaaatacttcttaaatataccaaatcatgtttattgatacaaacttcattcttggacttaatgactgatacctaatggcaccacctggctgtttacctgttggccaggaatacactaaaatttagtgctgttattttttagatgttagagatgcttagggcagaactggtgtaacctatggctgccttcaatgttaaaatgttaaagaacagatgaagcaaatgcactatatcaatgaattgcttttatttttaatattaaatattttacatacattgagttatgattccgatttagagtaaaggttttcttgcacaaaacatagaataagtgttccagtgtatttgtgttccaattggtgaaggcatgctgaaatttctatttcctttaaatgaaaaaggagatagaatttttatttatttatttattttttggagacaaagtcttgctctgtcacccaggctggagtacagtggcatgatctcggctcactgcaaactccgtctcctgggttcaagtgatcttcctgcctcagcctcctgagtagctgggactacaggtatacattaccacgcccagctaaattttgtgtttttagtagagacggggcttcgccatgttggcatttcgctatgttggccaggctggtctcgagctcctgatctcaggtgatccacccgccttggcctcccaaagtgctaggattacagcaccatgcccagcctagaattaatttttatgggtaagcaataattagttaataaaacatgcttaagtaaaagctactgtattaactgtgtttcattacacttaatgatgtgaacataatcaatggaaactggcttaatgtcaaggataggaaaagaaaatggtgtagattcatgattttaagactttgatattcaaatagcagtgaaattcatgaatacatatatacacacatacacaatggacagaagatgtagatttgtcaactttttattttttcacattaaatgagataaaatctaccacttcacgccaccattattccataaacgaaatggcattttaatataaaaatggttaagataggctgggcatggtggctcacacctgtaataccagtactttgggaggctgaggcagatggatcacaaggtcaagagatggagaccatcctggccaacatggtgaaaccatgtctctattaaaaatacaaaaattagctgggtgtggtggtatgtgcctgtagtcccagctacttgggaggctgaggcaggagaattgcttgcacccaggaggtggaggttgcagtgagctgagatcatgccactgcactccagcctggcgacaaagcaagactctgtctcaaaaaaaaaaaaaaaaaagaaaaaaagaaaaaagaaaaaaaaaggtaagataacaatctcataaaagaaaccatcctttaaatttaaaaaatgtatcgatttaataaaaaattattttgccaccatttttcttatttttgccttaggtgaaaattttgtcactctaattttattcagacttcaagttcccaagaaaattccaatcctacctgataacttaaaataagaatatatcaattcactgaatgtgaagtaggccacttgtttttggagagaactctgtacaccagctgagattaagtccaggtctctatcagcaaattaagacaaagaatggaaataattagggcaattactctctccaaagtgtcaagtgatattataactatttctatgtattcaaagctataacctaagaaccttgaaaagtgtcttgtacaaaaaggctttttattaggaaataattctagactcataaaattgcaaaaatactatagatagttcctgtatatccttcacctaacttcccggaatgctaacatcttatataaccatagtagttatcaaaattaagaaattaaccttggtataattctatgaagtaaactacagatcttattcaaatttaacagttttcccccaatgtcctttttctattcaaggatccaatccaggatcctgcaaagcatttgttatggctccttagtctctaccacctgtgacagttccttactcttaccttgtctatcatgacttgagatttttgaagagtactagccagttatttgtagaatgcccctcagtttgggattctttgttttctcattattaaactgaggtaatgcattattgggaaaaatactgcagaaatgatattgtatccttttcagtgcatcacgtcagcaggtatgtgatgccaatgtcacactactggtgatattaatcttttttcttttattgtggtaaagaacttataaaatgtaccatgttagccatttttaagtatgttagccatttttaagtaatgttaaggtgatgttaattttgatcgcttggttaacataatgtctgccacgtttctctactataaagttacttttttctctttgtaattaataaacacttgggggatatgctttgaaactatgcaaatatgatgtttctgcttaaaccaattttagtatccattgctagatatttcctgtggcaattaatattgtggcattctaatggtgattttctatttctctatttccttttacattaattaaaattcttctggaaggaaaacttgttactttcccccccacttatttagttagttatttctttacataaggatacctggatatctcctctattatttgggttacaaactaatcctatcatttactttgttgttcagcaaactcttttatctgagatgaagagcagatttttaagactggaattatccatatagaatacatttttatcaaaattagtatttctttgtaactctacatgttagattattttaaacaatcataaagtaaccccattaaggttcatgcataaagttttaactttaaatgaaaattatactaacataattttaaattagtcatacattttaaaatagatataaactgaaaattttaaaatttgttgtgcagacatgtttatatagtttaagctatatatacctgagatactatttaaaaatagacttatatgctgaaattagacttacagatatacaaaaaatggaattggtctgtctgatattatgtaattctcctaaaaataaagaatttctttatca

SEQ ID NO: 172136 - DNA, 3290 bp, Homo sapiens
  Payload ID: 13827
  Gene Symbol: PCDHB10
  Gene Name: protocadherin beta 10
  Uniprot ID: Q9UN67
  ENST ID: ENST00000239446
  CDS Start-End: 201-2603
ggatgctatgcaagtcactaataaaggaagacacggacagatgaacttaaaagagaagctttagctgccaaagattgggaaagggaaaggacaaaaaagacccctgggctacacggcgtaggtgcagggtttcctactgctgttcttttatgctgggagctgtggctgtaaccaactaggaaataacgtatgcagcagctatggctgtcagagagttgtgcttcccaagacaaaggcaagtcctgtttctttttcttttttggggagtgtccttggcaggttctgggtttggacgttattcggtgactgaggaaacagagaaaggatcctttgtggtcaatctggcaaaggatctgggactagcagagggggagctggctgcaaggggaaccagggtggtttccgatgataacaaacaatacctgctcctggattcacataccgggaatttgctcacaaatgagaaactggaccgagagaagctgtgtggccctaaagagccctgtatgctgtatttccaaattttaatggatgatccctttcagatttaccgggctgagctgagagtcagggatataaatgatcacgcgccagtatttcaggacaaagaaacagtcttaaaaatatcagaaaatacagctgaagggacagcatttagactagaaagagcacaggatccagatggaggacttaacggtatccaaaactacacgatcagccccaactcttttttccatattaacattagtggcggtgatgaaggcatgatatatccagagctagtgttggacaaagcactggatcgggaggagcagggagagctcagcttaaccctcacagcgctggatggtgggtctccatccaggtctgggacctctactgtacgcatcgttgtcttggacgtcaatgacaatgccccacagtttgcccaggctctgtatgagacccaggctccagaaaacagccccattgggttccttattgttaaggtatgggcagaagatgtagactctggagtcaacgcggaagtatcctattcattttttgatgcctcagaaaatattcgaacaacctttcaaatcaatcctttttctggggaaatctttctcagagaattgcttgattatgagttagtaaattcttacaaaataaatatacaggcaatggacggtggaggcctttctgcaagatgtagggttttagtggaagtattggacaccaatgacaatccccctgaactgatcgtatcatcattttccaactctgttgctgagaattctcctgagacgccgctggctgtttttaagattaatgacagagactctggagaaaatggaaagatggtttgctacattcaagagaatctgccattcctactaaaaccttctgtggagaatttttacatcctaattacagaaggcgcgctggacagagagatcagagccgagtacaacatcactatcaccgtcactgacttggggacacccaggctgaaaaccgagcacaacataacggtcctggtctccgacgtcaatgacaacgcccccgccttcacccaaacctcctacaccctgttcgtccgcgagaacaacagccccgccctgcacatcggcagcgtcagcgccacagacagagactcgggcaccaacgcccaggtcacctactcgctgctgccgccccaagacccgcacctgcccctcgcctccctggtctccatcaacgcggacaacggccacctgttcgccctcaggtcgctggactacgaggccctgcaggctttcgagttccgcgtgggcgccacagaccgcggctcccccgcgctgagcagagaggcgctggtgcgcgtgctggtgctggacgccaacgacaactcgcccttcgtgctgtacccgctgcagaacggctccgcgccctgcaccgagctggtgccccgggcggccgagccgggctacctggtgaccaaggtggtggcggtggacggcgactcgggccagaacgcctggctgtcgtaccagctgctcaaggccacggagcccgggctgttcggtgtgtgggcgcacaatggggaggtgcgcaccgccaggctgctgagcgagcgcgacgcagccaagcacaggctcgtggtgcttgtcaaggacaatggcgagcctcctcgctcggccaccgccacgctgcacttgctcctggtggacggcttctcccagccctacctgcctctcccggaggcggccccggcccaggcccaggccgaggccgacttgctcaccgtctacctggtggtggcgttggcctcggtgtcttcgctcttcctcctctcggtgctcctgttcgtggcggtgcggctgtgcaggaggagcagggcggcctcggtgggtcgctgctcggtgcccgagggtccttttccagggcatctggtggacgtgaggggcgctgagaccctgtcccagagctaccagtatgaggtgtgtctgacgggaggccccgggaccagtgagttcaagttcttgaaaccagttatttcggatattcaggcacagggccctgggaggaagggtgaagaaaattccaccttccgaaatagctttggatttaatattcagtaaagtctgtttttagtttcatatacttttggtgtgttacatagccatgtttctattagtttacttttaaatctcaaatttaagttattatgcaacttcaagcattattttcaagtagtatacccctgtggttttacaatgtttcatcatttttttgcattaataacaactgggtttaatttaatgagtatttttttctaaatgatagtgttaaggttttaattctttccaactgcccaaggaattaattactattatatctcattacagaaatctgaggttttgattcatttcagagcttgcatctcatgattctaatcacttctgtctatagtgtacttgctctatttaagaaggcatatctacatttccaaactcattctaacattctatatattcgtgtttgaaaaccatgtcatttatttctacatcatgtatttaaaaagaaatatttctctactactatgctcatgacaaaatgaaacaaagcatattgtgagcaatactgaacatcaataatacccttagtttatatacttattattttatctttaagcatgctacttttacttggccaatattttcttatgttaacttttgctgatgtataaaacagactatgccttataattgaaataaaattataatctgcctgaaaatgaataaaaataaaacattttgaaatgtgtg

SEQ ID NO: 172137 - DNA, 2397 bp, Homo sapiens
  Payload ID: 13827
  Gene Symbol: PCDHB10
  Gene Name: protocadherin beta 10
  ENST ID: ENST00000515856
  CDS Start-End: 1-2397
atggagattggatggatgcacaatcggagacaaaggcaagtccttgttttctttgttttgctgagcttgtctggggcgggcgccgagttggggtcctattccgtagtggaagaaacggagagaggctcttttgtggcaaatctaggaaaagacctggggttggggttgacagagatgtccacccgcaaggccaggatcatttcccaggggaacaaacagcatttgcagctcaaggctcaaactggggatttgctcataaatgagaagctagatcgagaggagctatgcggtcccactgagccttgcatactacatttccaagtgttaatggaaaaccctttagaaatatttcaggctgaactgagggtgatagatataaatgaccattctcccatgttcactgaaaaggaaatgattctaaaaattccagagaacagtcctcttggctccctgttcttactagaaagagcacaggatccagatggaggacttaacggtatccaaaactacacgatcagccccaactcttttttccatattaacattagtggcggtgatgaaggcatgatatatccagagctagtgttggacaaagcactggatcgggaggagcagggagagctcagcttaaccctcacagcgctggatggtgggtctccatccaggtctgggacctctactgtacgcatcgttgtcttggacgtcaatgacaatgccccacagtttgcccaggctctgtatgagacccaggctccagaaaacagccccattgggttccttattgttaaggtatgggcagaagatgtagactctggagtcaacgcggaagtatcctattcattttttgatgcctcagaaaatattcgaacaacctttcaaatcaatcctttttctggggaaatctttctcagagaattgcttgattatgagttagtaaattcttacaaaataaatatacaggcaatggacggtggaggcctttctgcaagatgtagggttttagtggaagtattggacaccaatgacaatccccctgaactgatcgtatcatcattttccaactctgttgctgagaattctcctgagacgccgctggctgtttttaagattaatgacagagactctggagaaaatggaaagatggtttgctacattcaagagaatctgccattcctactaaaaccttctgtggagaatttttacatcctaattacagaaggcgcgctggacagagagatcagagccgagtacaacatcactatcaccgtcactgacttggggacacccaggctgaaaaccgagcacaacataacggtcctggtctccgacgtcaatgacaacgcccccgccttcacccaaacctcctacaccctgttcgtccgcgagaacaacagccccgccctgcacatcggcagcgtcagcgccacagacagagactcgggcaccaacgcccaggtcacctactcgctgctgccgccccaagacccgcacctgcccctcgcctccctggtctccatcaacgcggacaacggccacctgttcgccctcaggtcgctggactacgaggccctgcaggctttcgagttccgcgtgggcgccacagaccgcggctcccccgcgctgagcagagaggcgctggtgcgcgtgctggtgctggacgccaacgacaactcgcccttcgtgctgtacccgctgcagaacggctccgcgccctgcaccgagctggtgccccgggcggccgagccgggctacctggtgaccaaggtggtggcggtggacggcgactcgggccagaacgcctggctgtcgtaccagctgctcaaggccacggagcccgggctgttcggtgtgtgggcgcacaatggggaggtgcgcaccgccaggctgctgagcgagcgcgacgcagccaagcacaggctcgtggtgcttgtcaaggacaatggcgagcctcctcgctcggccaccgccacgctgcacttgctcctggtggacggcttctcccagccctacctgcctctcccggaggcggccccggcccaggcccaggccgaggccgacttgctcaccgtctacctggtggtggcgttggcctcggtgtcttcgctcttcctcctctcggtgctcctgttcgtggcggtgcggctgtgcaggaggagcagggcggcctcggtgggtcgctgctcggtgcccgagggtccttttccagggcatctggtggacgtgaggggcgctgagaccctgtcccagagctaccagtatgaggtgtgtctgacgggaggccccgggaccagtgagttcaagttcttgaaaccagttatttcggatattcaggcacagggccctgggaggaagggtgaagaaaattccaccttccgaaatagctttggatttaatatt

SEQ ID NO: 172138 - DNA, 4198 bp, Homo sapiens
  Payload ID: 13828
  Gene Symbol: PCDHB11
  Gene Name: protocadherin beta 11
  Uniprot ID: Q9Y5F2
  ENST ID: ENST00000354757
  CDS Start-End: 194-2587
gatggcgttgtgaacactgatatccagtgcacacagagaatcagaagacagaaacaacaagccttcaagagggtgacctggaaaccattcaacagggttaaaatccttagaccacagaggatttggtggacaagtcagagacgcgttccgcagagctgaagcctttcttcaagaagcctacaagaaaggaactatggagaaccaagggacacgcactcagcagataaggcaagtcctgcttctctttgttttgctcggaatgtctcaggcgggctctgaaacctggagcttttctgtggcagaagaaatgcagagcgggagttttgtaggcaatctggcaaaggacctggggctgaaggtgagagaactgtcctcacggggggctcgggtggtctctaatgataagaaacagcgtttgcagctggacataaacactggggatttgctcttaagtgaaacactagacagggaggagctctgcggttccatcgagccttgcgtgctacatttgcaggtgttaatgcaaaaccccacgcagtttttacaaattgagcttcaggtcagggatataaatgatcactctcccatcttctcggaaaaacaaatgctcctagaaatcccagagaacagtcccgttggtgctgtgttcttactagaaagtgcgaaggatttagatgtaggaatcaatgctgtaaaaagctacacaataagccccaactctcattttcacattaaaatgagagtcattccagacaataggaaataccccgagttagttctggacaaggcgctggattatgaagagctcccggagctcagtttcatcctctctgctctggatggtgggtcccctcccaggtctggaactgccttggtcagggtggtggttgtggacattaatgacaactcccctgaatttgagcaggctttttatgaggtgaagattcgggagaatagcatccttggctcgctgattttgattgtctcagcttgggatttagactctggaacaaatggtgaaatatgctataccttttcccatgcctcagaagatattcgcaagacatttgaaattaatcaaaagtctggagaaattactttaagagcacctctggattttgaaacgattgagtcatactcaataatcattcaagccacagatgggggaggactttttggaaaatctacagtcataattcacgtgatagatgtaaatgacaatgctcctgaaatcactgtgtcatcaattaccagtccaatcccagaaaatacgccagagaccgtggttatggtttttagtatccaagatatagactctggggacaacggaagaattgtttgttccattccggaagacctcccattcgtgctaaaatcttcagttgagaattactacacgttggaaacagagagaccactggacagagagagcacagccgagtacaatatcaccatcaccgtcaccgacttggggatacccaggctgaaaaccgagcacaacacaactgtgttggtctctgacgtcaatgacaacgcccccaccttcacccaaacctcctacaccctgttcgtccgcgagaacaacagccccgccctgcacatcggcagtgtcagcgctacagacagagactcaggcaccaacgcccaggtcaactactcgctactcccgccccaggacctgcacctgcccctcgcctccctggtctccatcaacacagacaacggccacctgttcgccctcaggtcgctggactacgaggccctgcaggctttcgacttccgcgtgggcgccacagaccgcggctccccggctttgagcagcgaggcgctggtgcgcgtgctggtgctggacgccaacgacaactcgcccttcgtgctgtacccgctgcagaacggctccgcgccctgcaccgagctggtgccccgggcggccgagccgggctacctggtgaccaaggtggtggcggtggacggcgactcgggccagaacgcctggctgtcgtaccagctgctcaaggccacggagcccgggctattcggcgtgtgggcgcacaatggcgaggtgcgcaccgccaggctgctgagcgagcgcgacgcggccaagcacaggctggtggtgctggtcaaggacaatggcgagcctccgcgctcggccaccgccacgctgcaagtgctcctggtggacggcttctcccagccctacctgccgctccctgaggcggcaccggcccaggcccaggccgactcgctcaccgtctacttggtggtggcgttggcctcggtgtcttcgctcttcctcttctcggtgctcctgttcgtggcggtgcggctgtgcaggaggagcagggcggcctcggtgggaagctgctcggtgcctaagggcccctttccagggcatctggtggacgtgagcggcaccgggaccctttcccagagctaccagtacgaggtgtgtctgacgggaggttccgagacaaatgaattcaagttcctaaaaccggttatccctaatatccaggcaaaaggtcttgggaagaatagtgaagaaaactccacctttcgaaatagctttggatttaatttttagtaagaatgctatttacatttgcatgtacttttttagttttatgtaaccatatcaatattatttagtcttaaactagttacgttattatgcaatacgactaattgtatttttaattttttcttttctcccccaattttttttttttttttgagaccgagtctcattctgtcgccctggctggagtgcaatggtgtgatctcagctcactgcaccctccgcctctcgggttcaagcaattctcctgcatcagcctcccgagtagctggcattacaggcgcccaccaccacgctcggctaaattttttttttttttatctttagtagagacggggtttcaccacgttggccgggcaggttttaaactcttgacctcatgttccacccgccacggcctcccaaagtgctgtgattaccggtgtgagccactgcgcccggccttttttttttcttttcttttcttttttttgatacagagtcttagtcacccagactagaggtcagtggcaggatctcagctcactgcaacctctgcctcctgggctcaagagaccagcccacctccgcctccaagtagctgggactacaggcgtgcgccaccatgcccggctacttcttgtattttttgtagagacggatcgtcaccatatttcttaggctggcctttaacttctgagctcaagagatgcactcccctcagcctcccaaagtgctgggattacaggcggccaggcctattttcaattttcaagtattgcatatcattgtgaataacattgtaaatcctttttatattaagtaacaggtagttaatccatttctaatgaataattttaaggttttaatcctttccaagtgtacaataatttactgattattatttcttattctagaaaactgactttgatttttctcttaggttgttttgttttgttttgttttttgagacgatgtttcactcttgtcgcccaggctggtgtgcaatggcgtgatctcggctcactgcagtctctgcctcccgggttctcctgcctcagcctcccgagtagctgggattacaggtgcaccaccacacccagctaattttgcatttttagtagagacggggtttcaccatgttggtcaggctggtctctaactcttgatatcagtgatccgcccgcctcagcctcccaaaaagctgggattacaggcgtgagccaccgtgcccaggctcccctagtatttttcactgtctgcatcctatgatcctaaccacctgtgtattgtagtttcttcatgggagaagtcatatctgcccttccaaccttattctaacattctatttattcatttaaaaagccacatcatctagttctaaatcacagcatttaaagagaaacatttcattattaatgtgctcatggtaaattaaatattattttgtgatcaatattatacttcaatactaactttgtgcttgtattattttcttaaatatactacacttacttggctaatatttttaatgcttttgtgtgtgtatatatatatatagagagagagagagatcatggcttataatccaaacaaaatgtaataaactgcatgaaaataaataggaatattaaaaca

SEQ ID NO: 172139 - DNA, 1973 bp, Homo sapiens
  Payload ID: 13828
  Gene Symbol: PCDHB11
  Gene Name: protocadherin beta 11
  Uniprot ID: Q9Y5F2
  ENST ID: ENST00000624887
  CDS Start-End: 564-1862
gcacacagagaatcagaagacagaaacaacaagccttcaagagggtgacctggaaaccattcaacagggttaaaatccttagaccacagaggatttggtggacaagtcagagacgcgttccgcagagctgaagcctttcttcaagaagcctacaagaaaggaactatggagaaccaagggacacgcactcagcagataaggctttttatgaggtgaagattcgggagaatagcatccttggctcgctgattttgattgtctcagcttgggatttagactctggaacaaatggtgaaatatgctataccttttcccatgcctcagaagatattcgcaagacatttgaaattaatcaaaagtctggagaaattactttaagagcacctctggattttgaaacgattgagtcatactcaataatcattcaagccacagatgggggaggactttttggaaaatctacagtcataattcacgtgatagatgtaaatgacaatgctcctgaaatcactgtgtcatcaattaccagtccaatcccagaaaatacgccagagaccgtggttatggtttttagtatccaagatatagactctggggacaacggaagaattgtttgttccattccggaagacctcccattcgtgctaaaatcttcagttgagaattactacacgttggaaacagagagaccactggacagagagagcacagccgagtacaatatcaccatcaccgtcaccgacttggggatacccaggctgaaaaccgagcacaacacaactgtgttggtctctgacgtcaatgacaacgcccccaccttcacccaaacctcctacaccctgttcgtccgcgagaacaacagccccgccctgcacatcggcagtgtcagcgctacagacagagactcaggcaccaacgcccaggtcaactactcgctactcccgccccaggacctgcacctgcccctcgcctccctggtctccatcaacacagacaacggccacctgttcgccctcaggtcgctggactacgaggccctgcaggctttcgacttccgcgtgggcgccacagaccgcggctccccggctttgagcagcgaggcgctggtgcgcgtgctggtgctggacgccaacgacaactcgcccttcgtgctgtacccgctgcagaacggctccgcgccctgcaccgagctggtgccccgggcggccgagccgggctacctggtgaccaaggtggtggcggtggacggcgactcgggccagaacgcctggctgtcgtaccagctgctcaaggccacggagcccgggctattcggcgtgtgggcgcacaatggcgaggtgcgcaccgccaggctgctgagcgagcgcgacgcggccaagcacaggctggtggtgctggtcaaggacaatggcgagcctccgcgctcggccaccgccacgctgcaagtgctcctggtggacggcttctcccagccctacctgccgctccctgaggcggcaccggcccaggcccaggccgactcgctcaccgtctacttggtggtggcgttggcctcggtgtcttcgctcttcctcttctcggtgctcctgttcgtggcggtgcggctgtgcaggaggagcagggcggcctcggtgggaagctgctcggtgcctaagggcccctttccagggcatctggtggacgtgagcggcaccgggaccctttcccagagctaccagtacgaggtgtgtctgacgggaggttccgagacaaatgaattcaagttcctaaaaccggttatccctaatatccaggcaaaaggtcttgggaagaatagtgaagaaaactccacctttcgaaatagctttggatttaatttttagtaagaatgctatttacatttgcatgtacttttttagttttatgtaaccatatcaatattatttagtcttaaactagttacgttattatgcaatacgactaattgtattttt

SEQ ID NO: 172140 - DNA, 3853 bp, Homo sapiens
  Payload ID: 13829
  Gene Symbol: PCDHB12
  Gene Name: protocadherin beta 12
  Uniprot ID: Q9Y5F1
  ENST ID: ENST00000239450
  CDS Start-End: 190-2577
agtacacgcggagaactgggaagacagaaagaacaatcctttaagggagaacctagaagccattcaacaaggttaaaatcttcaggcttccgaggatttggtagacagatcagaggcacgtttcccacaactgcgaagaggcgctgaggcaattctgcaagaagattttggggttttggaaaagaagctatggaaaacggaggggcaggcactctgcagataaggcaagtcctgcttttctttgttttgctgggaatgtctcaggcgggctctgaaactgggaactttttggtgatggaggaattgcagagcgggagctttgtaggaaatttggcaaagaccctgggactcgaggtgagtgagctgtcttcgcggggggctcgggtggtttctaatgataacaaagagtgtttgcagctggacacaaacactggggatttgctcctgagagaaatgctagacagggaggagctctgtggctccaatgagccttgtgtgctgtatttccaagtgttaatgaaaaaccccacgcagtttttacaaattgagctccaggtcagggatataaatgatcactctcccgtcttcttggaaaaagaaatgctcttagaaatcccagagaacagtcctgttggtgctgtgttcttgcttgaaagtgcaaaggatttagatgtaggaatcaatgctgtaaaaagctacacaataaatccgaactctcatttccacgttaaaataagagtcaatccagacaataggaaataccctgagttagttctggacaaggcgctggattatgaagagcgcccggagctcagtttcatcctcactgctctggatggcgggtcccctcccaggtctggaactgccttggtcagggtggtggttgtagatattaatgacaactcccctgagtttgagcaggctttttatgaggtgaagattctggagaatagcatccttggctccctggttgtgaccgtctcagcctgggatttagactctggaacaaacagtgaactatcctataccttttcccatgcctcagaagatattcgcaagacatttgaaattaatcaaaagtctggtgacattactttaacagcacctttggattttgaagcaattgagtcatactcaataatcattcaagccacagatgggggaggactttttggaaaatctacagtcagaattcaggtgatggatgtaaacgacaacgctcctgaaatcactgtgtcatcaattaccagtccaatcccagaaaacactccagagactgtggttatggttttcaggatacgagacagagactctggggacaacggaaagatggtttgttctatcccggaggacatcccattcgtgctaaaatcttcggtaaataattactacactttggaaacagagagaccgctggacagagagagcagagccgagtacaacatcaccatcaccgtcaccgacttggggacccccaggctaaaaaccgagcacaacataaccgtgctggtctccgacgtcaatgacaacgcccccgccttcacccaaacttcctacgccctgttcgtccgcgagaacaacagccccgccctgcacatcggcagcatcagcgccacagacagagactcgggcaccaacgcccaggtcaactactcgctgctgccgtcccaggacccgcacctgcccctcgcctccctggtctccatcaacgcggacaacggccacctgtttgccctcaggtcgctggactacgaggccctgcaggggttccagttccgcgtgggcgccacagaccacggctccccggctttgagcagcgaggcgctggtgcgcgtgctggtgctggacgccaacgacaactcgcccttcgtgctgtacccgctgcagaacggctccgcgccctgcaccgagctggtgccctgggcggccgagccgggctacctggtgaccaaggtggtggcggtggacggtgactcgggccagaacgcctggctgtcgtaccagctgctcaaggccacggagcccgggctattcggcgtgtgggcgcacaatggcgaggtgcgcaccgccaggctgctgagcgagcgcgacgcggccaagcacaggctggtggtgctggtcaaggacaatggcgagcctccgcgctcggccaccgccacgctgcacgtgctcctggtggacggcttctcccagccctacctgcctctcccggaggcggccccggcccaggcccaggccgactcgctcactgtctacctggtggtggcgttggcctcagtgtcgtcgctcttcctcttctcggtgctcctgttcgtggcggtgcggctgtgcaggaggagcagggcggccccggtcggtcgctgctcggtgcctgagggcccctttccaggacatctggtggacgtgagtggcaccgggaccctgtcccagagctaccactatgaggtgtgtgtgactggaggctccaggtcaaataagttcaaatttctgaaaccaattatccccaacttcctaccccagagcacaggtagtgaagtcgaagaaaatcccccatttcagaataatttgggtttctgataaagaatgaaaaataaaacctgtgtttatgaatacatttataattaggaacttatcgtgaggtgcctgtaaagtagtatttttgatcacttcaaatacatactcttcaagtcaagaaataaatttctttacatagaaaaggatacagatttagtaccaagaacacttcacaaagcaggaaatgtgcatgtgtaatggtttatgtcaaacaattatgcttaatataaagtctattaagtggtaagtcttgtttgagatattttaaattgctttccattgttttcaatatttactgtgacttttgttttctgagttgattagaatgctgttcgagtatacctaccctagtttcagaagcatagattgtagtgtacctttttaaactttatttttttaaaaaaagttgttttatgaatcatacactattttcacacttttaatctcagaagaaacatatgtgacatggtattttagtaatgaccaaatagacggtcttagagattcagtaagttcactaaggtccactaactaataagtgacaaaactgagcatccatcctagatctgcctgactctaagtcagtgactttgctcccattccatactgtttttgtcattggatatcacctggcaagtttctgcctaactaaagagaagaaaagtttttatcgtattcatactactgttcaatctttatttagaaataaactttatctatgatttcattttcttataaaccagtaatcttgcttttctgggtaaattttcagctattattactaatgctctgatctgcccaaatcttaagtaaaaaacaaaattgaaagagcaacctatgccttctcattgtctcctgaacatataactatcatttcacagaaaagattaatggtcctgattaggaatagtacataattttgatggcattattagttaattattttctttacattgtagtatatttccagagtcacccatgcttacatttgtaatatattttcctgatttgagagtttgtttttagcagtttttcttacctatactgcactgctgaatcaggaaaatttaagaaaaagaatagatttaaatgtgtaatatcaaagagaaatatagatgatcattaaatttttagaaattttggggagttaaggagaagcattgtttgttaaaaatatataaccgattcttatatttaaaataggtaatttttgcatagttgtgttctaaatatattataaactagtgccagtaactctaataaagctagtattactgca

SEQ ID NO: 172141 - DNA, 1963 bp, Homo sapiens
  Payload ID: 13829
  Gene Symbol: PCDHB12
  Gene Name: protocadherin beta 12
  Uniprot ID: Q9Y5F1
  ENST ID: ENST00000624949
  CDS Start-End: 345-1721
gatgttgtagaccctgttatccagtacacgcggagaactgggaagacagaaagaacaatcctttaagggagaacctagaagccattcaacaaggttaaaatcttcaggcttccgaggatttggtagacagatcagaggcacgtttcccacaactgcgaagaggcgctgaggcaattctgcaagaagattttggggttttggaaaagaagctatggaaaacggaggggcaggcactctgcagataagcacctttggattttgaagcaattgagtcatactcaataatcattcaagccacagatgggggaggactttttggaaaatctacagtcagaattcaggtgatggatgtaaacgacaacgctcctgaaatcactgtgtcatcaattaccagtccaatcccagaaaacactccagagactgtggttatggttttcaggatacgagacagagactctggggacaacggaaagatggtttgttctatcccggaggacatcccattcgtgctaaaatcttcggtaaataattactacactttggaaacagagagaccgctggacagagagagcagagccgagtacaacatcaccatcaccgtcaccgacttggggacccccaggctaaaaaccgagcacaacataaccgtgctggtctccgacgtcaatgacaacgcccccgccttcacccaaacttcctacgccctgttcgtccgcgagaacaacagccccgccctgcacatcggcagcatcagcgccacagacagagactcgggcaccaacgcccaggtcaactactcgctgctgccgtcccaggacccgcacctgcccctcgcctccctggtctccatcaacgcggacaacggccacctgtttgccctcaggtcgctggactacgaggccctgcaggggttccagttccgcgtgggcgccacagaccacggctccccggctttgagcagcgaggcgctggtgcgcgtgctggtgctggacgccaacgacaactcgcccttcgtgctgtacccgctgcagaacggctccgcgccctgcaccgagctggtgccctgggcggccgagccgggctacctggtgaccaaggtggtggcggtggacggtgactcgggccagaacgcctggctgtcgtaccagctgctcaaggccacggagcccgggctattcggcgtgtgggcgcacaatggcgaggtgcgcaccgccaggctgctgagcgagcgcgacgcggccaagcacaggctggtggtgctggtcaaggacaatggcgagcctccgcgctcggccaccgccacgctgcacgtgctcctggtggacggcttctcccagccctacctgcctctcccggaggcggccccggcccaggcccaggccgactcgctcactgtctacctggtggtggcgttggcctcagtgtcgtcgctcttcctcttctcggtgctcctgttcgtggcggtgcggctgtgcaggaggagcagggcggccccggtcggtcgctgctcggtgcctgagggcccctttccaggacatctggtggacgtgagtggcaccgggaccctgtcccagagctaccactatgaggtgtgtgtgactggaggctccaggtcaaataagttcaaatttctgaaaccaattatccccaacttcctaccccagagcacaggtagtgaagtcgaagaaaatcccccatttcagaataatttgggtttctgataaagaatgaaaaataaaacctgtgtttatgaatacatttataattaggaacttatcgtgaggtgcctgtaaagtagtatttttgatcacttcaaatacatactcttcaagtcaagaaataaatttctttacatagaaaaggatacagatttagtaccaagaacacttcacaaagcaggaaatgtgcatgtgtaatggtttatgtcaaacaattatgcttaatataaagtctattaagtggt

SEQ ID NO: 172142 - DNA, 2093 bp, Homo sapiens
  Payload ID: 13829
  Gene Symbol: PCDHB12
  Gene Name: protocadherin beta 12
  ENST ID: ENST00000622978
  CDS Start-End: 190-393
agtacacgcggagaactgggaagacagaaagaacaatcctttaagggagaacctagaagccattcaacaaggttaaaatcttcaggcttccgaggatttggtagacagatcagaggcacgtttcccacaactgcgaagaggcgctgaggcaattctgcaagaagattttggggttttggaaaagaagctatggaaaacggaggggcaggcactctgcagataaggcaagtcctgcttttctttgttttgctgggaatgtctcaggcgggctctgaaactgggaactttttggtgatggaggaattgcagagcgggagctttgtaggaaatttggcaaagaccctgggactcgagcacctttggattttgaagcaattgagtcatactcaataatcattcaagccacagatgggggaggactttttggaaaatctacagtcagaattcaggtgatggatgtaaacgacaacgctcctgaaatcactgtgtcatcaattaccagtccaatcccagaaaacactccagagactgtggttatggttttcaggatacgagacagagactctggggacaacggaaagatggtttgttctatcccggaggacatcccattcgtgctaaaatcttcggtaaataattactacactttggaaacagagagaccgctggacagagagagcagagccgagtacaacatcaccatcaccgtcaccgacttggggacccccaggctaaaaaccgagcacaacataaccgtgctggtctccgacgtcaatgacaacgcccccgccttcacccaaacttcctacgccctgttcgtccgcgagaacaacagccccgccctgcacatcggcagcatcagcgccacagacagagactcgggcaccaacgcccaggtcaactactcgctgctgccgtcccaggacccgcacctgcccctcgcctccctggtctccatcaacgcggacaacggccacctgtttgccctcaggtcgctggactacgaggccctgcaggggttccagttccgcgtgggcgccacagaccacggctccccggctttgagcagcgaggcgctggtgcgcgtgctggtgctggacgccaacgacaactcgcccttcgtgctgtacccgctgcagaacggctccgcgccctgcaccgagctggtgccctgggcggccgagccgggctacctggtgaccaaggtggtggcggtggacggtgactcgggccagaacgcctggctgtcgtaccagctgctcaaggccacggagcccgggctattcggcgtgtgggcgcacaatggcgaggtgcgcaccgccaggctgctgagcgagcgcgacgcggccaagcacaggctggtggtgctggtcaaggacaatggcgagcctccgcgctcggccaccgccacgctgcacgtgctcctggtggacggcttctcccagccctacctgcctctcccggaggcggccccggcccaggcccaggccgactcgctcactgtctacctggtggtggcgttggcctcagtgtcgtcgctcttcctcttctcggtgctcctgttcgtggcggtgcggctgtgcaggaggagcagggcggccccggtcggtcgctgctcggtgcctgagggcccctttccaggacatctggtggacgtgagtggcaccgggaccctgtcccagagctaccactatgaggtgtgtgtgactggaggctccaggtcaaataagttcaaatttctgaaaccaattatccccaacttcctaccccagagcacaggtagtgaagtcgaagaaaatcccccatttcagaataatttgggtttctgataaagaatgaaaaataaaacctgtgtttatgaatacatttataattaggaacttatcgtgaggtgcctgtaaagtagtatttttgatcacttcaaatacatactcttcaagtcaagaaataaatttctttacatagaaaaggatacagatttagtaccaagaacacttcacaaagcaggaaatgtgcatgtgtaatggtttatgtcaaacaattatgcttaatataaagtctattaagtggtaagtcttgtttgagatatttta

SEQ ID NO: 172143 - DNA, 5061 bp, Homo sapiens
  Payload ID: 13830
  Gene Symbol: PCDHB13
  Gene Name: protocadherin beta 13
  Uniprot ID: Q9Y5F0
  ENST ID: ENST00000341948
  CDS Start-End: 206-2602
gcagctccattaaccggcaaaaagcagcagaacctggaagtccacggggagcttggatgccaaagggaggacggctgggtcctctggagaggactactcactggcatatttctgaggtatctgtagaataaccacagcctcagatactggggactttacagtcccacagaaccgtcctcccaggaagctgaatccagcaagaacaatggaggccagcgggaagctcatttgcagacaaaggcaagtccttttttcctttctccttttgggcttatctctggcgggcgcggcggaacctagaagctattctgtggtggaggaaactgagggcagctcctttgtcaccaatttagcaaaggacctgggtctggagcagagggaattctccaggcggggggttagggttgtttccagagggaacaaactacatttgcagctcaatcaggagaccgcggatttgttgctaaatgagaaattggaccgtgaggatctgtgcggtcacacagagccctgtgtgctacgtttccaagtgttgctagagagtcccttcgagttttttcaagctgagctgcaagtaatagacataaacgaccactctccagtatttctggacaaacaaatgttggtgaaagtatcagagagcagtcctcctgggactacgtttcctctgaagaatgccgaagacttagatgtaggccaaaacaatattgagaactatataatcagccccaactcctattttcgggtcctcacccgcaaacgcagtgatggcaggaaatacccagagctggtgctggacaaagcgctggaccgagaggaagaagctgagctcaggttaacactcacagcactggatggtggctctccgcccagatctggcactgctcaggtctacatcgaagtcctggatgtcaacgataatgcccctgaatttgagcagcctttctatagagtgcagatctctgaggacagtccggtaggcttcctggttgtgaaggtctctgccacggatgtagacacaggagtcaacggagagatttcctattcacttttccaagcttcagaagagattggcaaaacctttaagatcaatcccttgacaggagaaattgaactaaaaaaacaactcgatttcgaaaaacttcagtcctatgaagtcaatattgaggcaagagatgctggaaccttttctggaaaatgcaccgttctgattcaagtgatagatgtgaacgaccatgccccagaagttaccatgtctgcatttaccagcccaatacctgagaacgcgcctgaaactgtggttgcacttttcagtgtttcagatcttgattcaggagaaaatgggaaaattagttgctccattcaggaggatctacccttcctcctgaaatccgcggaaaacttttacaccctactaacggagagaccactagacagagaaagcagagcggaatacaacatcactatcactgtcactgacttggggacccctatgctgataacacagctcaatatgaccgtgctgatcgccgatgtcaatgacaacgctcccgccttcacccaaacctcctacaccctgttcgtccgcgagaacaacagccccgccctgcacatccgcagcgtcagcgctacagacagagactcaggcaccaacgcccaggtcacctactcgctgctgccgccccaggacccgcacctgcccctcacatccctggtctccatcaacgcggacaacggccacctgttcgccctcaggtctctggactacgaggccctgcaggggttccagttccgcgtgggcgcttcagaccacggctccccggcgctgagcagcgaggcgctggtgcgcgtggtggtgctggacgccaacgacaactcgcccttcgtgctgtacccgctgcagaacggctccgcgccctgcaccgagctggtgccccgggcggccgagccgggctacctggtgaccaaggtggtggcggtggacggcgactcgggccagaacgcctggctgtcgtaccagctgctcaaggccacggagctcggtctgttcggcgtgtgggcgcacaatggcgaggtgcgcaccgccaggctgctgagcgagcgcgacgcggccaagcacaggctggtggtgctggtcaaggacaatggcgagcctccgcgctcggccaccgccacgctgcacgtgctcctggtggacggcttctcccagccctacctgcctctcccggaggcggccccgacccaggcccaggccgacttgctcaccgtctacctggtggtggcgttggcctcggtgtcttcgctcttcctcttttcggtgctcctgttcgtggcggtgcggctgtgtaggaggagcagggcggcctcggtgggtcgctgcttggtgcccgagggcccccttccagggcatcttgtggacatgagcggcaccaggaccctatcccagagctaccagtatgaggtgtgtctggcaggaggctcagggaccaatgagttcaagttcctgaagccgattatccccaacttccctccccagtgccctgggaaagaaatacaaggaaattctaccttccccaataactttgggttcaatattcagtgaccatagttgacttttacattccataggtattttattttgtggcatttccatgccaatgtttatttcccccaatttgtgtgtatgtaatattgtacggatttactcttgatttttctcatgttctttctccctttgttttaaagtgaacatttacctttattcctggttcttaaaaggtgacaattcattctttaacccagatggtcttaatttgtaattaatttgcctccctaaagagcaataccaaatcacatttttttcatgcccctatctttagctgaacttcacccactattatgcttatggtaaaattaaatagagcaatttggaagtgattccaattttccagcatttcttcatttgattctctttttttagtcttaaaataatgactcctattcagacatatcatttttcttttttgtaaatccagtgcgtttttagttaacctttaaatatgctttttgctttcaaaaataaaccagaaaacctatatcctatgatacaactctaagtgttatcacttgattcgaaagggtcagaagaccagttttttagtatcctttcctcattcatcctggagaggattgtgcaggcacattaatattgtgaccaatcacagaatctgggaatatgaagctataattttttaattaatgtcacaaagctctagtgcaatctagttgaatgcagatgcctgtgcccaaataataattcatatagcataaattggagttgtgtgttaatgtgtaaaaatttttgcctgtactatcatataatttaatgtatatacaccagaaactatttttcaaactttttttactgcaaccaatagttaagattatattttacatattttgaaacacacaagcttaatagaaataaatgcttgtgaacaatgcttagtctttttatgacataatttgaaattacctatatatttcattctattcaattttcaaatgtggtcatgatccactaaatttatttcatggtatactagtgggtagtaacccaaagtttgaaaaccacttttctcagacatataaaagcataccagatgttgaacattgatagtatcaaaagatagtcccttagggttctaattttaaaaaaattttcaaagcattgtaggggagtagctttgtctcatgttaaatcactcttacctttaaggatctgacacactatgtaagaaaaagacttcaaggttggaggaggagattttccatgacttttatcaaagtctacagtctatgttgtgggagaaaaatgtagaataacaaaatgagtaaaagtatagaggcaaaacaagcatgtgtatgagagagagagagaaagcatggaaaagaggaaattcatggggatgagcaaaatgactacttccagtgccacagactagactcagttgcttctcttatgttattttttgagacaaggtcctgttctgtcacccaggctggagtgcagtggtgtgatctccactcactgtgatctccactcactgcaacctccacctcctgggctcaagtgatcctcccacctcagcctccctagtacccaggactacaggcccaggccaccacacccactaatttttgcatatttagtagagacgaggtttcatcatattgcccagactggtctcgaattcctgagctcaagcagtctgcctgcctcagcctcccaaagtgctatgattacaggtatgagcacctggcctcaactacttcttgaagatattttaaaactttatcttaacattgtagagggactgggtattagtcagttgataatgccaagaagtgcaatctcttttaatagcatatctaagacaacctaatgtttatacttctgactcagatttcactactggttctgttgagctttgtcaactgagtaattattcttttcttttttctttctttgtttatgttttagagacagggtcttagtcacctaggctggagtgcagtggtgcaatcatagctcactgaagccttgacctcctgggctcaagcaatcctcctgacgcagcatcccaagtagccgggaccacaggcacatgccaccccccacagctatttttgtttgtttgtttgttttttgttttgttttgtttttgaggcagagtctcactctgtcacccaggctggagtgcagtggcgcgatctcggctcactgcaagctccgcctcctgggttcccgccattctcctgcctcagtctcccgagtagcacccccagctattttaaaaaaaatttttgtagagatgggttctcatcatgtcgcccaggctgttgaacttctggcctccaaaggtgggagttattctagcagcttccctgtgatcttctcatatctactggtggagtgggaaagagtagttcaaacaactcagacagaaaatctcgctggtgcaacagtggagagaagggccaagtacttgtcctgttact

SEQ ID NO: 172144 - DNA, 4828 bp, Homo sapiens
  Payload ID: 13831
  Gene Symbol: PCDHB14
  Gene Name: protocadherin beta 14
  Uniprot ID: Q9Y5E9
  ENST ID: ENST00000239449
  CDS Start-End: 575-2971
cagatcctttagtgccgagcattcaaaacagtgataatgcagtgtatggacttttctggattcaaattcaaacaaaccaacagcaaaggacattttggagagaactggggaaaaccaaatgcagtataaattacaccaaggaattattgctcaagttgttgattgtgaacgttttattacaattatcttttagaaggccttacctattaaaaatacttagtgaagtatttaaaggaaaaaaaatgatgtctgggatttgtttcgaatgttccggatgtatttatgaattactttttcaaagaggaaaacttttttaatgaaaaaaaaaacatggagacacatggtggcgctacaggataagacgaaaacagtacataggctggcacggtgagcttcgctattcaggagaacagaaagcatccaacccactgaaaagacaggcattaaaggagcttcgcctacagagctgctggaggatacactctccagggggttcctgttaaaaaccagagcttcagcttccaaaattacggctgagcttcagtttttccacaagagattgcctaaaggaaccatggagatcagaggggcactcgatctgcgaaaaaggcaagttctaatattccttgttttgctgggattgtctcgggcaggtactgaatctgcacactattctgtggcagaggaaacagaaattggctcttttgtggctaatctagcgagggacctagggctgggggtggaggagctgtcttcacgtgaagcccgggtagtgtctgatgataataaaaagtatttgcaccttgatttgctgactgggaatttgctcctaaatgagaaactagaccgagacgagctgtgtggctccaccgagccctgtgtgctgcattttcaggtggttttggaaaaccctttacagttttttcggtttgagctgtgtgtcaaagacataaatgatcactcccctacatttctagacaaggaaatacttattaaaatatcagaaggtaccactgttggagctacctttctaatggagagtgctcaagatttggatgtcggaagcaacagtctccaaaactacacaattagccccaattctcacttctacattaaaattcccgacagtagtgacagaaagatatacccagagctggtcctagatagagctttagattatgaacaggaagctgaactcagattaacactcacagcagtggatggtggatccccgcccaagtctgggacaactttggttctcatcaaggtgttggacatcaatgataatgcccctgagtttcctcagagtctctatgaggtgcaagtccccgaggacagaccccttggctcctggattgccaccatctcagctaaggatctggatgcaggaaactatggaaaaatatcttacacatttttccatgcatcagaagatattcgtaaaacatttgaaattaatccaatatctggggaagttaatttgagatcacccctggattttgaagtaatacagtcctacactataaatattcaggcaacagatggtgggggtctttcaggaaaatgcacccttctagttaaagttatggatataaacgacaacccaccagaagtgaccatatcgtcgattacaaagagaattccagagaatgcctcagagaccctagtagctctttttagtatcctagaccaagactctggagacaatgggaggatgatttgctctattcaagataacctcccttttttcctgaaaccgaccttcaagaactttttcactctagtttctgaaaaagcactggacagagagagccaagccgagtacaacatcacgatcaccgtcacagacttggggacacccaggctgaaaaccgagtacaacataaccgtgctgctctctgacgtcaatgacaacgcccccaccttcacccaaacctcctacaccctgttcgtccgcgagaacaacagccccgccctgcacatcggcagcgtcagcgccacagacagagactcaggcaccaacgcccaggtcaactactcgctgctgccgccccaggaccggcacctgcccctcgcctccttggtctccatcaacgcggacaatggccacctgtttgccctcaggtcgctggactacgaggccctacaggagttcgagtttcgcgtgggcgccacagaccgcgggtccccggcgttgagcagcgaggcgctggtgcgcgtgctggtgctggacgccaacgacaactcgcccttcgtgctgtacccgctgcagaacggctccgcgccctgcaccgagctggtgccccgggcggccgagccgggctacctggtgaccaaggtggtggcggtggacggcgactcgggccagaacgcctggctgtcgtaccagctgctcaaggccacggagcccgggctgttcggcgtgtgggcgcacaatggcgaggtgcgcaccgccaggctgctgagcgagcgcgacgcggccaagcacaggctggtggtgctggtcaaggacaatggcgagcctcctcgctcggccaccgccacgctgcacgtgctcctggtggacggcttctcccagccctacctgccgctccctgaggcggccccggcccaggcccaggccgactccctcaccgtctacctggtggtggcattggcctcggtgtcgtcgctcttcctcttctcggtgctcctgttcgtggcggtgcggctgtgcaggaggagcagggcggcctcggtgggtcgctgctcggtgcccgagggtccctttccagggcatctggtggacgtgagcggcaccgggaccctgtcccagagctaccaatacgaggtgtgtctgacaggaggttccgggacaaatgagttcaaatttctgaagccgattatccccaattttcaagttcatgacactggtaggaatatgggggaaatcgagaactttcgaaatagctttggacttaacattcaataaaacaatttattttaaatgtctaatttttggttattcttggcaagctgatggtactttttgcataatcttttgtggattcttggttgtactgtagttgcatgcatgattatagctcttgtttttctcacagtttctttaaaaatctttattagtggctataatgacgtggaaatgtaatctgtgttttctggtttttcatttatttggccaaaatgttatattaatggagttattgctatttttgctgtgataatggtattatgcaagaccatattctcaattatttggatatgcaaactaaagtattaagagctaatgtcattatatatgtaacttaaatctagacaccatcaaagcataaaataaaaataaaaagcgttgctgaatctgggtcgaaaatgtagtgcgtttatcccactattctctctgaaaatgttctttagaaagggtaacaaagatgctatccctccattttcagttctggagaaccttattagtttttcaaatatttactttatgatgaaacttaagtggtcacattggaaattattaatttcttaagtaattttttctgtaactgcttttgttgataatcctgttgtggaggaagagtcttataatgctctgggctttgctgtcactctttggttttcttaatttaattctatttatttatgttttttgagacagggtctcattccattgacctggctggaatgcagtggcaccatcatggctcactgccgccttgacttcctgggttcaggtgattctcctgcctcagcctcctgagtagctggatcaccagcacaggccactacggcctggctaattcttttgtattttttttgtacagatggaatcttgccatgtttcccagtctggtctggaactccttggctcaagcgatctgcccgccttagctagttttttgtttttgttttttgagacaaagtctcactttgttgtccaggctagagagtagtggcaggatcttggctcactgcagcctcgacatcctgggctcaggcaatcctcctgcttcggcctattaaatagctcaaactacaggcacccgccacgatgcctagctaaatttttgtatatgtggtagagatggagttttgccatgtggcccaggctagtctcgaactcctgaactcaagtgatccacctgctttggcctcccaacgtgctaggattacaggcatgagccattacgtctggcctagttttctttaaatacaccgtgtttactagcttaaattttgtgttgtttattactaaagcagaaaataatttagggtcttatcctgggtaaaatagccttccatcagatgagtacaaagcaagaacttcataagaaattgaaatgaagattcaaactgttaaagaaatgatttagtttcactttcctattaattattgagtaaatataaaacatcattaacactttgtggcctctctcagatgcctacaaagaaggaatgggtaggcatttatggtttatagttgcctcatcatgtaacatattatatctcagctctaaaagaaagttctatagaagattatagatagagattttgataactggaatgtagtatggatatagggctggtgtacatatacattttgaaattgctcttacaagattaaatactattatagaccagatgatgtagtaaaatggaatttcacttgccattgtgaaataggtgaaacaaattccagtttccttagatttcttccctctactttatgcaattatcactgattttatttttcgttgtaacaagtagttatttgttgtgtggatttcttaaaattgacatttaaacaataaaatcctgaaaagaa

SEQ ID NO: 172145 - DNA, 2367 bp, Homo sapiens
  Payload ID: 13831
  Gene Symbol: PCDHB14
  Gene Name: protocadherin beta 14
  Uniprot ID: Q9Y5E9
  ENST ID: ENST00000624896
  CDS Start-End: 239-2176
actgaaaagacaggcattaaaggagcttcgcctacagagctgctggaggatacactctccagggggttcctgttaaaaaccagagcttcagcttccaaaattacggctgagcttcagtttttccacaagagattgcctaaaggaaccatggagatcagaggggcactcgatctgcgaaaaagacaaggaaatacttattaaaatatcagaaggtaccactgttggagctacctttctaatggagagtgctcaagatttggatgtcggaagcaacagtctccaaaactacacaattagccccaattctcacttctacattaaaattcccgacagtagtgacagaaagatatacccagagctggtcctagatagagctttagattatgaacaggaagctgaactcagattaacactcacagcagtggatggtggatccccgcccaagtctgggacaactttggttctcatcaaggtgttggacatcaatgataatgcccctgagtttcctcagagtctctatgaggtgcaagtccccgaggacagaccccttggctcctggattgccaccatctcagctaaggatctggatgcaggaaactatggaaaaatatcttacacatttttccatgcatcagaagatattcgtaaaacatttgaaattaatccaatatctggggaagttaatttgagatcacccctggattttgaagtaatacagtcctacactataaatattcaggcaacagatggtgggggtctttcaggaaaatgcacccttctagttaaagttatggatataaacgacaacccaccagaagtgaccatatcgtcgattacaaagagaattccagagaatgcctcagagaccctagtagctctttttagtatcctagaccaagactctggagacaatgggaggatgatttgctctattcaagataacctcccttttttcctgaaaccgaccttcaagaactttttcactctagtttctgaaaaagcactggacagagagagccaagccgagtacaacatcacgatcaccgtcacagacttggggacacccaggctgaaaaccgagtacaacataaccgtgctgctctctgacgtcaatgacaacgcccccaccttcacccaaacctcctacaccctgttcgtccgcgagaacaacagccccgccctgcacatcggcagcgtcagcgccacagacagagactcaggcaccaacgcccaggtcaactactcgctgctgccgccccaggaccggcacctgcccctcgcctccttggtctccatcaacgcggacaatggccacctgtttgccctcaggtcgctggactacgaggccctacaggagttcgagtttcgcgtgggcgccacagaccgcgggtccccggcgttgagcagcgaggcgctggtgcgcgtgctggtgctggacgccaacgacaactcgcccttcgtgctgtacccgctgcagaacggctccgcgccctgcaccgagctggtgccccgggcggccgagccgggctacctggtgaccaaggtggtggcggtggacggcgactcgggccagaacgcctggctgtcgtaccagctgctcaaggccacggagcccgggctgttcggcgtgtgggcgcacaatggcgaggtgcgcaccgccaggctgctgagcgagcgcgacgcggccaagcacaggctggtggtgctggtcaaggacaatggcgagcctcctcgctcggccaccgccacgctgcacgtgctcctggtggacggcttctcccagccctacctgccgctccctgaggcggccccggcccaggcccaggccgactccctcaccgtctacctggtggtggcattggcctcggtgtcgtcgctcttcctcttctcggtgctcctgttcgtggcggtgcggctgtgcaggaggagcagggcggcctcggtgggtcgctgctcggtgcccgagggtccctttccagggcatctggtggacgtgagcggcaccgggaccctgtcccagagctaccaatacgaggtgtgtctgacaggaggttccgggacaaatgagttcaaatttctgaagccgattatccccaattttcaagttcatgacactggtaggaatatgggggaaatcgagaactttcgaaatagctttggacttaacattcaataaaacaatttattttaaatgtctaatttttggttattcttggcaagctgatggtactttttgcataatcttttgtggattcttggttgtactgtagttgcatgcatgattatagctcttgtttttctcacagtttctttaaaaatctttattagtggctataatgacgtggaaatgtaatctgtgttttctgg

SEQ ID NO: 172146 - DNA, 4017 bp, Homo sapiens
  Payload ID: 13832
  Gene Symbol: PCDHB15
  Gene Name: protocadherin beta 15
  Uniprot ID: Q9Y5E8
  ENST ID: ENST00000231173
  CDS Start-End: 231-2594
aaaaaaaggaaaaggaaaaagcccatgaaatgctactagctacttcagacctctttcagcctaagaggaaagcctgttagcagagcacggaccagtgtctccggagaatgctattctcctacatttccgaacaggttatcaacgcacagatcgatcactgcctctgtcccatcgctccctgaagtagctctgactccggttccttgaaaggggcgtgtacagaagtaaagatggagcctgcaggggagcgctttcccgaacaaaggcaagtcctgattctccttcttttactggaagtgactctggcaggctgggaaccccgtcgctattctgtgatggaggaaacagagagaggttcttttgtagccaacctggccaatgacctagggctgggagtgggggagctagccgagcggggagcccgggtagtttctgaggataacgaacaaggcttgcagcttgatctgcagaccgggcagttgatattaaatgagaagctggaccgggagaagctgtgtggccctactgagccctgtataatgcatttccaagtgttactgaaaaaacctttggaagtatttcgagctgaactactagtgacagacataaacgatcattctcctgagtttcctgaaagagaaatgaccctgaaaatcccagaaactagctcccttgggactgtgtttcctctgaaaaaagctcgggacttggacgtgggcagcaataatgttcaaaactacaatatttctcccaattctcatttccatgtttccactcgcacccgaggggatggcaggaaatacccagagctggtgctggacacagaactggatcgcgaggagcaggccgagctcagattaaccttgacagcggtggacggtggctctccaccccgatctggcaccgtccagatcctcatcttggtcttggacgccaatgacaatgccccggagtttgtgcaggcgctctacgaggtgcaggtcccagagaacagcccagtaggctccctagttgtcaaggtctctgctagggatttagacactgggacaaatggagagatatcatactccctttattacagctctcaggagatagacaaaccttttgagctaagcagcctttcaggagaaattcgactaattaaaaaactagattttgagacaatgtcttcgtatgatctagatatagaggcatctgatggcgggggactttctggaaaatgctctgtctctgttaaggtgctggatgttaacgataacttcccggaactaagtatttcatcacttaccagccctattcccgagaattctccagagacagaagtggccctgtttaggattagagaccgagactctggggaaaatggaaaaatgatttgctcaattcaggatgatgttccttttaagctaaaaccttctgttgagaatttctacaggctggtaacagaaggggcgctggacagagagaccagagccgagtacaacatcaccatcaccatcacagacttggggactccaaggctgaaaaccgagcagagcataaccgtgctggtgtcggacgtcaatgacaacgcccccgccttcacccaaacctcctacaccctgttcgtccgcgagaacaacagccccgccctgcacatcggcagtgtcagcgccacagacagagactcgggcaccaacgcccaggtcacctactcgctgctgccgccccgggacccgcacctgcccctcacctccctggtctccattaacacggacaacggccacctgttcgctctccagtcgctggactacgaggccctgcaggctttcgagttccgcgtgggcgccacagaccgcggcttcccggcgctgagcagcgaggcgctggtgcgagtgctggtgctggacgccaacgacaactcgcccttcgtgctgtacccgctgcagaacggctccgcgccctgcaccgagctggtgccccgggcggccgagccgggctacctggtgaccaaggtggtggcggtggacggcgactcgggccagaacgcctggctgtcgtaccagctgctcaaggccacggagcccgggctgttcggcgtgtgggcgcacaatggcgaggtgcgcaccgccaggctgctgagcgagcgcgacgtggccaagcacaggctagtggtgctggtcaaggacaatggcgagcctccgcgctcggccaccgccacgctgcaagtgctcctggtggacggcttctctcagccctacctgccgctcccagaggcggccccggcccaagcccaggccgactcgcttaccgtctacctggtggtggcattggcctcggtgtcttcgctcttcctcttctcggtgttcctgttcgtggcagtgcggctgtgcaggaggagcagggcggcctcagtgggtcgctgctcggtgcccgagggcccctttccagggcatctggtggacgtgagcggcaccgggaccctttcccagagctaccagtacgaggtgtgtctgacgggaggctctgaaagtaatgatttcaagttcttgaagcctatattcccaaatattgtaagccaggactctaggaggaaatcagaatttctagaataatgtaggtatctgtagctttccgaccgtctgttaattttgtcttcctcacttttcaccttagttttttttaaccctttagtaatcttgaattctacttttttttaaatttctactgttgtctttagtaatgttactcatttcctttgtctgattgttagttttcaaattattgtattattataaatattttatatcaggaaagttcatatttctgaataaattaatagtattcattcctgaagggtgatatgaaagttaaccccacctaataaacataactctaattctgaaattacctttcacactatatgacactacataagaatgtatgatttttgaagtcatattttaagttttttttatagtttttcttattcacacagcttgactttttgacaaaagtttggggtgtaatcatttcatatttatccatgtgtaatttcttccaagcttcatatttggagttttgttttttccaataaggagcaacatggataagtttaagctactcttttcaaggtcacacttgtaagcattagattttcattctaaaacacatatgtcatctcataaaaatatatctgcgtaatgtattctgtctcatgtaaattaacatagaaaagactaatgggttcttccttatctctatctaatgttatgatcctattggggggactggacaggctttctaatacccagatttactgtgtttaaggtgttcgtataaggccaatagacactaggaccaagtaatgcatctcctgcaatttcctcttttcacagcaggaaaatcttaacgagttccaaattctgggcttagaggagcttctgatggtacagtatgccaacatctacttgttttggatggcaacattgttctgattcataaggaatttgaaagaaaatacattgtagaattaatattagttaaccaaacaaaatttattaaaggatatgttggtgaaggagttgaattatttgaggaaaaaacatctgctctcttgtcaggacttttctgtctccaggagcttctcaactttgcagatactctagaatggtattgcatgcaaaataatgaccgccaagatgttcctgccctaatccccagaacctatgaatatgttatattgcaaagaaattaaggttcaaacagaattaaggttgccaatcagctaaacttaaaatagggagactctcctagataatctgggtgggtctatttcaatcagtggaaaggccataaaagcagagttgagtcttccgtgagatgaaaataaattttgtttaaggacagcagcttcagcttatgccccagaattccagcctgcccctcctaactgcctgctgtacagattttggacttgtccagccacgtttcaaaactgagtaagtcacttccttgcaataaattgattactacaca

SEQ ID NO: 172147 - DNA, 572 bp, Homo sapiens
  Payload ID: 13832
  Gene Symbol: PCDHB15
  Gene Name: protocadherin beta 15
  ENST ID: ENST00000623671
  CDS Start-End: 185-572
agacctctttcagcctaagaggaaagcctgttagcagagcacggaccagtgtctccggagaatgctattctcctacatttccgaacaggttatcaacgcacagatcgatcactgcctctgtcccatcgctccctgaagtagctctgactccggttccttgaaaggggcgtgtacagaagtaaagatggagcctgcaggggagcgctttcccgaacaaaggaaatacccagagctggtgctggacacagaactggatcgcgaggagcaggccgagctcagattaaccttgacagcggtggacggtggctctccaccccgatctggcaccgtccagatcctcatcttggtcttggacgccaatgacaatgccccggagtttgtgcaggcgctctacgaggtgcaggtcccagagaacagcccagtaggctccctagttgtcaaggtctctgctagggatttagacactgggacaaatggagagatatcatactccctttattacagctctcaggagatagacaaaccttttgagctaagcagcctttcaggagaaattcgactaattaaaaaac

SEQ ID NO: 172148 - DNA, 5001 bp, Homo sapiens
  Payload ID: 13833
  Gene Symbol: PCDHB16
  Gene Name: protocadherin beta 16
  Uniprot ID: Q9NRJ7
  ENST ID: ENST00000609684
  CDS Start-End: 1162-3492
caaagctctaagtatgctgggacagatactacaaatgaactttatgatgagcgaattaacctgatttatagtcctgtactttctctacgtgccatatccattattaaagaaatgagtctaagtaggaagtagagttaacctatagtttcatttcttgaatttcttattctctttcttcagtctttttcagttaacctacacacacacacacacacacacacacacacacacacacacacatatgtttataagtgggatgggagaacgggtacggtgataattaaaagaggtaaggtttctcttgagatgaaaatgttctaaaattgtgatggcggatgcacacctctgaatatattaaaagccattgaaatgaaaaaagggtggggggaatccaaaagtgtagcagacccaaccttgagatttgcttgtttgggaatgaattttccaataacttgaaagttgtaaaaactcacacttctcagggttaggtgtcagaaagaaaaggaagtaatttattctttaataaagcaattgttaaatactctttagaactaccactgattgcaattttgcagtgtctactcatagtgtctatataggtaccatgaaaaagatgtacttgtgaaactgttctcatgttacttcagaaaaattttgcttctaagtgtgtattctatgtctggttaaatgttcattgaattttatttaatcattaatctcaacagcattaaacagtcaataacataaatgacagtcttctctttgtactcctccctgtacaacatcacagagctccatctgtatacacgaaagtcacatgaaaatagaactcagtgttttgtattacatagtctattcagtacatttagaagtattttgcctccaatattcaaccacagtaaaagactcagtgagaacgcgtggtggcgctgcaggttaagatgacggaaaatacaactgcctacgcagctccaggatccagcaaaccgtttcccaaagcctggaagcagaagaatagctgagccagagcgaacgtgagtgtgaaacctctttaagacaccgttgggctgcttggttctgacattctggactgcaaaacagttctactaggatcctggggatacatgaagcttctgtgaaccaacttttcaagaaaaagcaatggagattggatggatgcacaatcggagacaaaggcaagtccttgttttctttgttttgctgagcttgtctggggcgggcgccgagttggggtcctattccgtagtggaagaaacggagagaggctcttttgtggcaaatctaggaaaagacctggggttggggttgacagagatgtccacccgcaaggccaggatcatttcccaggggaacaaacagcatttgcagctcaaggctcaaactggggatttgctcataaatgagaagctagatcgagaggagctatgcggtcccactgagccttgcatactacatttccaagtgttaatggaaaaccctttagaaatatttcaggctgaactgagggtgatagatataaatgaccattctcccatgttcactgaaaaggaaatgattctaaaaataccggaaaacagtcctctaggaactgagttccctctgaatcatgctttggacttggacgtaggaagcaataatgttcaaaactataaaatcagcccaagctctcatttccgggttctaatccatgaattcagagatggcaggaaataccctgagctagtgttggataaagagctggatcgggaggaggagcctcaactaagattaaccctgacagcgctggatggtggctctccaccgcgatctggaactgctcaggtccgtattgaagtggtggacatcaatgataacgctcctgagtttgagcagcccatctacaaagtgcagattccagagaacagtcctcttggctccctggttgccaccgtctccgccagggatttagacggcggagccaatggaaaaatatcatacacactctttcagccttcggaggatattagtaaaactttggaggtaaatcctatgacaggggaagttcgactgagaaagcaagtagatttcgaaatggttacgtcttatgaagtgcgcatcaaagccacagatgggggaggtctttcaggaaagtgcactcttctcctgcaggtggtggacgtgaatgacaatcccccacaggtgaccatgtctgcactcaccagccccatcccagagaactcgcctgagatagtagttgctgttttcagcgtttcagatcctgactccggaaacaatgggaagacgatttcctccatccaggaagaccttccctttcttctaaaaccttcagtcaagaacttttacaccttggtaacggagagagcactcgacagagaagcaagagctgaatataatatcaccctcaccgtcacagatatggggactccaaggctgaaaacggagcacaacataacagtgcagatatcagatgtcaatgataacgcccccactttcacccaaacctcctacaccctgttcgtccgcgagaacaacagccccgccctgcacatcggcagcgtcagcgccacagacagagactcgggcaccaacgcccaggtcacctactcgctgctgccgccccaagacccgcacctgcccctcgcctccctggtctccatcaacgcggacaacggccacctgttcgccctcaggtcgctggactacgaggccctgcaggctttcgagttccgcgtgggcgccacagaccgcggctcccccgcgctgagcagagaggcgctggtgcgcgtgctggtgctggacgccaacgacaactcgcccttcgtgctgtacccgctgcagaacggctccgcgccctgcactgagctggtgccccgggcggccgagccgggctacctggtgaccaaggtggtggcggtggacggcgactcgggccagaatgcctggctgtcgtaccagctgctcaaggccacggagcccgggctgttcggtgtgtgggcgcacaatggcgaggtgcgcaccgccaggctgctgagcgagcgcgacgcagccaagcagaggctggtggtgctggtcaaggacaatggcgagcctccgcgctcggccaccgccacgctgcacgtgctcctggtggacggcttctcccagcccttcctgccgctcccagaggcggcccccggccagacccaggccaactcgctcactgtctacctggtggtggcgttggcctcggtgtcgtcgctcttcctcttttcggtgctcctgttcgtggcggtgcggctgtgcaggaggagcagggcggcctcggtgggccgctgctcgatgcctgagggcccctttccagggcgtctggtggacgtaagcggcaccgggaccctgtcccagagctaccaatacgaggtgtgtctgacaggaggctcagaaacaagtgagttcaagttcctgaagccgattatccccaacttctctccttagggcactaggaaagaaatagattaaaattccacccttcacaatagctttggatttaattattgataggaacccatttgataaattccttaacttcttatgattgtcttgttgattaaattgttcatgctcaccaccaccaataaggtatttttctctgattgttagttcaaattatattgttaattccagtttcccttttcctcatatttaccccgaagaggtgttgcatatagaatcccaattaacaaaatatactttatcttcaaagttgatgtcatttaaaatttttccgtctttatattttatttacttcctattcattttttgctccatttttcatgttacttctcagtttcctagaacttcaagtattaaaataacctgttgcatgtattaggcatatttcctatgttacatttcttttgtctattttcctttcaaaattggtatttttgttgggctcaattttcattataatacttttcttaaagtttctttctttcttttcttttctttctttttttttttttcctttttgagacagggtcttactcttgtcacccaggctggagtgcagtggtacaatcttggctcactgcaacctctgcctcctgggcccaacggatccttccacctcagcctcccaagtagcttggactataggtgcatgccaccatgcctggctaatcttttgcagcgatgggattttgccaagttgcccaggctgatcttgaactcctgggctcaagccatcctccctcctcagcctcccaaaattctgggattacaggcataagccaatgtgcccatccaaagttttatttatttatttttttgagatggagtctcgtaaagttacctttaaaaaaaaagttctattttccctgtattggtatctccttaaataaaataaaatattcctattgtaagtgatatgagaaatctttaaccagccttatctaaaaataaaaagagaagccattgtaagacattcagtatgtgtaaatgtgtttgtgtttgtagacaaaaggcaaaggtattatgtaaaaatatttaataatttattctttctattactgaattaaaaaatcagaggtccctgttatatttttaatggctaacaactcaatctcattaagttggaaaaaaaacttatcaaagagacatttacatggtttggcttttatattcatcatagtatacattggcggtatctagccctttctctgtaaaatatccctatgtttaatctgtatttcttgcttattatatgtaaagttgagcttctttctagatattaggcctttgaataaaattctatgtgagtcagatttaataatttgttttcactttcaatagtgttaggataggtgttagtttgatctgttctttacctccgcttatttggttcagagaaattagggcctactagatttccactaaaagggacttgaaaataaaggtcagtcccttctttaattctgcaagttactttaaagctaatctaag

SEQ ID NO: 172149 - DNA, 894 bp, Homo sapiens
  Payload ID: 13833
  Gene Symbol: PCDHB16
  Gene Name: protocadherin beta 16
  ENST ID: ENST00000625044
  CDS Start-End: 229-894
aagcagaagaatagctgagccagagcgaacgtgagtgtgaaacctctttaagacaccgttgggctgcttggttctgacattctggactgcaaaacagttctactaggatcctggggatacatgaagcttctgtgaaccaacttttcaagaaaaagcaatggagattggatggatgcacaatcggagacaaaggtggtggacgtgaatgacaatcccccacaggtgaccatgtctgcactcaccagccccatcccagagaactcgcctgagatagtagttgctgttttcagcgtttcagatcctgactccggaaacaatgggaagacgatttcctccatccaggaagaccttccctttcttctaaaaccttcagtcaagaacttttacaccttggtaacggagagagcactcgacagagaagcaagagctgaatataatatcaccctcaccgtcacagatatggggactccaaggctgaaaacggagcacaacataacagtgcagatatcagatgtcaatgataacgcccccactttcacccaaacctcctacaccctgttcgtccgcgagaacaacagccccgccctgcacatcggcagcgtcagcgccacagacagagactcgggcaccaacgcccaggtcacctactcgctgctgccgccccaagacccgcacctgcccctcgcctccctggtctccatcaacgcggacaacggccacctgttcgccctcaggtcgctggactacgaggccctgcaggctttcgagttccgcgtgggcgccacagaccgcggctcccccgcgctgagcagagaggcgctggtgcgcgtgctggtgctggacgccaacgacaactcgcccttcgtgctgtacccgctgcagaacggctccgcg

SEQ ID NO: 172150 - DNA, 4126 bp, Homo sapiens
  Payload ID: 13834
  Gene Symbol: PCDHB2
  Gene Name: protocadherin beta 2
  Uniprot ID: Q9Y5E7
  ENST ID: ENST00000194155
  CDS Start-End: 214-2610
agcagaaacaaagcacccagccgacgctcccttacccagatactcagctaaagaagcagcaagcaggaagaggaggctttctaaggcggtcgctccgggaaatccgggccctaggattgtccactcatcccagtatcagcgagatacggggagatagagttagcgacaacgtgagccagagctggagcacgtttggtgagagaccagaaagcaatggaggccggagaggggaaggagcgcgttccgaaacaaaggcaagtcctgatattctttgttttgctgggcatagctcaggctagttgccagcctaggcactattcagtggccgaggaaacggagagtggctcctttgtggccaatttgttaaaagacctggggctggagataggagaacttgctgtgaggggggccagggtcgtttccaaaggaaaaaaaatgcatttgcagttcgataggcagaccggggatttgttgttaaatgagaaattggaccgggaggagctgtgcggccccacagagccctgtgtcctacctttccaggtgttactagaaaatcccttgcagttttttcaggcggagctacggattagggacgtaaatgatcattccccagttttcctagacaaagaaatacttttgaaaattccagaaagtatcactcctggaactactttcttaatagaacgtgcccaggacttggatgtaggaaccaacagtctccaaaattacacaatcagtcccaatttccactttcatcttaatttacaagacagtctcgatggcataatattaccacagctggtgctgaacagagccctggatcgcgaggagcagcctgagatcaggttaaccctcacagcgctagatggcgggagtccacccaggtccggcacggccctggtacggattgaagttgtggacatcaatgacaacgtcccagagtttgcaaagctgctctatgaggtgcagatcccggaggacagccccgttggatcccaggttgccatcgtctctgccagggatttagacattggaactaatggagaaatatcttatgcattttcccaagcatctgaagacattcgcaaaacgtttcgattaagtgcaaaatcgggagaactgcttttaagacagaaactggatttcgaatccatccagacatacacagtaaatattcaggcgacagatggtgggggcctatctggaacttgtgtggtatttgtccaagtgatggatttgaatgacaatcctccggaactaactatgtcgacacttatcaatcagatcccagaaaacttgcaggacaccctcattgctgtattcagcgtttcagatcctgactccggagacaacggaaggatggtgtgctccatccaagatgatcttccttttttcttgaaaccttctgttgagaacttttacactctggtgataagcacggccctggaccgggagaccagatccgaatacaacatcaccatcaccgtcaccgacttcgggacacccaggctgaaaaccgagcacaacataaccgtgctggtctccgacgtcaatgacaacgcccccgccttcacccaaacctcctacaccctgttcgtccgcgagaacaacagccccgccctgcacatcggcagcgtcagcgccacagacagagactcgggcaccaacgcccaggtcacctactcgctgctgccgccccaggacccgcacctgcccctcgcctccctggtctccatcaacgcggacaacggccacctgttcgctctccagtcgctggactacgaggccctgcaggcgttcgagttccgcgtgggcgccgcagaccgcggctccccggcgttgagcagcgaggcgctggtgcgcgtgctggtgctggacgccaacgacaactcgcccttcgtgctgtacccgctgcagaacggctccgcgccctgcaccgagctggtgccccgggcggccgagccgggctacctggtgaccaaggtggtggcggtggacggcgactcgggccagaacgcctggctgtcgtaccagctgctcaaggccacggagcccgggctgttcggcgtgtgggcgcacaatggcgaggtgcgcaccgccaggctgctgagggagcgcgacgctgccaagcagaggctggtggtgctggtcaaggacaatggcgagcctccgcgctcggccaccgccacgctgcacgtgctcctggtggacggcttctcccagccctacctgctgctcccggaggcggcaccggcccaggcccaggccgacttgctcaccgtctacctggtggtggcgttggcctcggtgtcttcgctcttcctcttctcggtgctcctgttcgtggcggtgcggctgtgcaggaggagcagggcggcctcggtgggtcgctgctcggtgcccgagggcccctttccagggcagatggtggacgtgagcggcaccgggaccctgtcccagagctaccagtacgaggtgtgtctgactggaggctccgggacaaatgagttcaagttcctgaagccaattatccccaacttcgttgctcagggtgcagagagggttagcgaggcaaatcccagtttcaggaagagctttgaattcacttaagtgttaataaggatctactgaggctagtctcgtttaatttgtggaaagtccttttttactgctttgcccattggaggtgtctccttttattagaaagtaaccatcttattccaattctatgcatgttactggtatttataaatgtatgagtttttttgcggtataataaatgtaaattttctttgtattctaattgttggttagtttcattgcaatttaattgcatttaaagtgtaaaagtaaattttgtattttcagaaatctttaagttagagcatcttttccagacctcacagtctatggtcctagataattttgaagtcctacatttgaaaatatttgttatcattacatgagttatattttccagcccagaatatttgtgttttttatatcctcttaggctagtgtaaattctatcctgtgaattcacattggctaaccctttaaataggtatatttatgaataatatagcaagcaccgtccttacgtttttcaatatatgtaatttttttttttttttgagatggagttttgcacttgttgctcaggctgtagtggagtgcaatggcgcaatctcggctcgccgcaacctctgcctcccgggttcaagcgattctcctgcctcagcctcccaagtagctgggattacaggcatgcatcattatgcccggctaattttgtatttttagtagagacagggtgtctccatgttggtcaggttggtcttgaactcctgaccttaggtgatctgcccacctcagcctcccaaagtgctgggattacaggcgtgagccaccgccccccagtccaatatgtatacttctttcaagtgttgacatatgaaaagtattagtctttagagattgtaagaattttaactgttggattctacaaggcactaacatcataagtgctctaataaatttttgtcaaaagtcaatcattaatattcaaaaatgtagataaataatacatgtctagcaattttcaaaggcatgctaattcatcatgctttctctttcaaatagtttttttaagagccctctgcttattccagtccccccctttaaaatcttttaaaattattaataacctattaactttgagcacttcattaaaatccaaaaaatttgagggagtacatgtctttgtcctttacctttagaaccctcaaacatagcttggtattgctgtttttaaaattttctggagcatttaggattcacttagaaacaagcctttagggagaaaaatttatctagcaccactcactctatttttttgcactgactacttctatttttccccctttcatttccctagacttttcaatgcttttttataaaggtgcttgagttctgtttctcaacagctccctcatttattgaatgattcacacagtcactggaatattataggctcttaataaaatttttgaatgattgaaagagagaaaagtattttacctgtgatatattgatatttaaataaactagaacacttaaaggaaaa

SEQ ID NO: 172151 - DNA, 2231 bp, Homo sapiens
  Payload ID: 13834
  Gene Symbol: PCDHB2
  Gene Name: protocadherin beta 2
  ENST ID: ENST00000622947
  CDS Start-End: 186-305
cccttacccagatactcagctaaagaagcagcaagcaggaagaggaggctttctaaggcggtcgctccgggaaatccgggccctaggattgtccactcatcccagtatcagcgagatacggggagatagagttagcgacaacgtgagccagagctggagcacgtttggtgagagaccagaaagcaatggaggccggagaggggaaggagcgcgttccgaaacaaagaacgtgcccaggacttggatgtaggaaccaacagtctccaaaattacacaatcagtcccaatttccactttcatcttaatttacaagacagtctcgatggcataatattaccacagctggtgctgaacagagccctggatcgcgaggagcagcctgagatcaggttaaccctcacagcgctagatggcgggagtccacccaggtccggcacggccctggtacggattgaagttgtggacatcaatgacaacgtcccagagtttgcaaagctgctctatgaggtgcagatcccggaggacagccccgttggatcccaggttgccatcgtctctgccagggatttagacattggaactaatggagaaatatcttatgcattttcccaagcatctgaagacattcgcaaaacgtttcgattaagtgcaaaatcgggagaactgcttttaagacagaaactggatttcgaatccatccagacatacacagtaaatattcaggcgacagatggtgggggcctatctggaacttgtgtggtatttgtccaagtgatggatttgaatgacaatcctccggaactaactatgtcgacacttatcaatcagatcccagaaaacttgcaggacaccctcattgctgtattcagcgtttcagatcctgactccggagacaacggaaggatggtgtgctccatccaagatgatcttccttttttcttgaaaccttctgttgagaacttttacactctggtgataagcacggccctggaccgggagaccagatccgaatacaacatcaccatcaccgtcaccgacttcgggacacccaggctgaaaaccgagcacaacataaccgtgctggtctccgacgtcaatgacaacgcccccgccttcacccaaacctcctacaccctgttcgtccgcgagaacaacagccccgccctgcacatcggcagcgtcagcgccacagacagagactcgggcaccaacgcccaggtcacctactcgctgctgccgccccaggacccgcacctgcccctcgcctccctggtctccatcaacgcggacaacggccacctgttcgctctccagtcgctggactacgaggccctgcaggcgttcgagttccgcgtgggcgccgcagaccgcggctccccggcgttgagcagcgaggcgctggtgcgcgtgctggtgctggacgccaacgacaactcgcccttcgtgctgtacccgctgcagaacggctccgcgccctgcaccgagctggtgccccgggcggccgagccgggctacctggtgaccaaggtggtggcggtggacggcgactcgggccagaacgcctggctgtcgtaccagctgctcaaggccacggagcccgggctgttcggcgtgtgggcgcacaatggcgaggtgcgcaccgccaggctgctgagggagcgcgacgctgccaagcagaggctggtggtgctggtcaaggacaatggcgagcctccgcgctcggccaccgccacgctgcacgtgctcctggtggacggcttctcccagccctacctgctgctcccggaggcggcaccggcccaggcccaggccgacttgctcaccgtctacctggtggtggcgttggcctcggtgtcttcgctcttcctcttctcggtgctcctgttcgtggcggtgcggctgtgcaggaggagcagggcggcctcggtgggtcgctgctcggtgcccgagggcccctttccagggcagatggtggacgtgagcggcaccgggaccctgtcccagagctaccagtacgaggtgtgtctgactggaggctccgggacaaatgagttcaagttcctgaagccaattatccccaacttcgttgctcagggtgcagagagggttagcgaggcaaatcccagtttcaggaagagctttgaattcacttaagtgttaataaggatctactgaggctagtctcgtttaatttgtggaaagtccttttttactgctttgcccattggagg

SEQ ID NO: 172152 - DNA, 565 bp, Homo sapiens
  Payload ID: 13834
  Gene Symbol: PCDHB2
  Gene Name: protocadherin beta 2
  ENST ID: ENST00000624874
  CDS Start-End: 170-322
cagctaaagaagcagcaagcaggaagaggaggctttctaaggcggtcgctccgggaaatccgggccctaggattgtccactcatcccagtatcagcgagatacggggagatagagttagcgacaacgtgagccagagctggagcacgtttggtgagagaccagaaagcaatggaggccggagaggggaaggagcgcgttccgaaacaaagaaagtatcactcctggaactactttcttaatagaacgtgcccaggacttggatgtaggaaccaacagtctccaaaattacacaatcagtcccaatttccactttcatcttaatttacaagacagtctcgatggcataatattaccacagctggtgctgaacagagccctggatcgcgaggagcagcctgagatcaggttaaccctcacagcgctagatggcgggagtccacccaggtccggcacggccctggtacggattgaagttgtggacatcaatgacaacgtcccagagtttgcaaagctgctctatgaggtgcagatcccggaggacagccccgttggatcccaggttgc

SEQ ID NO: 172153 - DNA, 519 bp, Homo sapiens
  Payload ID: 13834
  Gene Symbol: PCDHB2
  Gene Name: protocadherin beta 2
  ENST ID: ENST00000625033
  CDS Start-End: 165-275
aaagaagcagcaagcaggaagaggaggctttctaaggcggtcgctccgggaaatccgggccctaggattgtccactcatcccagtatcagcgagatacggggagatagagttagcgacaacgtgagccagagctggagcacgtttggtgagagaccagaaagcaatggaggccggagaggggaaggagcgcgttccgaaacaaagacagtctcgatggcataatattaccacagctggtgctgaacagagccctggatcgcgaggagcagcctgagatcaggttaaccctcacagcgctagatggcgggagtccacccaggtccggcacggccctggtacggattgaagttgtggacatcaatgacaacgtcccagagtttgcaaagctgctctatgaggtgcagatcccggaggacagccccgttggatcccaggttgccatcgtctctgccagggatttagacattggaactaatggagaaatatcttatgcattttcccaagcatctgaagacatt

SEQ ID NO: 172154 - DNA, 162 bp, Homo sapiens
  Payload ID: 13834
  Gene Symbol: PCDHB2
  Gene Name: protocadherin beta 2
  ENST ID: ENST00000624994
  CDS Start-End: 1-162
caggcccaggccgacttgctcaccgtctacctgatggtggacgtgagcggcaccgggaccctgtcccagagctaccagtacgaggtgtgtctgactggaggctccgggacaaatgagttcaagttcctgaagccaattatccccaacttcgttgctcagggt

SEQ ID NO: 172155 - DNA, 3355 bp, Homo sapiens
  Payload ID: 13835
  Gene Symbol: PCDHB3
  Gene Name: protocadherin beta 3
  Uniprot ID: Q9Y5E6
  ENST ID: ENST00000231130
  CDS Start-End: 178-2568
agtgtggtaaaccagcggttgagagcccaggcagatttttgagccagcaagtctgagcctctggaaaggcttattcactaggccgtctacaaaggttgtggggcaaaagactgtttcccagctctgtctgaggttcagcttggcgacattccctggaagagcgtgacggaaagtgcaatggaggcgggaggagagcgatttcttagacaaaggcaagtcttgcttctctttgtttttctgggagggtctctggctgggtccgagtcaagacgctattctgtggctgaggaaaaagagaagggctttttaatagccaacctagcaaaggatctgggactaagggtagaggaactggccgcgaggggggcccaagttgtgtccaaagggaacaaacagcattttcagctcagtcatcagacaggtgatttgctcctgaatgagaaattggaccgggaggagctatgcggccccacagaaccatgcatactacattttcagatattactgcaaaaccctttgcaattcgttacaaacgagctccgtatcatagatgtaaatgaccattctccggtattctttgaaaatgaaatgcatctgaaaatcctagaaagcactctgccaggaacagtaattcctttgggaaatgctgaggacttggatgtgggaagaaacagcctccaaaactacactatcactccgaattcccacttccacgtactcactcgcagtcgtagggacggaaggaagtacccggaactagtactggataaagcgctcgatccggaggagcagccggaactcagcttaacgctcaccgcgctggacggcggctctccccctcggtctgggacagcccagataaacatccaggtcttagatataaacgacaatgcaccagaatttgcacagccgctctatgaggttgcagttctagagaatacccccgttaactctgtcattgtcactgtctcggcttctgacttagatacaggaagttttgggacaatatcatatgcattttttcatgcttctgaagaaattcgcaaaacttttcagctaaatccaattactggtgatatgcaactggtcaaatatttgaattttgaagcgattaatagttatgaagtcgacatcgaggccaaggatggcggaggcctatccggaaagtctacagtcatagtccaggtggttgatgtcaacgacaacccaccggaactgaccttgtcttcagtaaacagccctattcctgagaactcgggagagactgtactggctgttttcagtgtttctgatctagactctggagacaacggaagagtgatgtgttccattgagaacaatctccccttcttcctgaaaccatctgtagagaatttttacaccctagtgtcagaaggcgcgctggacagagagaccagatccgagtacaacattaccatcactatcactgacctggggacacccaggctgaaaaccaagtacaacataaccgtgctggtctccgacgtcaatgacaacgcccccgccttcacccaaatctcctacaccctgttcgtccgcgagaacaacagccccgccctgcacatcggcagtgtcagcgccacagacagagactcaggcaccaacgcccaggtaacctactcgctgctgccgccccaggacccgcacctgcccctctcttccctggtctccatcaacgcggacaacggccacctgtttgccctcaggtcgctggactacgaggccctgcaggcgttcgagttccgcgtgggcgccacagaccgtggctccccggctttgagcagcgaggcgctggtgcgcgtgctggtgctggacgccaacgacaactcgcccttcgtgctgtacccgctgcagaacggctccgcgccctgcaccgagctggtgccccgggcggctgagccgggctacctggtgaccaaggtggtggcggtggacggcgactcgggccagaacgcctggctgtcgtaccagctgctcaaggccacggagcccgggctgttcggcgtgtgggcgcacaatggcgaagtgcgcaccgccaggctgctgagcgagcgcgacgcggccaagcacaggctggtggtgctggtcaaggacaatggcgagcctccgcgctcggccaccgccacgctgcatgtgctcctggtggacggcttctcccagccctacctgcctctcccggaggcggcaccggcccaggcccaggccgacttgctcaccgtctacctggtggtggcattggcctcggtgtcttcgctcttcctcttttcggtgctcctgttcgtggcggtgcggctgtgcaggaggagcagggcggcctcggtgggtcgctgctcggtgcccgagggcccctttccagggcagatggtggacgtgagcggcaccgggaccctgtcccagagctaccagtacgaggtgtgtctgactggaggctccgggacaaatgagttcaagttcctgaagccaattatccccaacttcgttgctcagggtgcagagagggttagcgaggcaaatcccagtttcaggaagagctttgaattcagttaagtgttaataaggatctactgagcctcgtcttagttaatctgtggaaagtccttttttactgctttgtccattggagaggtcttttttggtctggttcaaggcaagtagcaagaatagagcaaaatatcaaatccagggatggcttaggtttcattaacagtactggaaagtagttgtgtggctctgaatgttttgtatttcaatcgagaatccttagtcgatagaacattttgtttatatattgattctactttttctgtagttaatccttgcatattctcctttcatcctggcttgccaacgcagtcttaattccgccttttttttttctaatggggagcaaaaagaaattcactgtcttttaatagtgatttcaaatagcttattaaaataactccattcaaattttacattataaagcaatgtagagagagttccaaaccaccaattttataatttcccttgttgaatatattcatataatgtgttctataatatgcccaaagcagctttgtctatagttaacaaagttttaaggatagacaagaatgtgttttctttaataaatagtaatatatcatctttttagggatatagtactcaaatgaaagtaatttagttcattttctgtgttgacatttgcaattaatatttcaatattttatgtgcttatattggccaaaatatggacacaaatatagactaatatgggtaattaccctttggtttatctaaagtgtgttcatgatgactgaggaaaaaaattaaacctatgccatttaaaaaa

SEQ ID NO: 172156 - DNA, 162 bp, Homo sapiens; identical to SEQ ID NO: 172154
  Payload ID: 13835
  Gene Symbol: PCDHB3
  Gene Name: protocadherin beta 3
  ENST ID: ENST00000624513
  CDS Start-End: 1-162

SEQ ID NO: 172157 - DNA, 3825 bp, Homo sapiens
  Payload ID: 13836
  Gene Symbol: PCDHB4
  Gene Name: protocadherin beta 4
  Uniprot ID: Q9Y5E5
  ENST ID: ENST00000194152
  CDS Start-End: 201-2588
gctagacgcaatcaaaaacacacggaagaagcgttacaagcagtgcaggtttaccaacggcttggggcagcgatatactaaacaaatttaatattaaaagcaactgtgtgacgattcctccaagcaagaaattggaattgaatgtctcaagtctcgttgcggttgctgaggggattggatatagggacctggactccaacatgaagaagctagggagaattcatccaaacaggcaagtgttggcctttattttgatggtgttcttgtctcaggttcgcctcgagcctattcgttattctgtgttggaggaaacagagagcggctcctttgtagcccatctggccaaggatctgggcctgggaattggggaactggcctcccggtcagcccgggtgctgtctgacgatgacaagcagcgtttgcagctggatcgtcagactggagatttgcttctgagggagaaactagaccgggaagagctctgtggtcctattgaaccgtgtgtactgcatttccaagtgttcctggaaatgccggtgcaattttttcaaggagaattattgatccaggacataaatgatcactctccaatattccctgaaagggaagtgctcttgaaaatactagaaaatagccagccgggtactctatttccgttgctaatagctgaggatttggatgtgggcagcaatggtcttcaaaaatacacaatcagccccaattctcattttcacattctcactcgaaatcatagtgagggcaagaaatacccagatttggtgcaggacaaaccactggatcgagaggagcagcctgagttcagcttaaccctcgtggcgctggatggtgggtcaccacctaggtctggcacggtcatggttcgaatcctgatcatggacatcaatgacaatgctcctgagtttgtgcacactccatatggggtgcaggtcctggaaaacagccccctagactctccaattgttagggtcttagctagagatatagatgctggaaacttcgggagtgtttcttatggcttattccaagcatcagatgaaattaaacaaactttctcaataaatgaagtcacgggagaaatactgttgaaaaaaaaattggatttcgaaaaaattaaatcttaccatgtagaaattgaggccacagatggaggaggcctttctggaaaaggcactgtagtcatagaggtggtggatgtgaatgacaatcccccagaacttatcatatcttcactcaccagctccatcccagaaaatgctcctgagacggtagtctctatcttccgaattcgagatagagattccggagaaaatggaaagatgatttgctctattccagataatctaccgtttattctaaaaccaactttgaagaatttttacaccctggtaacagagagaccactggaccgagagaccagcgctgagtacaacatcaccatcgccgtcactgacttggggacacccaggctgaaaacccagcagaacataaccgtgcaggtctccgacgtcaatgacaacgcccccgccttcacccaaacctcctacaccctgttcgtccgcgagaacaacagccccgccctgcacatcggcagtgtcagcgccacagacagagactcgggcaccaacgcccaggtcacctactcgctgctgccgccccaggacccgcacctgcccctcgcctccctggtctccatcaacgcagacaacggccacctgttcgccctcaggtcgctggactacgaggccctgcaggcgttcgagttccgcgtgggcgcctcagaccgcggttctccggctttgagcagcgaggcgctggtgcgcgtgctggtgctggacaccaacgacaactcgcccttcgtgctgtacccgctgcagaatggctccgcgccctgcaccgagctggtgccccgggcggccgagccgggctacctggtgaccaaggtggtggcggtggacggcgactcgggccagaacgcctggctgtcgtaccagctgctcaaggccacggagcctgggctgttcggcgtgtgggcgcacaatggcgaggtgcgcaccgccaggctgctgagcgagcgcgacgcagccaagcacaggctcgtggtgcttgtcaaggacaatggcgagcctccgcgctcggccaccgccacgctgcacgtgctcctggtggatggcttctcccagccctacctgcctctccctgaggcggccccggcccaggcccaggccgactctctcaccgtctacctggtggtggcgttggcctcggtgtcgtcgctcttcctcttctcggtgctcctgttcgtggcggtgcggctgtgcaggaggagcagggcggcctcggtgggtcgctgctcggtgcccgagggcccctttccagggcatctggtggacgtaagcggcaccgggaccctgtcccagagctaccagtacgaggtgtgtctgacaggagactctgggactggtgagttcaagttcctgaagccaatatttcctaatctcttggttcaggacaccgggagggaagttaaggaaaaccccaagttcagaaatagcttggtattcagttaagtattgtatttagttcagtgaaccgcccgttagttttgtcaaacttcccactgcaatgcctttatttaaaaaaattgtctacttatctaaatattcataccacaatttcaaacctactcatgtccctgataaagctaaatttgtcccttttttattgttattaattgcacttaacatttttagttatactggatattgagtatggattttctctatatttgatctattggtgattaatctttttgtaatcataaattactcaattaggataaaaataaattatgttttaatgaaattcttaaattaacatctttttaatggaacatttaagtgaatatatgaatattgaatttctaaatatttgttgtgcctgtctttaccatgtaacttaatgtttgcaaggccagagtgtttgaaagttttgtatttaactttataattaccttgtcctttctggttgactatactaggctaagccctcttaatagccatgagtgtaaaatttagtttactcatttttcacaaattgtatataaacatgcacttcactacattggtaatacactaaaattgtggtccttttcctcttgtgaccaccacatgtctagtgattattttgtttatttggttgctacttacctagcacattgtaatgttccatgaatgctaatattaaattttgtaaaaataacttatttataaataatttttaaagagaaaaatctcatataatttgtcataacctttcaataaataaaactgttaaatcatggcctgatatcatcttaaaaaaaaatctcagaatctgaaataagccctaaatttctccccaaaatcaagactcttgagagcatcataggtctccttgtgctaccttttactccctataaatagaaatccaagtatactttaatatgtgtatattttttggttttcctacagcttctccccatctttcaaaagaatcacgaaatttcttctgcaccttggctattctgtttaaatctgataatcagttgatctcaggtttttcactgtacattactttgcagatatggacagcctttacaaaaataatttttaaatgcttaattattttaatttgttctttaaggtaaccttcagttattttgaattaatttaacttctcaattatgccaaagttgcacttgcatgaaataaatattattttgtccttgtatagactggaacagtaataaatttatctgaattaaaa

SEQ ID NO: 172158 - DNA, 3408 bp, Homo sapiens
  Payload ID: 13837
  Gene Symbol: PCDHB5
  Gene Name: protocadherin beta 5
  Uniprot ID: Q9Y5E4
  ENST ID: ENST00000231134
  CDS Start-End: 218-2605
agtgggctctgcggataactcagacgccattaagctggggaatccaaactctaaaagaaggacgcattttaggtaagatctagtggctagatcttcagggtgggcttcgttcttgtggaaatcagtcaagaaagatcggattcgcggttatttatgcaaatcatctgggtggattgtgtacggagttaaactgcgccttctggaccgggtctgaacaatggagactgcgctagcaaaaacgccacagaaaaggcaagttatgtttcttgctatattgttgcttttgtgggaggctggctctgaggcagttaggtattccataccagaagaaacagaaagtggctattctgtggccaacctggcaaaagacctgggtcttggggtgggggaactggccactcggggcgcgcgaatgcattacaaaggaaacaaagagctcttgcagcttgatataaagaccggcaatttgcttctatatgaaaaactagaccgggaggtgatgtgcggggcgacagaaccctgtatattgcatttccagctcttactagaaaatccagtgcagttttttcaaactgatctgcagctcacagatataaatgaccatgccccagagttcccagagaaggaaatgctcctaaaaatcccagagagcacccagccagggactgtgtttcccttaaaaatagcccaggactttgacataggtagcaacactgttcagaactacacaatcagcccaaattcacactttcatgttgctacgcataatcgcggagatggcagaaaatacccagagctggtgctggacaaagcgctggaccgggaggagcggcctgagctcagcttaacactcactgcactggacggtggggctccgcccaggtccgggaccaccacaattcgcattgtcgtcttggataataatgacaacgcccccgaatttttacaatcattctatgaggtacaggtgcccgagaacagcccccttaactccttagttgtcgttgtctccgctcgagatttagatgcaggagcatatgggagtgtagcctatgctctattccaaggcgatgaagttactcaaccatttgtaatagacgagaaaacagcagaaattcgcctgaaaagggcattggatttcgaggcaactccatattataacgtggaaattgtagccacagatggtgggggcctttcaggaaaatgcactgtggctatagaagtggtggatgtgaatgacaacgcccctgaactcaccatgtctacgctctccagccctaccccagaaaatgccccggaaactgtagttgccgttttcagtgtttctgatccagactccggggacaacggtaggatgatttgctccatccagaatgatctcccctttcttttgaagcccacattaaaaaacttttacaccctagtgacacagagaacactggacagagagagccaagccgagtacaacatcaccatcactgtcaccgacatggggacacccaggctgaaaaccgagcacaacataacggtcctggtctccgacgtcaatgacaacgcccccgccttcacccaaacctcctacaccctgttcgtccgagagaacaacagccccgccctgcacatcggcagtgtcagcgccacagacagagactcaggcaccaacgcccaggtcacctactcgctgctgccgccccagaacccacacctgcgcctcgcctccctggtctccatcaacgcggacaacggccacctgtttgccctcaggtcgctggactacgaggccctgcaggcgttcgagttccgcgtgggagccacagaccgcggctccccggcgctgagcagcgaggcgctggtgcgcgtgctggtgctggacgccaacgacaactcgcccttcgtgctgtatccgctgcagaacggctcggcgccttgcaccgagctggtgccccgggcggccgagccgggctacctggtgaccaaggtggtggcggtggacggtgactcgggccagaacgcctggctgtcgtaccagctgctcaaggccacggagcccgggctgttcagcatgtgggcgcacaatggcgaggtgcgcaccgccaggctgctgagcgagcgcgacgcggccaagcacaggctggtggtgctggtcaaggacaatggcgagcctccgcgctcggccaccgccacgctgcacgtgctcctggtggacggcttctcccagccctacctgccgctgccggaggcggccccggcccaggcccaggccgactcgctcactgtctacctggtggtggcattggcctcggtgtcgtcgctcttcctcttttcggtgctcctgttcgtggcagtgcggctgtgcaggaggagcagggcggccccggtcggtcgctgctcggtgcccgagggcccctttccagggcatctggtggacgtgagcggcaccgggaccctatcccagagctaccactacgaggtgtgtttgaccggagactcaggggccggcgagttcaagttcctgaagccgattattcctaaccttttgccccagggcgctggtgaagaaatagggaaaactgctgccttccggaatagctttggattaaattagagatctcgtgatgacgcgttgttttctgccatttatcccaaactttttcagatctagaattcgagagtgtcatggacaaaaatttcaccttgagattgagcttttatttccctttttaatggatttgtctgttgaacttcatgctgtccaagtgttgaaaagtcaattttatttcattgcatttatttacatagtgtcattccaaatccatgcatgctgttgattttcctgagatttttttctcttcttgttggtatttgttgtgataaaccaccttaataaaatcaagtattaattttattttctatatattctgcccattctatttcatcacactcttaagtattatatatttgatgctaaaatgcaaaaattaaaaatgtttcacatcatcatattttaattgtttaaaacaaagacaaatacatacatatgctaacaaatgaaatatgtgaaaaaatatgtaaaaggaaacaatcttctatttactcttttttgcagccctgagtcctattagcaaactttttaaaaacagtttaattgaattattacttacatgaagaaaaatgaacaaatcctttatgttcaactcaatatatattcacaaagtaacatatttattaccagcagcttgaagagaaaatgaaacatcactggcaccccaggtgccacacaaattactccttacaatcactactaccccaagtatagcaaatatgctgacttccaataccatagtttaattttgcctcttctgaatttatataaatggagtaataaagtatgaactgcttgtgtctggc

SEQ ID NO: 172159 - DNA, 869 bp, Homo sapiens
  Payload ID: 13837
  Gene Symbol: PCDHB5
  Gene Name: protocadherin beta 5
  ENST ID: ENST00000623915
  CDS Start-End: 127-869
cggataactcagacgccattaagctggggaatccaaactctaaaagaaggacgcattttagtgacacagagaacactggacagagagagccaagccgagtacaacatcaccatcactgtcaccgacatggggacacccaggctgaaaaccgagcacaacataacggtcctggtctccgacgtcaatgacaacgcccccgccttcacccaaacctcctacaccctgttcgtccgagagaacaacagccccgccctgcacatcggcagtgtcagcgccacagacagagactcaggcaccaacgcccaggtcacctactcgctgctgccgccccagaacccacacctgcgcctcgcctccctggtctccatcaacgcggacaacggccacctgtttgccctcaggtcgctggactacgaggccctgcaggcgttcgagttccgcgtgggagccacagaccgcggctccccggcgctgagcagcgaggcgctggtgcgcgtgctggtgctggacgccaacgacaactcgcccttcgtgctgtatccgctgcagaacggctcggcgccttgcaccgagctggtgccccgggcggccgagccgggctacctggtgaccaaggtggtggcggtggacggtgactcgggccagaacgcctggctgtcgtaccagctgctcaaggccacggagcccgggctgttcagcatgtgggcgcacaatggcgaggtgcgcaccgccaggctgctgagcgagcgcgacgcggccaagcacaggctggtggtgctggtcaaggacaatggcgagcctccgcgctcggccaccgccacgctgcacgtgctcctggtggacggcttctcccagccctacctgccgct

SEQ ID NO: 172160 - DNA, 3266 bp, Homo sapiens
  Payload ID: 13838
  Gene Symbol: PCDHB6
  Gene Name: protocadherin beta 6
  Uniprot ID: Q9Y5E3
  ENST ID: ENST00000231136
  CDS Start-End: 237-2621
gagtgaatgaaagctctgcagactcggtggactccgtttcatccagaagccaagtaaaaatacagaccacgtttacagctaaagctgagatagatgtgtccgggaaggcagtcgtcgccagacaagttgtaagaacgaatttaaaaatctctgcaaagacatccgagagggtcgacggtagatgtggtgattgggagctgaaaaggatttttcttccgtattcagacataatagacatgatgcaaactaaagtacagaacaagaaaaggcaagtggctttcttcattttattgatgctttggggagaggtgggttctgaatcgattcagtattccgtattggaggagacagaaagtggcacgtttgtggccaacttgacaaaggacctgggactgagggtgggggagctggcttcgcggggcgctcgggttgttttcaaagggaacagacaacatttgcagtttgatccacagacccatgatttactgctaaatgaaaaactggaccgggaggagctgtgtggctccactgagccgtgtgtgctacctttccaagtgttactggaaaaccccttgcagttttttcaggcttccttgcgagtcagagatataaatgaccacgccccggaattccctgccagagaaatgctcctgaaaatatcagaaattactatgccaggaaagatatttcctttgaaaatggcacacgatttagacaccggcagcaacggccttcagaggtacacaatcagctccaaccctcacttccacgttctcacccgcaatcgcagcgaaggcaggaagttcccggagctggtgctagacaaaccgttggaccgcgaggagcagccccaactcaggctaacgctgatcgcgctggatggcgggtctccgccccggtcagggacctccgagattcagatccaggttttggacatcaatgacaacgtccccgagtttgctcaggagctctatgaagcacaagtccctgagaacaaccccctcggctctctggttattaccgtctcagccagagatttagatgcaggatcgtttgggaaggtatcttacgccctgtttcaagtcgatgacgtcaaccaacccttcgaaataaacgcaatcacaggagaaattcggctgagaaaggctttggattttgaggaaattcagtcttatgacgtggatgttgaggctacagatggtggaggcctatcaggaaaatgctctttagtcgtcagggtcctggacgtgaatgacaatgcccctgaactcaccatgtcgttcttcatcagcctcatcccagaaaacttaccagagatcacagtggcagttttcagtgtttcagatgcagactctggacataaccaacaggttatttgttcaatagagaacaatctcccctttctactaagaccttccgtggagaatttctacaccctggtaacagaaggcgcgctggacagagagagcagagccgagtacaacatcactatcacggtcactgatttggggacaccaaggctgaaaacccagcagagcataactgtgcaggtctccgacgtcaatgacaacgcccccgccttcacccaaacctcctacaccctgttcgtccgcgagaacaacagccccgccctgcacatcggcagcgtcagcgccacagacagagactcaggcatcaacgcccaggtcacctactcgctgctgccgccccaggacccgcacctgcccctctcttccctggtctccatcaacgcggacaacggccacctgtttgccctcaggtcgctggactacgaggccctgcagtctttcgagttccgcgtgggcgccacagaccgcggctccccggcgttgagcagcgaggcgctggtgcgcttgctggtgctggacgccaacgacaactcgcccttcgtgttgtacccgctgcagaacggctccgcgccctgcaccgagctggtgccccgggcggccgagccgggctacctggtgaccaaggtggtggcggtggacggcgactcgggccagaacgcctggctgtcgtaccagctgctcaaggccacggagctcggtctgttcggcgtgtgggcgcacaatggcgaggtgcgcaccgccaggctgctgagcgagcgagacgcagccaagcacaggctggtggtgcttgtcaaggacaatggcgagcctccgcgctcggccaccgccacgctgcacgtgctcctggtggacggcttctcccagccctacctgcctctccctgaggcggccccggcccaagcccaggccgactctctcaccgtctacctggtggtggcgttggcctcggtgtcgtcgctcttcctcttttcggtgctcctgttcgtggcggtgcggctgtgcaggaggagcagggcggcctcggtgggtcgctactcggtgcccgagggtccctttccagggcatctggtggatgtgagcggcaccgggaccctatcccagagctaccagtacaaggtgtgtctgacgggaggctcagaaacaaatgagttcaagttcctgaagccgattatgcccaacttccctcctcagggcactgagagagaaatggaagaaacccccacctctcggaatagcttcccgttcagttaagtgtgggattattttactaaatcttacttatgtttggagatctcttttaacttaaagttacatggtctgtttcttgtttattttacctctattctttaggttgaaattttatataaagtaagatactggtatcttagtatttcctgttcatgcttagtagtttattacttcacttgagggtacttgacaatatgaacaaaaagtaaatttttatttgcataattttaagcttttgaaattaaattatctattcttcccccccccaaaaaaaagtattgtaaatccttaagtaaaattgtatttctagctattggtaagagttgtttcactattgctatgtaggactgtttaaaatgtgagtatctgatattatttaatcctccaatgtctcattttgcagtaactcctacagtgtgtaacactaaaaataagaactaatgatggctaaacactaaagtagccattcatacttatgcatattttagtatcccataatagtcaatccaaaatttttgtgactatagactttactgaagtgtcaacacattagtttgtgagcctcatgtaagaacatgatggtctttttttaaaaaaaaagtcgtgccaattataagtgcttaataaatatttgctgaatgttactaa

SEQ ID NO: 172161 - DNA, 2608 bp, Homo sapiens
  Payload ID: 13838
  Gene Symbol: PCDHB6
  Gene Name: protocadherin beta 6
  ENST ID: ENST00000622991
  CDS Start-End: 360-2336
aaagctgagatagatgtgtccgggaaggcagtcgtcgccagacaagttgtaagaacgaatttaaaaatctctgcaaagacatccgagagggtcgacggtagatgtggtgattgggagctgaaaaggatttttcttccgtattcagacataatagacatgatgcaaactaaagtacagaacaagaaaagacccatgatttactgctaaatgaaaaactggaccgggaggagctgtgtggctccactgagccgtgtgtgctacctttccaagtgttactggaaaaccccttgcagttttttcaggcttccttgcgagtcagagatataaatgaccacgccccggaattccctgccagagaaatgctcctgaaaatatcagaaattactatgccaggaaagatatttcctttgaaaatggcacacgatttagacaccggcagcaacggccttcagaggtacacaatcagctccaaccctcacttccacgttctcacccgcaatcgcagcgaaggcaggaagttcccggagctggtgctagacaaaccgttggaccgcgaggagcagccccaactcaggctaacgctgatcgcgctggatggcgggtctccgccccggtcagggacctccgagattcagatccaggttttggacatcaatgacaacgtccccgagtttgctcaggagctctatgaagcacaagtccctgagaacaaccccctcggctctctggttattaccgtctcagccagagatttagatgcaggatcgtttgggaaggtatcttacgccctgtttcaagtcgatgacgtcaaccaacccttcgaaataaacgcaatcacaggagaaattcggctgagaaaggctttggattttgaggaaattcagtcttatgacgtggatgttgaggctacagatggtggaggcctatcaggaaaatgctctttagtcgtcagggtcctggacgtgaatgacaatgcccctgaactcaccatgtcgttcttcatcagcctcatcccagaaaacttaccagagatcacagtggcagttttcagtgtttcagatgcagactctggacataaccaacaggttatttgttcaatagagaacaatctcccctttctactaagaccttccgtggagaatttctacaccctggtaacagaaggcgcgctggacagagagagcagagccgagtacaacatcactatcacggtcactgatttggggacaccaaggctgaaaacccagcagagcataactgtgcaggtctccgacgtcaatgacaacgcccccgccttcacccaaacctcctacaccctgttcgtccgcgagaacaacagccccgccctgcacatcggcagcgtcagcgccacagacagagactcaggcatcaacgcccaggtcacctactcgctgctgccgccccaggacccgcacctgcccctctcttccctggtctccatcaacgcggacaacggccacctgtttgccctcaggtcgctggactacgaggccctgcagtctttcgagttccgcgtgggcgccacagaccgcggctccccggcgttgagcagcgaggcgctggtgcgcttgctggtgctggacgccaacgacaactcgcccttcgtgttgtacccgctgcagaacggctccgcgccctgcaccgagctggtgccccgggcggccgagccgggctacctggtgaccaaggtggtggcggtggacggcgactcgggccagaacgcctggctgtcgtaccagctgctcaaggccacggagctcggtctgttcggcgtgtgggcgcacaatggcgaggtgcgcaccgccaggctgctgagcgagcgagacgcagccaagcacaggctggtggtgcttgtcaaggacaatggcgagcctccgcgctcggccaccgccacgctgcacgtgctcctggtggacggcttctcccagccctacctgcctctccctgaggcggccccggcccaagcccaggccgactctctcaccgtctacctggtggtggcgttggcctcggtgtcgtcgctcttcctcttttcggtgctcctgttcgtggcggtgcggctgtgcaggaggagcagggcggcctcggtgggtcgctactcggtgcccgagggtccctttccagggcatctggtggatgtgagcggcaccgggaccctatcccagagctaccagtacaaggtgtgtctgacgggaggctcagaaacaaatgagttcaagttcctgaagccgattatgcccaacttccctcctcagggcactgagagagaaatggaagaaacccccacctctcggaatagcttcccgttcagttaagtgtgggattattttactaaatcttacttatgtttggagatctcttttaacttaaagttacatggtctgtttcttgtttattttacctctattctttaggttgaaattttatataaagtaagatactggtatcttagtatttcctgttcatgcttagtagtttattacttcacttgagggtacttgacaatatgaacaaaaagtaaatttttatttgcataattttaagcttttgaaattaaattatctattcttcccccccccaaaaaaaa

SEQ ID NO: 172162 - DNA, 3765 bp, Homo sapiens
  Payload ID: 13839
  Gene Symbol: PCDHB7
  Gene Name: protocadherin beta 7
  Uniprot ID: Q9Y5E2
  ENST ID: ENST00000231137
  CDS Start-End: 218-2599
acaaagaaaggatgttacagattccagagcaaagaggcaatctgaagagaaaagcataggaaaggaaacagtggtaataggaattggggtaaaatgaggatccttccccacaaacattgctattattcagctcatttcaaaggattccgctgctgccatttgtgagagccgctggaggctgagtgaaagtcattttgaaagactgatccaaagaagaatggaggccagagtggagcgtgctgtgcagaaaaggcaagtcttatttctttgtgtatttctgggaatgtcttgggctggcgccgaaccgcttcggtattttgtggcggaggaaaccgagagaggcacctttcttaccaacttggcaaaagacctagggttaggggtaggggaactgagagcccggggaactagaattgtttcagaccagaacatgcaaattttactgctcagttcgcttactggtgatctacttctaaatgagaaattggaccgagaggaactgtgtggccccagagagccctgtgtgctgcctttccagttgttattggaaaaaccttttcagattttccgtgctgaactatgggtcagagacatcaatgatcacgctccagtatttctagacagagagatttccttgaaaatattagaaagtaccactccaggggcggcatttctcctagagagtgcacaggattcagatgttggaaccaacagcctgagtaactacaccatcagccccaatgcctatttccatattaatgtccatgatagcggggaggggaatatctatcccgaattggtgctgaatcaagtgctggatcgggaagagataccagagttcagtttaaccctcaccgctttagacggcggctctcctccaagatcagggaccgccctcgtgcgcattctggttctagacgtaaatgacaacgcccctgattttgtgcggtcgctctacaaggtgcaggtgcccgaaaatagccccgttggttccatggttgtctccgtgtcagccagagatttagataccggaagtaatggggaaatagcctatgcattttcttacgccactgaaagaattctcaaaacgtttcaaatcaatccaacatctggcagtcttcatcttaaagcgcaattggactatgaggcaattcaaacttacacattaactattcaggccaaagacggcggcgggctttctggaaaatgcactgtagtggttgatgtaacagatataaacgataatcgacccgagctgctcctgtcttcacttactagcccaattgcagaaaactcacccgagacagtcgtggctgtttttaggattagagacagagattccgggaacaatggaaagacagtgtgctccatccaggacgatgtccccttcatcctgaagccatctgtcgaaaacttctatactctggtaacagagaaacctttggatcgagagaggaacactgagtacaacatcaccatcaccgtcaccgacttggggacacccaggctgaaaaccgagcacaacataaccgtgctggtctccgacgtcaatgacaacgctcccgccttcacccaaacctcctacaccctgtttgtccgtgagaacaacagccccgccctgcccatcggcagtgtcagcgccacagacagagactcgggcaccaacgcccaggtcatctactccctgctgccgtcccaggacccgcacctgcccctcgcctccctggtctccatcaacgcggacaacggccacctgtttgccctcaggtccctggactacgaggccctgcaggcgttcgagttccgcgtgggcgccacagaccgcggctcccccgcgctgagcagcgaggcgctggtgcgcgtgctggtgctggacgccaacgacaactcgcccttcgtgctgtacccgctgcagaacagctccgcgccctgcaccgagccgttgccccgggcggccgagccgggctacctggtgaccaaggtggtggcggtggacggcgactcgggccagaacgcctggctgtcgtaccagctgctcaaggccacggagcccgggctattcggcgtgtgggcgcacaatggcgaggtgcgtaccgccaggctgctgagcgagcgcgacgcagccaagcagaggctggtggtgctggtcaaggacaatggcgagcctccgcgctcggccaccgccacgctgcacgtgctcctggtggacggcttctcccagccctacctgcggctcccggaggcggccccggaccaggccaactcgctcaccgtctacctggtggtggcgttggcctcggtgtcttcgctcttcctcctctcggtgctcctgttcgtggcggtgcggctgtgcaggaggagcagggcggccccggtgggtcgctgctcggtgcctgagggcccctttccacgacatctggtggacttgagcggcaccgggaccctatcccagagctaccagtatgaggtgtgcctgactggaggctccgggacaaatgagttcaagtttctgaaaccaattatccccaacctgctaccccagagcacaggcagggaagtggaagaaaatcgcccatttcagaataatttgggtttctgataaagaatgtaaactaaatccgcgtctgtgaatacgtttctgattaggaacttattgcgaggttcccttaagggagtgtctttacatcatttcaaatatgtactcttgaagtcaagcaataaatttctatacataaaataggatcctgatttagtatcaagaacccttcacaaagcatgaaatgtatatgtgtaatgttttatgtcaaacaattatgcttaatatacagtctattaaatgtaagtcttgtttgagatattttaaattgctttccattgttttcaatctctactgagacttcctgagttgattagaaagctgtatgagtgtacctaccctagtctcagaagcatagactgtagagtatctttttaagcatttttaaaaaatgcttttaatgcatcatacactattttaacacttttaatctgagaagaagcatatgaggcatggtattttaggaatgaacaaatagatggtcttagagattcagtaagttcactaagttccactaactaataagtgacaaaactgagcatccatcccagatctgtctgactctgggtcagtgaccctgctccgattccatactgttttctgtcattagatatcacctggcaagtttctgcctaattaaggagaagtcttttatcatatttatactgctgtccaatcttttctatatttagaaataataatgtacatatttatctatggttttattttcttatacaccaaaagtcctgcttttctgggtcaattttcaactattattactaatgctctgatctgtccaaactcaagcggaaaacaaaattgaaagggcaacctgtgccttctcctttcttcagaacatatgactttcatttcccagaaaaaagattaatggtcctgagtaggaatattacataattttgattgcatcattagttaattattttcttcatattgtagattttctgcagtcacccatacttaacatttgtaatacattttcctgatttgaaagtttgtttttaaaagttttctattaattatagtgcactattgaatcaggaaaatttaagaaaaagaatagttagttttaaatgcataatatcaaagagaatcatagatgatcattaaatttttagaaattctcggaagttaaggagaagcactgtttt

SEQ ID NO: 172163 - DNA, 2740 bp, Homo sapiens
  Payload ID: 13840
  Gene Symbol: PCDHB8
  Gene Name: protocadherin beta 8
  Uniprot ID: Q9UN66
  ENST ID: ENST00000239444
  CDS Start-End: 246-2651
tggcgctgcaggataagaaggcacaaaccagaaccgcagctgcagctccattaaccggcaaaaagcagcagaacctggaagtccacggggagcttggatgccaaagggaggacggctgggtcctctggagaggactactcactggcatatttctgaggtatctgtagaaaaccacagcctcagatactggggactttacagtcccacagaaccgtcctcccaggaagctgaattcagcaagaacaatggaggccagcgggaagctcatttgcagacaaaggcaagtccttttttcctttctccttttgggcttatctctggcgggcgcggcggaacctagaagctattctgtggtggaggaaactgagggcagctcctttgtcaccaatttagcaaaggacctgggtctggagcagagggaattctccaggcggggggttagggttgtttccagagggaacaaactacatttgcagctcaatcaggagaccgcggatttgttgctaaatgagaaattggaccgtgaggatctgtgcggtcacacagagccctgtgtgctacgtttccaagtgttgctagagagtcccttcgagttttttcaagctgagctgcaagtaatagacataaacgaccactctccagtatttctggacaaacaaatgttggtgaaagtatcagagagcagtcctcctgggactgcgtttcctctgaagaatgctgaagacttagatataggccaaaacaatattgagaactatataatcagccccaactcctattttcgggtcctcacccgcaaacgcagtgatggcaggaaatacccagagctggtgctggacaaagcgctggaccgagaggaagaagctgagctcaggttaacactcacagcactggatggtggctctccgcccagatctggcactgctcaggtctacattgaagttgtcgatgtcaatgataatgcccctgaatttgagcagcctttctatagggtgcagatctctgaggacagtccaataagcttcctggttgtgaaggtctctgccacggatgtagacacaggagtcaacggagagatttcctattcacttttccaagcttcagatgagataagcaaaacttttaaggtcgatttcttgacaggagaaattcgactaaagaaacaacttgatttcgaaaaatttcagtcctatgaagtcaatatcgaggcgagagatgctggaggcttttctggaaaatgcaccgttctgattcaagtgatagatgtgaacgaccatgccccagaagttaccatgtctgcatttaccagcccaatacctgagaatgcgcctgaaactgtggttgcacttttcagtgtttcagaccttgattcaggagaaaatgggaaaataagttgctccattcaggaggatctacccttcctcctgaaatcttctgtggggaacttttacaccctactaacagagacaccactagacagagaaagcagagccgagtacaacgtcactatcaccgtcactgacttagggacacccaggctgacaacacatctcaatatgaccgtgctggtgtcggacgtcaatgacaacgcccccgccttcacccaaacctcctacaccctgttcgtccgcgagaacaacagccccgccctgcacatcggcagcgtcagcgccacagacagagactcgggcaccaacgcccaggtcacctactcgctgctgccgccccaggatccgcacctgcccctcgcctccctggtctccatcaacacagacaacggccacctgttcgccctcaggtcgctggactacgaggccctgcaggcgttcgagttccgggtgggcgcttcagaccgcggctccccggctttgagcagcgaggcgctggtgcgcgtgctggtgctggacgccaacgacaactcgcccttcgtgctgtacccgctgcagaatggctccgcgccctgcaccgagctggtgccccgggcggccgagccgggctacctggtgaccaaggtggtggcggtggacggcgactcgggccagaacgcctggctgtcgtaccagctgctcaaggccacggagcccgggctgttcggtgtgtgggcgcacaatggcgaggtgcgcaccgccaggctgctgagcgagcgcgacgcggccaagcagaggctggtggtgctggtcaaggacaatggcgagcctccgtgctcggccaccgccacgctgcacgtgctcctggtggacggcttctcccagccctacctgccgcttccggaggctgccccagcccagggccaggccgactctctcaccgtctacctggtggtggcgttggcctcggtgtcttcgctcttcctcttctcggtgctcctgttcgtggcggtgctgctgtgtaggaggagcagggcggcctcggtgggtcgctgctcagtgcctgagggcccctttccagggcatctggtggacgtgaggggcaccgggagcctgtctcagaactatcagtacgaggtgtgcctggcaggaggctcagggacgaatgagttccagctcctgaaaccagtattacctaatattcagggccattcttttgggccagaaatggaacaaaactctaactttaggaatggctttggtttcagccttcagttaaagtaattgatttcatattatatattttaatttttatgatcaattcaaaggaatggttttctgtcaacttagcataaattttaaattacactaca

SEQ ID NO: 172164 - DNA, 4415 bp, Homo sapiens
  Payload ID: 13841
  Gene Symbol: PCDHB9
  Gene Name: protocadherin beta 9
  Uniprot ID: Q9Y5E1
  ENST ID: ENST00000316105
  CDS Start-End: 193-2586
agaatgctacggaagtccttgacaaaaaggaaacactgagacagatgggctgagaagaagagctgtcgagtccctgattgggaaaggaaaaattaaaaaccctagatctctggtacacataagtctgggtttgcgattgctatttgtgctggggcagtgtgattgagactgacattgaggaaagaagcagctatgaagaccagggggttcagctttccaagacaaaggcaagtcctgtttctttttcttttctggggagtgtccttggcaggttctgggtttggacgttattcggtgactgaggaaacagagaaaggatcctttgtggtcaatctggcaaaggatctgggactagcagagggggagctggctgcaaggggaaccagggtggtttccgatgataacaaacaatacctgctcctggattcacataccgggaatttgctcacaaatgagaaactggaccgagagaagctgtgtggccctaaagagccctgtatgctgtatttccaaattttaatggatgatccctttcagatttaccgggctgagctgagagtcagggatataaatgatcactcgccagtgtttcggcacaaagagatggtcttaaaaatatcagaaaatacagctgaagggacagcatttagactagaaagagcacaggatccagatgaaggtcataacagtatccaaaactacacgatcagctccaactcttttttccatattaaaattagtggcagtgatgaaggcatgatatatccagagctagtgttggacaaagcactggatcgggaggagcaggaagagctcagcttaaccctcacagcgctggatggtgggtctccatccaggtctgggacctccactatacgcattgtggtcttggatgtcaatgacaatgtcccacagtttgcccaggctctgtatgagacccaggctccagaaaacagtccagtagggtcccttattgttaaagtgtctgcaggagatgcagactcaggagtcaatgcagaagtatcctattcattttttgatgcttctgaagatattttaacaacgtttcaaatcaatcctttttctggggaaatctttctcagagaattgcttgattatgagttagtaaattcttacaaaataaatatacaggcaatggacggcggaggcctttctgcaagatgtacagttttgataaaagtattagattccaatgacaatcctcctgaactgatcatatcatcactttccaactctgttgctgaaaactctcctgggatagtattggctgtttttaagattaaagacagagactccggagaaaatggaaagacaatttgctatgttcaagataatctgcctttttttctgaaaccgtctgttgacaatttttacatcctaatgactgaaggtgcactggacagagagagcaaagctgagtacaacatcaccatcaccgtcactgacttggggacacccaggctgaaaaccgagcacagcataaccctgcaggtctccgacgtcaatgacaacgcccccgccttcacccaaacctcctacaccctgttcgtccgggagaacaacagccccgccctgcacatcggcagtgtcagcgccacagacagagactcaggcaccaacgcccaggtcacctactcgctgctgccgccccaggacccacacctgcccctcgcctccctggtctccatcaacgcggacaatggccacctgtttgccctcaggtcgctggactacgaggccctgcaggctttcgacttccgcgtgggcgcctcagaccgcggctccccggctttgagcagcgaggcgctggtgcgcgtactggtgctggacgccaacgacaactcgcccttcgtgctgtacccgctgcagaacggctccgcgccctgcaccgagctggtgccccgggcggccgagccgggctacctggtgaccaaggtggtggcggtggacggcgactcgggccagaacgcctggctgtcgtaccagctgctcaaggccacggagcccgggctgttcggtgtgtgggcgcacaatggggaggtgcgcaccgccaggctgctgagcgagcgcgacgcggccaagcacaggctggtggtgcttgtcaaggacaatggcgagcctcctcgctcggccaccgccacgctgcacgtgctcctggtggacggcttctcccagccctacctgcctctcccggaggcggccccggcccaggcccaggccgacttgctcaccgtctacctggtggtggcgttggcctcggtgtcttcgctcttcctcctctcggtgctcctgttcgtggcggtgcggctgtgcaggaggagcagggcggcctcggtgggtcgctgctcggtgcccgagggtccttttccagggcatctggtggacgtgagcggcaccgggaccctgttccagagctaccagtacgaggtgtgtctgactggaggttcagagaccggcgagttcaagttcttgaagccgattaccccccacctcccgccccataggggtgggaaagaaatagaggaaaattctactctccccaatagctttggatttaattattgaaaggaacccacttaataaagacatttacttctttaatatattcttgttggctaactaaattgtgtatgcccaccacaaagaaggtactattttttgtttgattcatcttcaactttgcgtattatgcttaacttcacaagttaactttttcttattttgtatcctgatgaggcatttcttactagaatcccataagtgaaatataatatttttcaaagttgatatcatttaaaaatttttggtcgttttaaatgtctttattgactttaaattcattgcctctacattattcattagttcttcttttcctaaaactttttacttgttaaaatagtctgctgcatgtaatatgtgcttttactatttgatatttcttctatttttcttttgaaaccggtgttcttattggtttgccatccttgttcattacaactgttttttgtttgtttgtttgttttttggtttgtttgttttttttttttttgagacggagtctcgctctgtcgcccaggctggagtgcagtggcgcgatctcagctcactgcaacctccgcctcccaggttcaagcgattctcctgcctcagcctccagagtatctgggactacagttgcatgtcaccacgttcggctaatttttgtattttcagtagagacgggtttcatcatggtggccaggatggtctatctcttgacctcgtgatccaccccactcagcctcccaaattgctgggatttacaggcatgagccaccgcacccagcctacaataattttcttaaactttaccttttattttaaagttctagtttcccggcattgatagttccctatttgaaatataatgtttctcttgtaagtgatatgataaataaacccctaattagccttagaagaaaaaccactgcaagatattaagcgtgtgtaaatgggctttagtctggaaaccaaaaaaaaaaaaaaaatttagtcattctataggatcatgtgaaaatatttaatttgctccttttaattctgtataaacaaatcagaggttcctgaggttcctgttaaatttttaatggctaatagcccagtgccatccagttgaaaaaacaacagcaatcacaaagtagaggtttatattgtgcggcttttatattcagctattagagtgttattggtagtgtctagccttttcctccacgacattccttgacttaatccatttgggcctattatagacaaaatagagcttctttctagatataaggtctttgaggcagggctcagtggctcattcctgtaatcccagcactttgggaggccaaggcgggcagatcaccttaggtcacgagtttgagaccagcctgaccaacgttaagtaaccccgtctttactaaaaatacaaaattagccaggcatggtggcacatgcttgtaatcccagctactcgggaggctgaggcaggagaatcgcttgaacccaggaggtggaagttgctttgagccgagattgcaccattgtactccagcctgggcaataagagcaaaactccatcaaaataaaataaaataaaatataaaataacttaaaaagaactttgaataaaattctatgaaaaaagacactagaatgctgttcttaattttaatagtgttaagataggtgttagtgtggtctgttctttacctccctttatttggtgcagagaagttagatcctgctaaatttcaattaagaggggaccttaaaataaggatcaatctcttatttaaccctgtaagttactttaaagctaatacaagaaaaacaaagacaagtgaaagtaaggaaacagaaattgcaaa

SEQ ID NO: 172165 - DNA, 616 bp, Homo sapiens
  Payload ID: 13841
  Gene Symbol: PCDHB9
  Gene Name: protocadherin beta 9
  ENST ID: ENST00000624909
  CDS Start-End: 397-616
ggaaaggaaaaattaaaaaccctagatctctggtacacataagtctgggtttgcgattgctatttgtgctggggcagtgtgattgagactgacattgaggaaagaagcagctatgaagaccagggggttcagctttccaagacaaaggcaatggacggcggaggcctttctgcaagatgtacagttttgataaaagtattagattccaatgacaatcctcctgaactgatcatatcatcactttccaactctgttgctgaaaactctcctgggatagtattggctgtttttaagattaaagacagagactccggagaaaatggaaagacaatttgctatgttcaagataatctgcctttttttctgaaaccgtctgttgacaatttttacatcctaatgactgaaggtgcactggacagagagagcaaagctgagtacaacatcaccatcaccgtcactgacttggggacacccaggctgaaaaccgagcacagcataaccctgcaggtctccgacgtcaatgacaacgcccccgccttcacccaaacctcctacaccctgttcgtccgggagaacaacagccccgccctgcacatcggcagtgtcagcgccacag

SEQ ID NO: 172166 - DNA, 4069 bp, Homo sapiens
  Payload ID: 13842
  Gene Symbol: PCDHGA1
  Gene Name: protocadherin gamma subfamily A, 1
  Uniprot ID: Q9Y5H4
  ENST ID: ENST00000378105
  CDS Start-End: 115-2586
tctggatgactctccagtcagaattctcctgaaaattgggttaatttcagctcagaaaagcagaaacgatacccttggtactggactggaagaaaactacgaagtgagagagccatgaagattcagaaaaagctgactggctgcagcaggctgatgcttctgtgtctttctctggagctgctgttggaagctggggctgggaatattcactactcagtgccggaagagacagacaaaggttccttcgtaggcaacatcgccaaggacctagggctgcaaccccaggagctggcagatggcggagtccgcatcgtctccagaggtaggatgccgcttttcgctctgaatcctagaagtggcagcttgatcaccgcgcgcaggatagaccgggaggagctctgcgctcagagcatgccgtgtctcgtgagttttaatatccttgttgaggataaaatgaagctttttcctgttgaagtagaaataattgatattaatgacaacactccccaattccagttagaggaactggagtttaaaatgaatgaaataacgactccaggtaccagagtctcattgccttttgggcaagaccttgatgtgggtatgaactcactccagagctaccaactcagctctaaccctcatttctccctggatgtgcaacagggagccgatgggcctcaacatccagagatggtgctgcagagtcccttagacagagaagaagaagctgtccaccacctcatcctcacagcttctgatgggggtgaaccagtccgttcagggaccctcagaatttacattcaggtggtggatgcaaatgacaatcctccagcatttactcaggcacaataccatataaatgtccccgaaaacgtgccgctgggtactcagctgctcatggtaaatgccactgaccctgatgagggagccaatggggaagtaacgtactcctttcacaatgtagaccacagagtggcccaaatatttcgtttagattcttacacaggagaaatatcaaataaagaaccactagatttcgaagaatacaaaatgtattcaatggaagttcaagcccaggatggtgcggggctcatggctaaagttaaggtactgatcaaagttttggatgtaaatgataatgccccagaagtgaccatcacctctgtcaccactgcagttccagaaaactttcctcctgggaccataattgctcttatcagtgtgcatgaccaggactcaggagacaatggctacaccacatgtttcattcctggaaatttaccctttaaattggaaaagttagttgataattattaccgtttagtgactgaaagaacactggacagagaacttatctctgggtacaacatcacaataacagcaatagaccaaggaactccagctctatctactgaaactcacatttcactactagtgacagatatcaatgacaactccccagtcttccatcaggactcctactctgcctacattcccgaaaacaaccccagaggagcctccatcttctctgtgagggcccacgacttggacagcaatgagaatgcacaaatcacttactccctaatagaggacactatccagggggcacccctatctgcctacctctccatcaactccgacactggggtcctgtatgcgctgcgatccttcgactatgagcagttccgggacatgcaactgaaagtgatggcgcgggacagtggggatccgcccctcagcagcaacgtgtctctcagcctattcctgctggaccagaacgacaacgcgcccgagatcctgtaccccgccctccccacagatggttctaccggcgtggagctggcgcccctctccgcagagcccggctacctggtgaccaaggtggtggcggtggacagagactcgggccagaacgcctggctgtcctaccgcctgctcaaggccagcgagccgggactcttctcggtgggtctgcacacgggcgaggtgcgcacggcgcgagccctgctggacagagacgcgctcaagcagagtctcgtggtggccgtccaggaccacggccagcccccgctctccgccactgtcacgctcaccgtggccgtggccgacaggatctccgacatcctggccgacctgggcagcctcgagccctccgccaaacccaacgattcggacctcactctgtacctggtggtggcggcggccgcggtctcctgcgtcttcctggccttcgtcatcgtgctgctggcgcacaggctgcggcgctggcacaagtcacgtctgctacaggcttcgggaggcggcttagcgagcatgcccggttcgcactttgtgggcgtggacggggttcgggctttcctgcagacctattcccacgaggtctccctcactgcggactcgcggaagagccacctgattttcccccagcccaactatgcggacacactcatcagccaggagagctgtgagaaaaagggttttctatcagcaccccagtctttacttgaagacaaaaaggaaccattttctcaggtaaacttttgtgatgaatgtatcagctatctagagaaaaataattcttgatttaacttactagcgttcgctctttgctacagatagttcttctaacccatgtatctttgtagctttttattacaagtcctgcaaaatcacgattgagtctacacgttcatatgcaggtatatttataattgttcttgcactgaaaaggagactgtgatcataatgtaggtggttgggttgaaggtatgtgtgagatgccatctctgtttggaaagagcactgcattagaaacggcgatctagcttctaacattttcttacttgcctctgggctaaaaggtttgattagaaaaggctcaccaatatttaaatgactaacactattttcaaattttctttttataagtacctgctaatctacccctgaatttaatgtagatgtcatctgtcaggacactgtgatagtttatttggggacatttgaagaggtgaagattgtctaaagtagtatttttagttgtgttcatataagattatagagatctatataaactgcaattttaaattattgttgaatattttagccttttattctatctttattatcagatttttttggttttgagatggggtcatgctagagtgcagtggcatgatcatggctcactgcagccactacctcctgggctcaagcgatcctcccacctcagcctctcaaagtgctgatattacaggtgtgagctgtggtgcctgtactgaagaatacgtctatttaagtaatgtatgaagtaacaaaatgaacaacacaaaatttatcatgcaacttgagaaatatctttgaagcctcctgacttatacattatacctgtaatgaaatcagctaacaaaaatcaagtatatatcctattttaatgtgtgttaacttttcagaagaaaaaaaaagtatggtcggggagtaagtccatgctttgatgtatttactctgctccaataaaatacagagatacataaaatataagaggaaagcaaaagcaaagtggtgagctagtctaaagccatgtgagttatagtcttggacttaaaagcagaaattgaaggttaggaaactgcctccagcaatgtaatagggacagaagtgcttcagactagataaatatctggaccaggcttactgcctgaatccaaaataagcaatgaggcccttcagctggttaaaaaggaaaagaaagatgcattaacatgctgcctagctgggcgcagtggctcacgtctgtatttccaacaatttgagaggctgaggcggaaagatccttggagccctggagttcaagaccagccggacagggcggcctgcgactgtagtcccagctacgcggggcggggaggggcggggcggggcggggcaggagctgacgtgggaggatcccttgagcccaggaagtcaaggcttcagcgaaccgtgatcgcgccactgccctccagcctgggcgacagagccacaccctgttaaataaataaatataataataaaagctgtttcccaa

SEQ ID NO: 172167 - DNA, 4604 bp, Homo sapiens
  Payload ID: 13842
  Gene Symbol: PCDHGA1
  Gene Name: protocadherin gamma subfamily A, 1
  Uniprot ID: Q9Y5H4
  ENST ID: ENST00000517417
  CDS Start-End: 1-2796
atgaagattcagaaaaagctgactggctgcagcaggctgatgcttctgtgtctttctctggagctgctgttggaagctggggctgggaatattcactactcagtgccggaagagacagacaaaggttccttcgtaggcaacatcgccaaggacctagggctgcaaccccaggagctggcagatggcggagtccgcatcgtctccagaggtaggatgccgcttttcgctctgaatcctagaagtggcagcttgatcaccgcgcgcaggatagaccgggaggagctctgcgctcagagcatgccgtgtctcgtgagttttaatatccttgttgaggataaaatgaagctttttcctgttgaagtagaaataattgatattaatgacaacactccccaattccagttagaggaactggagtttaaaatgaatgaaataacgactccaggtaccagagtctcattgccttttgggcaagaccttgatgtgggtatgaactcactccagagctaccaactcagctctaaccctcatttctccctggatgtgcaacagggagccgatgggcctcaacatccagagatggtgctgcagagtcccttagacagagaagaagaagctgtccaccacctcatcctcacagcttctgatgggggtgaaccagtccgttcagggaccctcagaatttacattcaggtggtggatgcaaatgacaatcctccagcatttactcaggcacaataccatataaatgtccccgaaaacgtgccgctgggtactcagctgctcatggtaaatgccactgaccctgatgagggagccaatggggaagtaacgtactcctttcacaatgtagaccacagagtggcccaaatatttcgtttagattcttacacaggagaaatatcaaataaagaaccactagatttcgaagaatacaaaatgtattcaatggaagttcaagcccaggatggtgcggggctcatggctaaagttaaggtactgatcaaagttttggatgtaaatgataatgccccagaagtgaccatcacctctgtcaccactgcagttccagaaaactttcctcctgggaccataattgctcttatcagtgtgcatgaccaggactcaggagacaatggctacaccacatgtttcattcctggaaatttaccctttaaattggaaaagttagttgataattattaccgtttagtgactgaaagaacactggacagagaacttatctctgggtacaacatcacaataacagcaatagaccaaggaactccagctctatctactgaaactcacatttcactactagtgacagatatcaatgacaactccccagtcttccatcaggactcctactctgcctacattcccgaaaacaaccccagaggagcctccatcttctctgtgagggcccacgacttggacagcaatgagaatgcacaaatcacttactccctaatagaggacactatccagggggcacccctatctgcctacctctccatcaactccgacactggggtcctgtatgcgctgcgatccttcgactatgagcagttccgggacatgcaactgaaagtgatggcgcgggacagtggggatccgcccctcagcagcaacgtgtctctcagcctattcctgctggaccagaacgacaacgcgcccgagatcctgtaccccgccctccccacagatggttctaccggcgtggagctggcgcccctctccgcagagcccggctacctggtgaccaaggtggtggcggtggacagagactcgggccagaacgcctggctgtcctaccgcctgctcaaggccagcgagccgggactcttctcggtgggtctgcacacgggcgaggtgcgcacggcgcgagccctgctggacagagacgcgctcaagcagagtctcgtggtggccgtccaggaccacggccagcccccgctctccgccactgtcacgctcaccgtggccgtggccgacaggatctccgacatcctggccgacctgggcagcctcgagccctccgccaaacccaacgattcggacctcactctgtacctggtggtggcggcggccgcggtctcctgcgtcttcctggccttcgtcatcgtgctgctggcgcacaggctgcggcgctggcacaagtcacgtctgctacaggcttcgggaggcggcttagcgagcatgcccggttcgcactttgtgggcgtggacggggttcgggctttcctgcagacctattcccacgaggtctccctcactgcggactcgcggaagagccacctgattttcccccagcccaactatgcggacacactcatcagccaggagagctgtgagaaaaagggttttctatcagcaccccagtctttacttgaagacaaaaaggaaccattttctcagcaagccccgcccaacacggactggcgtttctctcaggcccagagacccggcaccagcggctcccaaaatggcgatgacaccggcacctggcccaacaaccagtttgacacagagatgctgcaagccatgatcttggcgtccgccagtgaagctgctgatgggagctccaccctgggagggggtgccggcaccatgggattgagcgcccgctacggaccccagttcaccctgcagcacgtgcccgactaccgccagaatgtctacatcccaggcagcaatgccacactgaccaacgcagctggcaagcgggatggcaaggccccagcaggtggcaatggcaacaagaagaagtcgggcaagaaggagaagaagtaacatggaggccaggccaagagccacagggcggcctctccccaaccagcccagcttctccttacctgcacccaggcctcagagtttcagggctaacccccagaatactggtaggggccaaggccatgctccccttgggaaacagaaacaagtgcccagtcagcacctaccccttcccccccagggggttgaatatgcaaaagcagttccgctgggaacccccatccaatcaactgctgtacccatgggggtagtggggttactgtagacaccaagaaccatttgccacaccccgtttagttacagctgaactcctccatcttccaaatcaatcaggcccatccatcccatgcctccctcctccccaccccactccaacagttcctctttcccgagtaaggtggttggggtgttgaagtaccaagtaacctacaagcctcctagttctgaaaagttggaagggcatcatgacctcttggcctctcctttgattctcaatcttcccccaaagcatggtttggtgccagccccttcacctccttccagagcccaagatcaatgctcaagttttggaggacatgatcaccatccccatggtactgatgcttgctggatttagggagggcattttgctaccaagcctcttcccaacgccctggggaccagtcttctgttttgtttttcattgtttgacgtttccactgcatgccttgacttcccccacctcctcctcaaacaagagactccactgcatgttccaagacagtatggggtggtaagataaggaagggaagtgtgtggatgtggatggtgggggcatggacaaagcttgacacatcaagttatcaaggccttggaggaggctctgtatgtcctcaggggactgacaacatcctccagattccagccataaaccaataactaggctggacccttcccactacataatagggctcagcccaggcagccagctttgggctgagctaacaggaccaatggattaaactggcatttcagtccaaggaagctcgaagcaggtttaggaccaggtccccttgagaggtcagaggggcctctgtgggtgctgggtactccagaggtgccactggtggaagggtcagcggagccccagcaggaagggtgggccagccaggccattcttagtccctgggttggggaggcagggagctagggcagggaccaaatgaacagaaagtctcagcccaggatggggcttcttcaacagggcccctgccctcctgaagcctcagtccttcaccttgccaggtgccgtttctcttccgtgaaggccactgcccaggtccccagtgcgccccctagtggccatagcctggttaaagttccccagtgcctccttgtgcatagaccttcttctcccacccccttctgcccctgggtccccggccatccagcggggctgccagagaaccccagacctgcccttacagtagtgtagcgccccctccctctttcggctggtgtagaatagccagtagtgtagtgcggtgtgcttttacgtgatggcgggtgggcagcgggcggcgggctccgcgcagccgtctgtccttgatctgcccgcggcggcccgtgttgtgttttgtgctgtgtccacgcgctaaggcgaccccctcccccgtactgacttctcctataagcgcttctcttcgcatagtcacgtagctcccaccccaccctcttcctgtgtctcacgcaagttttatactctaatatttatatggctttttttcttcgacaaaaaaataataaaacgtttcttctgaaaagctgaa

SEQ ID NO: 172168 - DNA, 4617 bp, Homo sapiens
  Payload ID: 13843
  Gene Symbol: PCDHGA10
  Gene Name: protocadherin gamma subfamily A, 10
  Uniprot ID: Q9Y5H3
  ENST ID: ENST00000398610
  CDS Start-End: 1-2811
atggccgctcaaaggaatcgctcaaaggaatcaaaggattgcagcgggctggtcctgctctgccttttcttcgggattccatgggaggctggagcccggcagatctcctactcaattcctgaggaattagagaaaggctctttcgtgggcaacatctccaaggacttgggtctggcgccccgggagctggcggagcgcggagtccgcatagtctccagaggtaggacgcagcttttctctctgaacccgcgcagcggcagcttgatcaccgcgggcaggatagaccgggaggagctctgcgctcagagcgcgcggtgcgtggtgagttttaatatccttgtggaagacagggtgaaactttttgggatagaaatagaagtaactgatatcaatgacaatgctccaaaattccaagcagaaaatctagacgtaaaaattaatgaaaatgtcgctgcgggaatgcgttttcctctcccggaagctattgatccggatgtgggcgtgaactccctgcagagctatcagctcagccccaataagcacttctccctaagagttcagagccgtgccaatggcgtcaagtacccggagctggtactggagcactccctagatcgcgaggaagaggccattcaccacctggtcctcaccgcctccgacgggggtgaccctctccgatctggcactgtccttgtcagtgtgactgtcttcgatgcaaatgacaacgcgccggtcttcaccttgccagaataccgagtgagtgttcctgagaatttgcctgtgggcactcagctgctgacagtcacagccaccgacagggacgaaggtgccaatggagaagtgacatattcattccgaaaattacctgacacgcaattgttgaagttccaactaaacaaatatactggagaaataaaaatatcagaaaatctagattatgaagaaaccggtttctatgaaatagaaatacaagcagaagatggaggagcatatcttgcaactgcaaaagtgttgattacagtagaagatgtaaatgacaacagtccagagctgaccatcacgtctctatttagtccagtgactgaagattcacctctgggaacagtcgtagcccttttaaatgtgcatgatttagactctgagcagaatggacaggtaacctgttccattttggcgtatctaccatttaaattagaaaagtccattgacagttattacagattggtgatacacagagcccttgacagggaacaggtatcctcttacaatatcacagtgacagccacagatgggggaagtcctcctctatcaacggaagctcactttatgctacaagtggcagatatcaatgacaacccacctaccttctctcaagtctcctactttacctatatcccagagaacaacgccaggggtgcctccatcttctcagtgacagcgctggacccggacagcaaagagaatgcccagattatttactccctggctgaagacaccatccagggggtacctctgtcctcatacatatccatcaactcagacactggcgtcctgtatgcactcagatccttcgactatgagcagtttcatgagctacagatgcaggtgacagccagcgacagcggggatcctccactcagcagcaacgtgtcgttgagcctgtttgtgctggaccagaacgacaatgcgcccgagatcctgtaccccgccctccccacagacggttccacaggcgtggagctggcgccccgctccgcagagcccggctacctggtgaccaaggtggtggcggtggacagagactccggccagaacgcctggctgtcctaccgtctgctcaaggccagcgagccgggactcttcgcggtgggggagcacacgggcgaggtgcgcacggcgcgagccctgctggacagagacgcgctcaagcaaagcctcgtagtggccgtccaggaccacggccagccccctctctccgccactgtcacgctcaccgtggccgtggccgacagcatcccccaagtcctggcggacctcggcagcttcgagtctccagctaactctgaaacctcagacctcactctgtacctggtggtagcggtggccgcggtctcctgcgtcttcctggccttcgtcatcgtgctgctggcgcacaggctgcggcgctggcacaagtcacgcctgctgcaggcttcaggaggcggcttgacaggtgtgtccggctcgcactttgtgggcgtggacggggttcgggctttcctgcagacctattcccacgaggtctctctcaccgcggactcgcgaaagagtcacctgatcttcccccagcccaattatgcggacacgctcatcagccaggagagctgtgagaaaaacgatcctttgtctttgttagatgattcgaagtttcctatagaggataccccattggttccacaagccccgcccaacacggactggcgtttctctcaggcccagagacccggcaccagcggctcccaaaatggcgatgacaccggcacctggcccaacaaccagtttgacacagagatgctgcaagccatgatcttggcgtccgccagtgaagctgctgatgggagctccaccctgggagggggtgccggcaccatgggattgagcgcccgctacggaccccagttcaccctgcagcacgtgcccgactaccgccagaatgtctacatcccaggcagcaatgccacactgaccaacgcagctggcaagcgggatggcaaggccccagcaggtggcaatggcaacaagaagaagtcgggcaagaaggagaagaagtaacatggaggccaggccaagagccacagggcggcctctccccaaccagcccagcttctccttacctgcacccaggcctcagagtttcagggctaacccccagaatactggtaggggccaaggccatgctccccttgggaaacagaaacaagtgcccagtcagcacctaccccttcccccccagggggttgaatatgcaaaagcagttccgctgggaacccccatccaatcaactgctgtacccatgggggtagtggggttactgtagacaccaagaaccatttgccacaccccgtttagttacagctgaactcctccatcttccaaatcaatcaggcccatccatcccatgcctccctcctccccaccccactccaacagttcctctttcccgagtaaggtggttggggtgttgaagtaccaagtaacctacaagcctcctagttctgaaaagttggaagggcatcatgacctcttggcctctcctttgattctcaatcttcccccaaagcatggtttggtgccagccccttcacctccttccagagcccaagatcaatgctcaagttttggaggacatgatcaccatccccatggtactgatgcttgctggatttagggagggcattttgctaccaagcctcttcccaacgccctggggaccagtcttctgttttgtttttcattgtttgacgtttccactgcatgccttgacttcccccacctcctcctcaaacaagagactccactgcatgttccaagacagtatggggtggtaagataaggaagggaagtgtgtggatgtggatggtgggggcatggacaaagcttgacacatcaagttatcaaggccttggaggaggctctgtatgtcctcaggggactgacaacatcctccagattccagccataaaccaataactaggctggacccttcccactacataatagggctcagcccaggcagccagctttgggctgagctaacaggaccaatggattaaactggcatttcagtccaaggaagctcgaagcaggtttaggaccaggtccccttgagaggtcagaggggcctctgtgggtgctgggtactccagaggtgccactggtggaagggtcagcggagccccagcaggaagggtgggccagccaggccattcttagtccctgggttggggaggcagggagctagggcagggaccaaatgaacagaaagtctcagcccaggatggggcttcttcaacagggcccctgccctcctgaagcctcagtccttcaccttgccaggtgccgtttctcttccgtgaaggccactgcccaggtccccagtgcgccccctagtggccatagcctggttaaagttccccagtgcctccttgtgcatagaccttcttctcccacccccttctgcccctgggtccccggccatccagcggggctgccagagaaccccagacctgcccttacagtagtgtagcgccccctccctctttcggctggtgtagaatagccagtagtgtagtgcggtgtgcttttacgtgatggcgggtgggcagcgggcggcgggctccgcgcagccgtctgtccttgatctgcccgcggcggcccgtgttgtgttttgtgctgtgtccacgcgctaaggcgaccccctcccccgtactgacttctcctataagcgcttctcttcgcatagtcacgtagctcccaccccaccctcttcctgtgtctcacgcaagttttatactctaatatttatatggctttttttcttcgacaaaaaaataataaaacgtttcttctgaaaagctg

SEQ ID NO: 172169 - DNA, 4462 bp, Homo sapiens
  Payload ID: 13843
  Gene Symbol: PCDHGA10
  Gene Name: protocadherin gamma subfamily A, 10
  Uniprot ID: Q9Y5H3
  ENST ID: ENST00000612503
  CDS Start-End: 190-2742
aatccggattctcagggcttcaactacacaagccccacaaaccggctgctgggctgcagggaagctcactccagaatttaaagtgcccaggctacagagacaccctgaagccacagaaagacaaaggaaccggttgaaacacacaacgtgtccagtgaggactttgcagaattctgtaaccagactacaatggccgctcaaaggaatcgctcaaaggaatcaaaggattgcagcgggctggtcctgctctgccttttcttcgggattccatgggaggctggagcccggcagatctcctactcaattcctgaggaattagagaaaggctctttcgtgggcaacatctccaaggacttgggtctggcgccccgggagctggcggagcgcggagtccgcatagtctccagaggtaggacgcagcttttctctctgaacccgcgcagcggcagcttgatcaccgcgggcaggatagaccgggaggagctctgcgctcagagcgcgcggtgcgtggtgagttttaatatccttgtggaagacagggtgaaactttttgggatagaaatagaagtaactgatatcaatgacaatgctccaaaattccaagcagaaaatctagacgtaaaaattaatgaaaatgtcgctgcgggaatgcgttttcctctcccggaagctattgatccggatgtgggcgtgaactccctgcagagctatcagctcagccccaataagcacttctccctaagagttcagagccgtgccaatggcgtcaagtacccggagctggtactggagcactccctagatcgcgaggaagaggccattcaccacctggtcctcaccgcctccgacgggggtgaccctctccgatctggcactgtccttgtcagtgtgactgtcttcgatgcaaatgacaacgcgccggtcttcaccttgccagaataccgagtgagtgttcctgagaatttgcctgtgggcactcagctgctgacagtcacagccaccgacagggacgaaggtgccaatggagaagtgacatattcattccgaaaattacctgacacgcaattgttgaagttccaactaaacaaatatactggagaaataaaaatatcagaaaatctagattatgaagaaaccggtttctatgaaatagaaatacaagcagaagatggaggagcatatcttgcaactgcaaaagtgttgattacagtagaagatgtaaatgacaacagtccagagctgaccatcacgtctctatttagtccagtgactgaagattcacctctgggaacagtcgtagcccttttaaatgtgcatgatttagactctgagcagaatggacaggtaacctgttccattttggcgtatctaccatttaaattagaaaagtccattgacagttattacagattggtgatacacagagcccttgacagggaacaggtatcctcttacaatatcacagtgacagccacagatgggggaagtcctcctctatcaacggaagctcactttatgctacaagtggcagatatcaatgacaacccacctaccttctctcaagtctcctactttacctatatcccagagaacaacgccaggggtgcctccatcttctcagtgacagcgctggacccggacagcaaagagaatgcccagattatttactccctggctgaagacaccatccagggggtacctctgtcctcatacatatccatcaactcagacactggcgtcctgtatgcactcagatccttcgactatgagcagtttcatgagctacagatgcaggtgacagccagcgacagcggggatcctccactcagcagcaacgtgtcgttgagcctgtttgtgctggaccagaacgacaatgcgcccgagatcctgtaccccgccctccccacagacggttccacaggcgtggagctggcgccccgctccgcagagcccggctacctggtgaccaaggtggtggcggtggacagagactccggccagaacgcctggctgtcctaccgtctgctcaaggccagcgagccgggactcttcgcggtgggggagcacacgggcgaggtgcgcacggcgcgagccctgctggacagagacgcgctcaagcaaagcctcgtagtggccgtccaggaccacggccagccccctctctccgccactgtcacgctcaccgtggccgtggccgacagcatcccccaagtcctggcggacctcggcagcttcgagtctccagctaactctgaaacctcagacctcactctgtacctggtggtagcggtggccgcggtctcctgcgtcttcctggccttcgtcatcgtgctgctggcgcacaggctgcggcgctggcacaagtcacgcctgctgcaggcttcaggaggcggcttgacaggtgtgtccggctcgcactttgtgggcgtggacggggttcgggctttcctgcagacctattcccacgaggtctctctcaccgcggactcgcgaaagagtcacctgatcttcccccagcccaattatgcggacacgctcatcagccaggagagctgtgagaaaaacgatcctttgtctttgttagatgattcgaagtttcctatagaggataccccattggttccagtgagttttattttcatttttacttttgttaaaaaaaaaaagattggtttttactttgaagtttgcggcatgatggtggaaagtgtaaatgctaaaacactgatgagtagaatttgatgtttattaaggttttttttttttttttttttttttttttttttactttctggtaaaattcacctagtctcaatcaaggcctatatatcataaggctttgttatgattagctttgcagaaccttgtagtttatagtgttgttgagtacaatattgacaattcctaagacagacttccatacagaagtgcctgtcaatttatatttcctcctgggtggtcacatattgaaactccagccccttaagcaaccctcttgttctgaaggcaggtctggtaagaataggtaagtatcagaaagaaatcacctctggaaacacaacccaaatccaagaatactcaatgcagttcttcccaaggagaagggcaataggcctttttcaaactacattttatatatttttcaatctatactttgtggtgatagttgcagttgaatatactaagtttttcattaatattgaattaacaatttatttataacaatgtatgcttagatttttccagccctatttataactgataacactgcagtatcctttttgcatacaattctctaatttcacactgctatgtggaagatatagcattttaatttaactttcattgctcaatagggatcctgaggaggctatagagggtgaaattaagaatatttgggattctgcttttgtcttttttgttaaattttctagtgactaaggctgaaagtaaatatgggttgggaagacagataaatttgtacatgttcccgagaacaggagcaagagatatatgacaaagctatttcagtggctctttaatgtataaggaggcaaacacctgaaactctgaaaactctgaaattgagaggcaaaataaacttagagtcaagaaagaaatgccatttctgcagatcagaatataaacaccaaccacagctgtaaaaaagaaaagaatatatgcaacgaagggaaattatataaacaaaggatcattggaggtactgatgagttcatttagttcaatgaaaatagtgacgtattaggtagatctcttaattttattactagtattctactaaatgtggtagtataaagtcaaaaagcattccgaagtttctcaagacccttataattccatgatttttttcaggtcagtcaacatttgttgaatgataggtctgtggaaggaaagcacactctttagggtcatagttattaactattaaaccattgaaactattattttatatttgtgttaatgagagtcaaaattattgtgcattcatctcaaataattctattattttgaaaaatacaggttttttttttaaaaaaaactgctcttgacattgtagctattgtgagaaaatattttgattataattatttaaaagcaatacaggacaccctggatgatggtaatgactagggcaatggttgcattccagtacttaagtatgaaataaggaattattactttctgggtgaatataggctagaattgaagacaaaaaaatttgttgcttatcttcagtacttccagcttcatagataattactcttaaaaggaacaagaatgactgcctctggatggaggaattggatagcaatgggccgtgggataggagacctataaaccttcatgctatattattttgtgcctttttaaattttgaagaaaaaatattcatttattcaagatatatgtaaattcagtaaataaaaagatatgatagtta

SEQ ID NO: 172170 - DNA, 4647 bp, Homo sapiens
  Payload ID: 13844
  Gene Symbol: PCDHGA11
  Gene Name: protocadherin gamma subfamily A, 11
  Uniprot ID: Q9Y5H2
  ENST ID: ENST00000398587
  CDS Start-End: 34-2841
gagaaaccgcggaatatcggcttagagcctgccatggcgaatcggctacagcgcggggaccgcagtcggctgctgctgctgctgtgcattttcctggggacgctgcgggggttccgggccaggcagatccgatattcggtgccagaagagaccgaaaagggctccttcgtgggcaatatctccaaggacctggggctggagccccgggagctggcgaagcgcggagtccgcatcgtctccagagggaagacacagcttttcgctgtgaatccgcgaagcggcagcttgatcacggcaggcaggatagaccgggaggagctctgtgagacggtgtcctcctgttttttaaatatggaacttctcgtggaagacaccttgaagatttacggagtggaggtggaaataatagatattaatgataacgcccccagcttccaggaggacgaagtggagataaaagtcagtgagcacgcaattcctggggcgcgatttgctcttcctaatgctagggatccagatgtgggcgtgaactccctccagagctaccagctcagccctaataattacttttccttgcaactgcggggcagaacggatggggccaagaatccagagctagtactggagggaagcctggaccgagagaaagaggctgctcacctgctcctcctcacagctttagatggaggcgatcccatccgaaagggcgcagttcccattcgtgtggtggtcctcgatgtaaatgatcacatcccaatgtttacacagtccgtatatcgcgtgagtgttccagaaaacatcagctccggaactcgggtgctgatggttaatgcaacggatccagacgagggaatcaacggggaagtaatgtattcatttcggaacatggaaagcaaggcttctgaaatattccaattggattcacaaactggagaagttcaagtacgggggtctctggattttgaaaaatatagattctatgagatggaaattcaaggccaagatggtggaggtctctttaccaccacgacgatgttgatcactgttgtggatgtgaatgataacgctccagaaataactatcacctcttctattaattcaattctggaaaactctcctccaggtacagtgattgctcttctaaatgtgcaagatcaagattctggagaaaatggtcaagtctcctgttttattcctaaccacctgccttttaaattagaaaagacttatggaaattattacaaattgataacaagcagagtgctggacagggagttggtccagagctacaatataacgttgacagccacagaccagggaagcccgcctttgtctgcagaaactcatgtctggctgaatgtggcagatgacaacgataaccctcccgtttttcctcactcctcttactctgcctacattcccgaaaacaaccccaggggtgcctccatcttctcagtgaccgccctcgacccggacagcaaacagaatgccctggtcacttactctctgacggatgacactgtccagggggtgcctctgtcctcctatgtctctattaactccaacactggtgttctctatgccctacaatccttcgactatgagcagtttcgagacttagaactgagagtgatagcacgtgacagcggggacccgcccctcagcagcaacgtgtcgctgagcctgttcgtgctggaccagaacgacaatgcgcccgagatcctgtaccctgccctccccacagacggctccactggcgtggagctggcgccccgctctgcggaacctggctacctggtgaccaaggtggttgcggtggacaaagattcaggccagaacgcctggctgtcctatcgcctgcttaaggccagcgagccgggactcttcgcggtgggggagcacacgggcgaggtgcgtacagcgcgggcactgctggacagagacgcgctcaagcagagcctcgtggtggccgtccaggaccacggccagccccctctctcggccaccgtcacgctcaccgtggctgtggccgacagcatccccgaagtcctggcggacctcggcagcctcgagtctctggctaactctgaaacctcagacctctcgctgtacttggtggtggcggtggccgcagtctcctgcatcttcctggtctttgtcatcgtgctgctggcactcaggctgtggcgctggcataagtcacgcctgctgcaggcttctgaaggcgggttggcaggtatgcccacgtcacattttgtaggcgtggacggggtacaggctttcctgcaaacctattcccacgaggtctctctcattgcggactcgcagaagagtcacctgattttcccccagcccaactatggggacacgctcatcagccaggagagctgtgagaaaagcgagccactcttgatagctgaagactcagctatcattttaggcaaatgtgacccgacaagtaatcagcaagccccgcccaacacggactggcgtttctctcaggcccagagacccggcaccagcggctcccaaaatggcgatgacaccggcacctggcccaacaaccagtttgacacagagatgctgcaagccatgatcttggcgtccgccagtgaagctgctgatgggagctccaccctgggagggggtgccggcaccatgggattgagcgcccgctacggaccccagttcaccctgcagcacgtgcccgactaccgccagaatgtctacatcccaggcagcaatgccacactgaccaacgcagctggcaagcgggatggcaaggccccagcaggtggcaatggcaacaagaagaagtcgggcaagaaggagaagaagtaacatggaggccaggccaagagccacagggcggcctctccccaaccagcccagcttctccttacctgcacccaggcctcagagtttcagggctaacccccagaatactggtaggggccaaggccatgctccccttgggaaacagaaacaagtgcccagtcagcacctaccccttcccccccagggggttgaatatgcaaaagcagttccgctgggaacccccatccaatcaactgctgtacccatgggggtagtggggttactgtagacaccaagaaccatttgccacaccccgtttagttacagctgaactcctccatcttccaaatcaatcaggcccatccatcccatgcctccctcctccccaccccactccaacagttcctctttcccgagtaaggtggttggggtgttgaagtaccaagtaacctacaagcctcctagttctgaaaagttggaagggcatcatgacctcttggcctctcctttgattctcaatcttcccccaaagcatggtttggtgccagccccttcacctccttccagagcccaagatcaatgctcaagttttggaggacatgatcaccatccccatggtactgatgcttgctggatttagggagggcattttgctaccaagcctcttcccaacgccctggggaccagtcttctgttttgtttttcattgtttgacgtttccactgcatgccttgacttcccccacctcctcctcaaacaagagactccactgcatgttccaagacagtatggggtggtaagataaggaagggaagtgtgtggatgtggatggtgggggcatggacaaagcttgacacatcaagttatcaaggccttggaggaggctctgtatgtcctcaggggactgacaacatcctccagattccagccataaaccaataactaggctggacccttcccactacataatagggctcagcccaggcagccagctttgggctgagctaacaggaccaatggattaaactggcatttcagtccaaggaagctcgaagcaggtttaggaccaggtccccttgagaggtcagaggggcctctgtgggtgctgggtactccagaggtgccactggtggaagggtcagcggagccccagcaggaagggtgggccagccaggccattcttagtccctgggttggggaggcagggagctagggcagggaccaaatgaacagaaagtctcagcccaggatggggcttcttcaacagggcccctgccctcctgaagcctcagtccttcaccttgccaggtgccgtttctcttccgtgaaggccactgcccaggtccccagtgcgccccctagtggccatagcctggttaaagttccccagtgcctccttgtgcatagaccttcttctcccacccccttctgcccctgggtccccggccatccagcggggctgccagagaaccccagacctgcccttacagtagtgtagcgccccctccctctttcggctggtgtagaatagccagtagtgtagtgcggtgtgcttttacgtgatggcgggtgggcagcgggcggcgggctccgcgcagccgtctgtccttgatctgcccgcggcggcccgtgttgtgttttgtgctgtgtccacgcgctaaggcgaccccctcccccgtactgacttctcctataagcgcttctcttcgcatagtcacgtagctcccaccccaccctcttcctgtgtctcacgcaagttttatactctaatatttatatggctttttttcttcgacaaaaaaataataaaacgtttcttctgaaaagctg

SEQ ID NO: 172171 - DNA, 2263 bp, Homo sapiens
  Payload ID: 13844
  Gene Symbol: PCDHGA11
  Gene Name: protocadherin gamma subfamily A, 11
  Uniprot ID: Q9Y5H2
  ENST ID: ENST00000518882
  CDS Start-End: 1-2253
atggcgaatcggctacagcgcggggaccgcagtcggctgctgctgctgctgtgcattttcctggggacgctgcgggggttccgggccaggcagatccgatattcggtgccagaagagaccgaaaagggctccttcgtgggcaatatctccaaggacctggggctggagccccgggagctggcgaagcgcggagtccgcatcgtctccagagggaagacacagcttttcgctgtgaatccgcgaagcggcagcttgatcacggcaggcaggatagaccgggaggagctctgtgagacggtgtcctcctgttttttaaatatggaacttctcgtggaagacaccttgaagatttacggagtggaggtggaaataatagatattaatgataacgcccccagcttccaggaggacgaagtggagataaaagtcagtgagcacgcaattcctggggcgcgatttgctcttcctaatgctagggatccagatgtgggcgtgaactccctccagagctaccagctcagccctaataattacttttccttgcaactgcggggcagaacggatggggccaagaatccagagctagtactggagggaagcctggaccgagagaaagaggctgctcacctgctcctcctcacagctttagatggaggcgatcccatccgaaagggcgcagttcccattcgtgtggtggtcctcgatgtaaatgatcacatcccaatgtttacacagtccgtatatcgcgtgagtgttccagaaaacatcagctccggaactcgggtgctgatggttaatgcaacggatccagacgagggaatcaacggggaagtaatgtattcatttcggaacatggaaagcaaggcttctgaaatattccaattggattcacaaactggagaagttcaagtacgggggtctctggattttgaaaaatatagattctatgagatggaaattcaaggccaagatggtggaggtctctttaccaccacgacgatgttgatcactgttgtggatgtgaatgataacgctccagaaataactatcacctcttctattaattcaattctggaaaactctcctccaggtacagtgattgctcttctaaatgtgcaagatcaagattctggagaaaatggtcaagtctcctgttttattcctaaccacctgccttttaaattagaaaagacttatggaaattattacaaattgataacaagcagagtgctggacagggagttggtccagagctacaatataacgttgacagccacagaccagggaagcccgcctttgtctgcagaaactcatgtctggctgaatgtggcagatgacaacgataaccctcccgtttttcctcactcctcttactctgcctacattcccgaaaacaaccccaggggtgcctccatcttctcagtgaccgccctcgacccggacagcaaacagaatgccctggtcacttactctctgacggatgacactgtccagggggtgcctctgtcctcctatgtctctattaactccaacactggtgttctctatgccctacaatccttcgactatgagcagtttcgagacttagaactgagagtgatagcacgtgacagcggggacccgcccctcagcagcaacgtgtcgctgagcctgttcgtgctggaccagaacgacaatgcgcccgagatcctgtaccctgccctccccacagacggctccactggcgtggagctggcgccccgctctgcggaacctggctacctggtgaccaaggtggttgcggtggacaaagattcaggccagaacgcctggctgtcctatcgcctgcttaaggccagcgagccgggactcttcgcggtgggggagcacacgggcgagcaagccccgcccaacacggactggcgtttctctcaggcccagagacccggcaccagcggctcccaaaatggcgatgacaccggcacctggcccaacaaccagtttgacacagagatgctgcaagccatgatcttggcgtccgccagtgaagctgctgatgggagctccaccctgggagggggtgccggcaccatgggattgagcgcccgctacggaccccagttcaccctgcagcacgtgcccgactaccgccagaatgtctacatcccaggcagcaatgccacactgaccaacgcagctggcaagcgggatggcaaggccccagcaggtggcaatggcaacaagaagaagtcgggcaagaaggagaagaagtaacatggaggcc

SEQ ID NO: 172172 - DNA, 3633 bp, Homo sapiens
  Payload ID: 13844
  Gene Symbol: PCDHGA11
  Gene Name: protocadherin gamma subfamily A, 11
  Uniprot ID: Q9Y5H2
  ENST ID: ENST00000622044
  CDS Start-End: 182-2695
ctctaccacacaaagcggaatgagatggatactcacagatcctgacactggagacttagaagtattttccttcgctttctgatatattttggatgtagtcggcctaggacttcatagatacataagccgattcacaaccaaccagctcgagaaaccgcggaatatcggcttagagcctgccatggcgaatcggctacagcgcggggaccgcagtcggctgctgctgctgctgtgcattttcctggggacgctgcgggggttccgggccaggcagatccgatattcggtgccagaagagaccgaaaagggctccttcgtgggcaatatctccaaggacctggggctggagccccgggagctggcgaagcgcggagtccgcatcgtctccagagggaagacacagcttttcgctgtgaatccgcgaagcggcagcttgatcacggcaggcaggatagaccgggaggagctctgtgagacggtgtcctcctgttttttaaatatggaacttctcgtggaagacaccttgaagatttacggagtggaggtggaaataatagatattaatgataacgcccccagcttccaggaggacgaagtggagataaaagtcagtgagcacgcaattcctggggcgcgatttgctcttcctaatgctagggatccagatgtgggcgtgaactccctccagagctaccagctcagccctaataattacttttccttgcaactgcggggcagaacggatggggccaagaatccagagctagtactggagggaagcctggaccgagagaaagaggctgctcacctgctcctcctcacagctttagatggaggcgatcccatccgaaagggcgcagttcccattcgtgtggtggtcctcgatgtaaatgatcacatcccaatgtttacacagtccgtatatcgcgtgagtgttccagaaaacatcagctccggaactcgggtgctgatggttaatgcaacggatccagacgagggaatcaacggggaagtaatgtattcatttcggaacatggaaagcaaggcttctgaaatattccaattggattcacaaactggagaagttcaagtacgggggtctctggattttgaaaaatatagattctatgagatggaaattcaaggccaagatggtggaggtctctttaccaccacgacgatgttgatcactgttgtggatgtgaatgataacgctccagaaataactatcacctcttctattaattcaattctggaaaactctcctccaggtacagtgattgctcttctaaatgtgcaagatcaagattctggagaaaatggtcaagtctcctgttttattcctaaccacctgccttttaaattagaaaagacttatggaaattattacaaattgataacaagcagagtgctggacagggagttggtccagagctacaatataacgttgacagccacagaccagggaagcccgcctttgtctgcagaaactcatgtctggctgaatgtggcagatgacaacgataaccctcccgtttttcctcactcctcttactctgcctacattcccgaaaacaaccccaggggtgcctccatcttctcagtgaccgccctcgacccggacagcaaacagaatgccctggtcacttactctctgacggatgacactgtccagggggtgcctctgtcctcctatgtctctattaactccaacactggtgttctctatgccctacaatccttcgactatgagcagtttcgagacttagaactgagagtgatagcacgtgacagcggggacccgcccctcagcagcaacgtgtcgctgagcctgttcgtgctggaccagaacgacaatgcgcccgagatcctgtaccctgccctccccacagacggctccactggcgtggagctggcgccccgctctgcggaacctggctacctggtgaccaaggtggttgcggtggacaaagattcaggccagaacgcctggctgtcctatcgcctgcttaaggccagcgagccgggactcttcgcggtgggggagcacacgggcgaggtgcgtacagcgcgggcactgctggacagagacgcgctcaagcagagcctcgtggtggccgtccaggaccacggccagccccctctctcggccaccgtcacgctcaccgtggctgtggccgacagcatccccgaagtcctggcggacctcggcagcctcgagtctctggctaactctgaaacctcagacctctcgctgtacttggtggtggcggtggccgcagtctcctgcatcttcctggtctttgtcatcgtgctgctggcactcaggctgtggcgctggcataagtcacgcctgctgcaggcttctgaaggcgggttggcaggtatgcccacgtcacattttgtaggcgtggacggggtacaggctttcctgcaaacctattcccacgaggtctctctcattgcggactcgcagaagagtcacctgattttcccccagcccaactatggggacacgctcatcagccaggagagctgtgagaaaagcgagccactcttgatagctgaagactcagctatcattttaggcaaatgtgacccgacaagtaatcaggtgagatttatttctctgcctcctaattgttggtgtcttggcacaagtcttttaaggagatgttttttgagcctgttatgaaaactgtttggggggggggtggggcggcatatatttagttcatatatatttagagcaatacatgtgagttttactttgcctttcatgagattacgataatctttcagaacgtttttgtgaaagtcatttttcaatcttggcatattttcttttgatttcaaaggggccattcaactatgctggtttggtttgaagtaagttgaattttagtattatttttctattatcagtgtatgaggctctcaatttattatatatagatacaaattaatgattcacaaacactttttatttccatttcaattttgctgtgccttcactgatttgtagttatattccaccattatttgctattactgctaatgttcaaattttgatcctgttgatttaatagcatgctccctctagctctccttctcatctatctatctatacacatgcacacacacttatacacgtaagcttttctctgagcaattttattttgattcttggtggctggtaatatgcttagatcctgttgactatttcaactttgtctcatttcttcatcctatcaacacagacatattgactggcttttaactactggatttccttgggagataaaatttagatcacattttttcttaagctctagatgtcttttccattactatggtgaagttacattgactgttctgaggaaataattgaattattgaactggtattatttccttttattcttttactttggtgtctgtgtttgtatgtatggaaggttttttaatgtagtaaatccatatatagaaataacttgattttgattcagtgcttctcaaaaacctattttcaaatgtgctaaagatgtctacagatttattcaaatagagtagtttgtgaatatataaatagattgaaggtatttggactttaattaaactgatttagctagta

SEQ ID NO: 172173 - DNA, 4747 bp, Homo sapiens
  Payload ID: 13845
  Gene Symbol: PCDHGA12
  Gene Name: protocadherin gamma subfamily A, 12
  Uniprot ID: O60330
  ENST ID: ENST00000252085
  CDS Start-End: 143-2941
taggaatgaaccatccctgggagtatgtggaaacaacggaggagctctgacttcccaactgtcccattctatgggcgaaggaactgctcctgacttcagtggttaagggcagaattgaaaataattctggaggaagataagaatgattcctgcgcgactgcaccgggactacaaagggcttgtcctgctgggaatcctcctggggactctgtgggagaccggatgcacccagatacgctattcagttccggaagagctggagaaaggctctagggtgggcgacatctccagggacctggggctggagccccgggagctcgcggagcgcggagtccgcatcatccccagaggtaggacgcagcttttcgccctgaatccgcgcagcggcagcttggtcacggcgggcaggatagaccgggaggagctctgtatgggggccatcaagtgtcaattaaatctagacattctgatggaggataaagtgaaaatatatggagtagaagtagaagtaagggacattaacgacaatgcgccttactttcgtgaaagtgaattagaaataaaaattagtgaaaatgcagccactgagatgcggttccctctaccccacgcctgggatccggatatcgggaagaactctctgcagagctacgagctcagcccgaacactcacttctccctcatcgtgcaaaatggagccgacggtagtaagtaccccgaattggtgctgaaacgcgccctggaccgcgaagaaaaggctgctcaccacctggtccttacggcctccgacgggggcgacccggtgcgcacaggcaccgcgcgcatccgcgtgatggttctggatgcgaacgacaacgcaccagcgtttgctcagcccgagtaccgcgcgagcgttccggagaatctggccttgggcacgcagctgcttgtagtcaacgctaccgaccctgacgaaggagtcaatgcggaagtgaggtattccttccggtatgtggacgacaaggcggcccaagttttcaaactagattgtaattcagggacaatatcaacaataggggagttggaccacgaggagtcaggattctaccagatggaagtgcaagcaatggataatgcaggatattctgcgcgagccaaagtcctgatcactgttctggacgtgaacgacaatgccccagaagtggtcctcacctctctcgccagctcggttcccgaaaactctcccagagggacattaattgcccttttaaatgtaaatgaccaagattctgaggaaaacggacaggtgatctgtttcatccaaggaaatctgccctttaaattagaaaaatcttacggaaattactatagtttagtcacagacatagtcttggatagggaacaggttcctagctacaacatcacagtgaccgccactgaccggggaaccccgcccctatccacggaaactcatatctcgctgaacgtggcagacaccaacgacaacccgccggtcttccctcaggcctcctattccgcttatatcccagagaacaatcccagaggagtttccctcgtctctgtgaccgcccacgaccccgactgtgaagagaacgcccagatcacttattccctggctgagaacaccatccaaggggcaagcctatcgtcctacgtgtccatcaactccgacactggggtactgtatgcgctgagctccttcgactacgagcagttccgagacttgcaagtgaaagtgatggcgcgggacaacgggcacccgcccctcagcagcaacgtgtcgttgagcctgttcgtgctggaccagaacgacaatgcgcccgagatcctgtaccccgccctccccacggacggttccactggcgtggagctggctccccgctccgcagagcccggctacctggtgaccaaggtggtggcggtggacagagactccggccagaacgcctggctgtcctaccgtctgctcaaggccagcgagccgggactcttctcggtgggtctgcacacgggcgaggtgcgcacggcgcgagccctgctggacagagacgcgctcaagcagagcctcgtagtggccgtccaggaccacggccagccccctctctccgccactgtcacgctcaccgtggccgtggccgacagcatcccccaagtcctggcggacctcggcagcctcgagtctccagctaactctgaaacctcagacctcactctgtacctggtggtagcggtggccgcggtctcctgcgtcttcctggccttcgtcatcttgctgctggcgctcaggctgcggcgctggcacaagtcacgcctgctgcaggcttcaggaggcggcttgacaggagcgccggcgtcgcactttgtgggcgtggacggggtgcaggctttcctgcagacctattcccacgaggtttccctcaccacggactcgcggaagagtcacctgatcttcccccagcccaactatgcagacatgctcgtcagccaggagagctttgaaaaaagcgagccccttttgctgtcaggtgattcggtattttctaaagacagtcatgggttaattgagcaagccccgcccaacacggactggcgtttctctcaggcccagagacccggcaccagcggctcccaaaatggcgatgacaccggcacctggcccaacaaccagtttgacacagagatgctgcaagccatgatcttggcgtccgccagtgaagctgctgatgggagctccaccctgggagggggtgccggcaccatgggattgagcgcccgctacggaccccagttcaccctgcagcacgtgcccgactaccgccagaatgtctacatcccaggcagcaatgccacactgaccaacgcagctggcaagcgggatggcaaggccccagcaggtggcaatggcaacaagaagaagtcgggcaagaaggagaagaagtaacatggaggccaggccaagagccacagggcggcctctccccaaccagcccagcttctccttacctgcacccaggcctcagagtttcagggctaacccccagaatactggtaggggccaaggccatgctccccttgggaaacagaaacaagtgcccagtcagcacctaccccttcccccccagggggttgaatatgcaaaagcagttccgctgggaacccccatccaatcaactgctgtacccatgggggtagtggggttactgtagacaccaagaaccatttgccacaccccgtttagttacagctgaactcctccatcttccaaatcaatcaggcccatccatcccatgcctccctcctccccaccccactccaacagttcctctttcccgagtaaggtggttggggtgttgaagtaccaagtaacctacaagcctcctagttctgaaaagttggaagggcatcatgacctcttggcctctcctttgattctcaatcttcccccaaagcatggtttggtgccagccccttcacctccttccagagcccaagatcaatgctcaagttttggaggacatgatcaccatccccatggtactgatgcttgctggatttagggagggcattttgctaccaagcctcttcccaacgccctggggaccagtcttctgttttgtttttcattgtttgacgtttccactgcatgccttgacttcccccacctcctcctcaaacaagagactccactgcatgttccaagacagtatggggtggtaagataaggaagggaagtgtgtggatgtggatggtgggggcatggacaaagcttgacacatcaagttatcaaggccttggaggaggctctgtatgtcctcaggggactgacaacatcctccagattccagccataaaccaataactaggctggacccttcccactacataatagggctcagcccaggcagccagctttgggctgagctaacaggaccaatggattaaactggcatttcagtccaaggaagctcgaagcaggtttaggaccaggtccccttgagaggtcagaggggcctctgtgggtgctgggtactccagaggtgccactggtggaagggtcagcggagccccagcaggaagggtgggccagccaggccattcttagtccctgggttggggaggcagggagctagggcagggaccaaatgaacagaaagtctcagcccaggatggggcttcttcaacagggcccctgccctcctgaagcctcagtccttcaccttgccaggtgccgtttctcttccgtgaaggccactgcccaggtccccagtgcgccccctagtggccatagcctggttaaagttccccagtgcctccttgtgcatagaccttcttctcccacccccttctgcccctgggtccccggccatccagcggggctgccagagaaccccagacctgcccttacagtagtgtagcgccccctccctctttcggctggtgtagaatagccagtagtgtagtgcggtgtgcttttacgtgatggcgggtgggcagcgggcggcgggctccgcgcagccgtctgtccttgatctgcccgcggcggcccgtgttgtgttttgtgctgtgtccacgcgctaaggcgaccccctcccccgtactgacttctcctataagcgcttctcttcgcatagtcacgtagctcccaccccaccctcttcctgtgtctcacgcaagttttatactctaatatttatatggctttttttcttcgacaaaaaaataataaaacgtttcttctgaaaagctg

SEQ ID NO: 172174 - DNA, 2634 bp, Homo sapiens
  Payload ID: 13845
  Gene Symbol: PCDHGA12
  Gene Name: protocadherin gamma subfamily A, 12
  Uniprot ID: O60330
  ENST ID: ENST00000613314
  CDS Start-End: 172-2634
gcacgcgcctgaagcacaaagcagatagctaggaatgaaccatccctgggagtatgtggaaacaacggaggagctctgacttcccaactgtcccattctatgggcgaaggaactgctcctgacttcagtggttaagggcagaattgaaaataattctggaggaagataagaatgattcctgcgcgactgcaccgggactacaaagggcttgtcctgctgggaatcctcctggggactctgtgggagaccggatgcacccagatacgctattcagttccggaagagctggagaaaggctctagggtgggcgacatctccagggacctggggctggagccccgggagctcgcggagcgcggagtccgcatcatccccagaggtaggacgcagcttttcgccctgaatccgcgcagcggcagcttggtcacggcgggcaggatagaccgggaggagctctgtatgggggccatcaagtgtcaattaaatctagacattctgatggaggataaagtgaaaatatatggagtagaagtagaagtaagggacattaacgacaatgcgccttactttcgtgaaagtgaattagaaataaaaattagtgaaaatgcagccactgagatgcggttccctctaccccacgcctgggatccggatatcgggaagaactctctgcagagctacgagctcagcccgaacactcacttctccctcatcgtgcaaaatggagccgacggtagtaagtaccccgaattggtgctgaaacgcgccctggaccgcgaagaaaaggctgctcaccacctggtccttacggcctccgacgggggcgacccggtgcgcacaggcaccgcgcgcatccgcgtgatggttctggatgcgaacgacaacgcaccagcgtttgctcagcccgagtaccgcgcgagcgttccggagaatctggccttgggcacgcagctgcttgtagtcaacgctaccgaccctgacgaaggagtcaatgcggaagtgaggtattccttccggtatgtggacgacaaggcggcccaagttttcaaactagattgtaattcagggacaatatcaacaataggggagttggaccacgaggagtcaggattctaccagatggaagtgcaagcaatggataatgcaggatattctgcgcgagccaaagtcctgatcactgttctggacgtgaacgacaatgccccagaagtggtcctcacctctctcgccagctcggttcccgaaaactctcccagagggacattaattgcccttttaaatgtaaatgaccaagattctgaggaaaacggacaggtgatctgtttcatccaaggaaatctgccctttaaattagaaaaatcttacggaaattactatagtttagtcacagacatagtcttggatagggaacaggttcctagctacaacatcacagtgaccgccactgaccggggaaccccgcccctatccacggaaactcatatctcgctgaacgtggcagacaccaacgacaacccgccggtcttccctcaggcctcctattccgcttatatcccagagaacaatcccagaggagtttccctcgtctctgtgaccgcccacgaccccgactgtgaagagaacgcccagatcacttattccctggctgagaacaccatccaaggggcaagcctatcgtcctacgtgtccatcaactccgacactggggtactgtatgcgctgagctccttcgactacgagcagttccgagacttgcaagtgaaagtgatggcgcgggacaacgggcacccgcccctcagcagcaacgtgtcgttgagcctgttcgtgctggaccagaacgacaatgcgcccgagatcctgtaccccgccctccccacggacggttccactggcgtggagctggctccccgctccgcagagcccggctacctggtgaccaaggtggtggcggtggacagagactccggccagaacgcctggctgtcctaccgtctgctcaaggccagcgagccgggactcttctcggtgggtctgcacacgggcgaggtgcgcacggcgcgagccctgctggacagagacgcgctcaagcagagcctcgtagtggccgtccaggaccacggccagccccctctctccgccactgtcacgctcaccgtggccgtggccgacagcatcccccaagtcctggcggacctcggcagcctcgagtctccagctaactctgaaacctcagacctcactctgtacctggtggtagcggtggccgcggtctcctgcgtcttcctggccttcgtcatcttgctgctggcgctcaggctgcggcgctggcacaagtcacgcctgctgcaggcttcaggaggcggcttgacaggagcgccggcgtcgcactttgtgggcgtggacggggtgcaggctttcctgcagacctattcccacgaggtttccctcaccacggactcgcggaagagtcacctgatcttcccccagcccaactatgcagacatgctcgtcagccaggagagctttgaaaaaagcgagccccttttgctgtcaggtgattcggtattttctaaagacagtcatgggttaattgaggtgagtttatatcaaatcttctttcttttttttttttaa

SEQ ID NO: 172175 - DNA, 4605 bp, Homo sapiens
  Payload ID: 13846
  Gene Symbol: PCDHGA2
  Gene Name: protocadherin gamma subfamily A, 2
  Uniprot ID: Q9Y5H1
  ENST ID: ENST00000394576
  CDS Start-End: 1-2799
atggcggctctgcaaaagttgccacactgcagaaagctggtcctgctgtgcttccttttggcgaccctgtgggaggccagggccgggcagattcgctattctgtgcgggaagagatcgacagaggctccttcgtaggcaacatcgccaaggacttgggtttggagcccctggcactggcagagcagggagtccgcatcgtctccagaggtaggtcccagctctttgctctgaacccgcgaagcggcagcttggtcactgcgaacaggatagaccgggaggagctctgcgctcagagcgcaccctgtctgttgaattttaacattctgctggaggataaattgactatttattcagtagaggtggaaataacagatattaacgataatgcccctcgctttggagtagaggaactggagctaaaaatcagtgaaaccactacgccaggattccggattcctcttaagaatgcgcatgatgcagacgtaggtgagaacgcccttcagaagtacgcactcaacccaaatgaccacttctccctggacgtgcgaaggggagctgatgggaacaagtacccagaactggtgctggagcgctctctggaccgcgaggaagaggctgttcaccacctcgttctcgtggcttctgatgggggtgacccagtgctatctggcacctcccgcatctgcgtgaaggtcctggatgcgaacgacaatgcgcctgtttttacacagcccgagtaccgcataagcattccggagaatacgctcgtgggcacccggatactcacggtgaccgccactgacgcagatgagggctactacgctcaagtggtatattttctagagaaaagccctggagaaacctcagaggtatttgagcttaagtcaacatctggagaactgacaatcataaaagatctagattatgaggatgctacattccatgaaattgatattgaagctcaggatggtccgggccttctaaccagagcgaaggttatcgtcacggttctggatgtgaatgacaatgccccagaattttacatgacatctgctactagctcagtttctgaagactctcttccaggaaccataattgggctttttaatgtacatgatagagactctgggcagaacgcattcaccacctgttcactccccgaggatcttccttttaagttagaaaagtcagtagacaattactaccgactggttacaaccagagcccttgacagggaacagttttccttttacaacatcactctaaccgctaaagatggagggaacccctccctgtccacggatgctcacattttgctccaggtggcagacatcaacgacaacgcacccgccttctcccgcacatcctactccacctacattcccgaaaacaaccccagaggagcctctgtcttctcagtgacggcccatgaccccgacagcaacgacaatgctcatgtaacttactctttcgcggaggacactgttcagggggcacccttatcctcttacatctctatcaactccgacactggagtactctatgcactgcgctcctttgattatgagcagttgcgagacttgcaagtgtgggtgatagcgcgggacagcgggaaccctccactcagtagcaatgtatcattaagcctgttcgtgctggaccagaacgacaacgcgcccgagatcctgtaccctgccttccccacagacggttccactggcgtggagctggcgccccgctccgcagagcccggctacctggtgaccaaggtggtggcggtggacagagactcgggccagaacgcctggctgtcttaccacctgctcaaggccagcgagccgggactcttctcggtgggtctgcacacgggcgaggtgcgcacggcgcgagccctgctggacagagacgcgctcaagcagagcctcgtggtggccatccaggaccacggccagccccctctctccgccactgtcacgctcaccgtggccgtggccgacaggatccccgacatcctggccgacctgggcagcctcgagccctccgccatacccaacgattcggacctcactctgtacctggtggtggcggtggccgcggtctcctgcgtcttcctggccttcgtcatcgtgttgctggcgcacaggctgcggcgctggcacaagtcacgcctgctgcaggcttcaggaggcagcttgacaggcatgcagagctcgcactttgtgggcgtggacggggttcgggctttcctgcagacctattcccacgaggtctccctcactgcggactcgcggaagagccacctgattttcccccagcccaactatgcggacacgctcatcagccaggagagctgtgagaaaaaggattttttatcagcgcctcaatctctactcgaagaagaaagagaagaaacgttttctcagcaagccccgcccaacacggactggcgtttctctcaggcccagagacccggcaccagcggctcccaaaatggcgatgacaccggcacctggcccaacaaccagtttgacacagagatgctgcaagccatgatcttggcgtccgccagtgaagctgctgatgggagctccaccctgggagggggtgccggcaccatgggattgagcgcccgctacggaccccagttcaccctgcagcacgtgcccgactaccgccagaatgtctacatcccaggcagcaatgccacactgaccaacgcagctggcaagcgggatggcaaggccccagcaggtggcaatggcaacaagaagaagtcgggcaagaaggagaagaagtaacatggaggccaggccaagagccacagggcggcctctccccaaccagcccagcttctccttacctgcacccaggcctcagagtttcagggctaacccccagaatactggtaggggccaaggccatgctccccttgggaaacagaaacaagtgcccagtcagcacctaccccttcccccccagggggttgaatatgcaaaagcagttccgctgggaacccccatccaatcaactgctgtacccatgggggtagtggggttactgtagacaccaagaaccatttgccacaccccgtttagttacagctgaactcctccatcttccaaatcaatcaggcccatccatcccatgcctccctcctccccaccccactccaacagttcctctttcccgagtaaggtggttggggtgttgaagtaccaagtaacctacaagcctcctagttctgaaaagttggaagggcatcatgacctcttggcctctcctttgattctcaatcttcccccaaagcatggtttggtgccagccccttcacctccttccagagcccaagatcaatgctcaagttttggaggacatgatcaccatccccatggtactgatgcttgctggatttagggagggcattttgctaccaagcctcttcccaacgccctggggaccagtcttctgttttgtttttcattgtttgacgtttccactgcatgccttgacttcccccacctcctcctcaaacaagagactccactgcatgttccaagacagtatggggtggtaagataaggaagggaagtgtgtggatgtggatggtgggggcatggacaaagcttgacacatcaagttatcaaggccttggaggaggctctgtatgtcctcaggggactgacaacatcctccagattccagccataaaccaataactaggctggacccttcccactacataatagggctcagcccaggcagccagctttgggctgagctaacaggaccaatggattaaactggcatttcagtccaaggaagctcgaagcaggtttaggaccaggtccccttgagaggtcagaggggcctctgtgggtgctgggtactccagaggtgccactggtggaagggtcagcggagccccagcaggaagggtgggccagccaggccattcttagtccctgggttggggaggcagggagctagggcagggaccaaatgaacagaaagtctcagcccaggatggggcttcttcaacagggcccctgccctcctgaagcctcagtccttcaccttgccaggtgccgtttctcttccgtgaaggccactgcccaggtccccagtgcgccccctagtggccatagcctggttaaagttccccagtgcctccttgtgcatagaccttcttctcccacccccttctgcccctgggtccccggccatccagcggggctgccagagaaccccagacctgcccttacagtagtgtagcgccccctccctctttcggctggtgtagaatagccagtagtgtagtgcggtgtgcttttacgtgatggcgggtgggcagcgggcggcgggctccgcgcagccgtctgtccttgatctgcccgcggcggcccgtgttgtgttttgtgctgtgtccacgcgctaaggcgaccccctcccccgtactgacttctcctataagcgcttctcttcgcatagtcacgtagctcccaccccaccctcttcctgtgtctcacgcaagttttatactctaatatttatatggctttttttcttcgacaaaaaaataataaaacgtttcttctgaaaagctg

SEQ ID NO: 172176 - DNA, 4543 bp, Homo sapiens
  Payload ID: 13846
  Gene Symbol: PCDHGA2
  Gene Name: protocadherin gamma subfamily A, 2
  Uniprot ID: Q9Y5H1
  ENST ID: ENST00000528330
  CDS Start-End: 213-2684
aatccagcaatacggctcccacagcacaagggggtggaggtttggccctaaagcttcaggacaccaaagaaattcagtcgaacagcccaccagttctctccatagggacctgggtcccgtgaatgctggttatctcacaccctgaggaataaagattggaatccgcactggatgctggaagttgactcggagaaaattgcgacaggagggaaatggcggctctgcaaaagttgccacactgcagaaagctggtcctgctgtgcttccttttggcgaccctgtgggaggccagggccgggcagattcgctattctgtgcgggaagagatcgacagaggctccttcgtaggcaacatcgccaaggacttgggtttggagcccctggcactggcagagcagggagtccgcatcgtctccagaggtaggtcccagctctttgctctgaacccgcgaagcggcagcttggtcactgcgaacaggatagaccgggaggagctctgcgctcagagcgcaccctgtctgttgaattttaacattctgctggaggataaattgactatttattcagtagaggtggaaataacagatattaacgataatgcccctcgctttggagtagaggaactggagctaaaaatcagtgaaaccactacgccaggattccggattcctcttaagaatgcgcatgatgcagacgtaggtgagaacgcccttcagaagtacgcactcaacccaaatgaccacttctccctggacgtgcgaaggggagctgatgggaacaagtacccagaactggtgctggagcgctctctggaccgcgaggaagaggctgttcaccacctcgttctcgtggcttctgatgggggtgacccagtgctatctggcacctcccgcatctgcgtgaaggtcctggatgcgaacgacaatgcgcctgtttttacacagcccgagtaccgcataagcattccggagaatacgctcgtgggcacccggatactcacggtgaccgccactgacgcagatgagggctactacgctcaagtggtatattttctagagaaaagccctggagaaacctcagaggtatttgagcttaagtcaacatctggagaactgacaatcataaaagatctagattatgaggatgctacattccatgaaattgatattgaagctcaggatggtccgggccttctaaccagagcgaaggttatcgtcacggttctggatgtgaatgacaatgccccagaattttacatgacatctgctactagctcagtttctgaagactctcttccaggaaccataattgggctttttaatgtacatgatagagactctgggcagaacgcattcaccacctgttcactccccgaggatcttccttttaagttagaaaagtcagtagacaattactaccgactggttacaaccagagcccttgacagggaacagttttccttttacaacatcactctaaccgctaaagatggagggaacccctccctgtccacggatgctcacattttgctccaggtggcagacatcaacgacaacgcacccgccttctcccgcacatcctactccacctacattcccgaaaacaaccccagaggagcctctgtcttctcagtgacggcccatgaccccgacagcaacgacaatgctcatgtaacttactctttcgcggaggacactgttcagggggcacccttatcctcttacatctctatcaactccgacactggagtactctatgcactgcgctcctttgattatgagcagttgcgagacttgcaagtgtgggtgatagcgcgggacagcgggaaccctccactcagtagcaatgtatcattaagcctgttcgtgctggaccagaacgacaacgcgcccgagatcctgtaccctgccttccccacagacggttccactggcgtggagctggcgccccgctccgcagagcccggctacctggtgaccaaggtggtggcggtggacagagactcgggccagaacgcctggctgtcttaccacctgctcaaggccagcgagccgggactcttctcggtgggtctgcacacgggcgaggtgcgcacggcgcgagccctgctggacagagacgcgctcaagcagagcctcgtggtggccatccaggaccacggccagccccctctctccgccactgtcacgctcaccgtggccgtggccgacaggatccccgacatcctggccgacctgggcagcctcgagccctccgccatacccaacgattcggacctcactctgtacctggtggtggcggtggccgcggtctcctgcgtcttcctggccttcgtcatcgtgttgctggcgcacaggctgcggcgctggcacaagtcacgcctgctgcaggcttcaggaggcagcttgacaggcatgcagagctcgcactttgtgggcgtggacggggttcgggctttcctgcagacctattcccacgaggtctccctcactgcggactcgcggaagagccacctgattttcccccagcccaactatgcggacacgctcatcagccaggagagctgtgagaaaaaggattttttatcagcgcctcaatctctactcgaagaagaaagagaagaaacgttttctcaggtaatctatcttttcacaacatacgtactagctagtttgctgaagtaattcacttacttgtttactatatctattttgttccccatatttccttgagggtagagtcaagttttaggaagtgagtcttggtgaattatttcttggtaggtcttagtgttcacaggctgtaagaggaagaagagacgtgagaatctttgtgcaatgaatgtaaaccaggagttaatagataagattatccaaagagcactgcattaggaactagggtgtctggtttcttatactttcttctccatccctgggcaaatcatctcatccacccagatcaacaattttttctttgttaaaaatataaagattggagtttatgtttactcaagtcctttcttcttttaagttatgactcttactctatatttgaatctgtatatgaacagtgaaacatgttagttggctagttctttctcattcagtcttaatacatttctttcagtttggcagcaaaattgttttccttaacttgcatgcccttccctgttaaaaatatggaaatttagaaatatacattccttacagtgtttcaggaaggtatgtcatattattttggcttagttttaaaaatcacattaacctctaagctatatgcttcttgaagaagtgactgacttatcatctgctctataataaagctgtagagtggtaataaacaggtttctcctttttttttatctttctcatacgtgggaaccatactgtattttaatctttaaaataatatatatcctcaatatagttttgcttaaagaaaagatacaaaagattcatatcatacaattgcccagaaccaacttctttatacatctctcttctcaaggtttctactcacaatagctgctagaaatgttcccaatccctcacccaatcccagtgcccctctgatcaattttcttttcccattcctcttcctatattggcttttagtatgttggttatgtatttaataacagagaataataagcacactaatgttctatgtaactggcatcattttttatttttatttgaaaattatcatgtaccaattgagccttttattgaatgataccatatttctcaaagtgctgtgattctttccgttgcatttgatcaagaaaaaattttctgagacaaggtgttgttttggttactattacataattgtctatgagtaaaattggaactcactgtggaataatatgtcataatagctttacttgtaagtgaataataaagtataaacaggaaaattaaagcaaagttatttttagtgtgtgtagtaactccacaagaataaatgtcttatgcatagatatgtaatgcatcatgattgaaacgacaaatatattgtatttatatttctgtgcttggaaacttatggggaaagagattctggaacataaaagcttatttctactagtttcagttggttttgaaaaaacatccttacagtctagatttaaacaaaggaaacttctttcagtaccctgaaggtctgtgatttctctctcacacctaggcattgtcatgctgttctctcccacatccaggccttttcactgatccactcctctcatgtttcctgggaaagcgtttgctaacattaaaggcccaattgaaggcccccctaacccccttggcttctcccattatggtaattatctcagtacactgcaattccctgtttgcttttatatccttataatctctgtgaaggaagctactgtgtctatattgttcaccttaaatccccaaacatattgtctgatgcctaattatgtgtttgtttaatgaatattaaataacaacaaatatcgaaactaagttatcaggtcaccaagaacaaacttaaagaaatataatgtataaatatg

SEQ ID NO: 172177 - DNA, 4771 bp, Homo sapiens
  Payload ID: 13847
  Gene Symbol: PCDHGA3
  Gene Name: protocadherin gamma subfamily A, 3
  Uniprot ID: Q9Y5H0
  ENST ID: ENST00000253812
  CDS Start-End: 167-2965
cagactcagaagatccggggcggctgccaacctcacctcttagtcaaccagctgtttgacctgtgaattaggcccgtaaaagacttcgtttcttgagaaaataagattggagtccgtcgtaggaaactggaaccgaattcagagaaagcgattcaccgaaaaggaaatgaccaattgcctgagtttccgaaatggcagaggactggccctgctgtgcgcgctcctggggacgctgtgcgaaacaggatccggtcagatccgctactcggtgtctgaggagctagataaaggttccttcgtgggcaacatcgctaacgacctggggctagagccccgggagctggcggagcgcggagtccgcatcgtctccagaggtaggacgcagcttttctctctgaatccgcaaagcggcagcttggtcaccgcggagaggatagaccgggaggagctctgcgctcagatcccgctgtgtctggtaaaaattaacattctggttgaggataaattgaaaatttttgaagtagaaatagaaattaaagatattaatgataatgctcctaatttcccaacagaggaattggaaataaaaattggtgaactaacggttcctggaacccgatttccaattaaaactgcttttgacccagatgtaggcattaactccctgcagaactacaagcttagccccaatgactacttctctctggctgtgaatagcgtctctgagggggccaagtatccagagctggtgctggagcgggccctggaccgtgagaaaaaagaaattcaccagcttgtcctggttgcctctgatggtggcgaccctgtccactctggcaacttgcacatccaagtgatagtcctggatgcaaatgacaacccaccaatgtttactcagcctgagtaccgtgtgagtgtttgggagaacgtgcctgtgggtacccggctgctcacggtgaatgccactgaccctgacgagggattcaatgctcaagtgtcttatattctagataaaatgcctgggaaaatcgctgagattttccatcttaactcagtgagtggagaagtatcaatattaaaaagtctagattatgaggatgccatgttctatgaaattaaaattgaagcacaggatggaccaggtcttctttcaagagccaagattctagtcacggttctggatgtgaatgacaatgctccagaaattacaatcacgtctctcacaagctcagtcccagaagagggcaccgttggaagagaaattgctcttatcgacgtgcatgaccgagattctgggcagaatgggcaggttgaagtttttgtcctgggaaatctgccatttaagttagaaaaatcaatagatcaatattaccgcttagtgacggccacatccctggaccgcgaacaaatatcagaatataacattagtctgagagcctcagatgggggaagcccgccactgtccacagaaactcacatcaccctgcatgtgattgacatcaatgacaacccacccaccttccctcatttatcctactccgcctacattccagaaaacaaccccagaggagcctccatcttctcagtgacagcccaggacccagatagcaacaacaacgcccgcatcacttatgcattgaccgaggacactctccagggggcgcccctgtcctccttcgtctctatcaactccaacactggcgtcctatacgcgctgagatccttcgactacgagcaatttagagacttaaagctactggtgacagccagcgacagcgggaaccctccactcagcagcaacgtgtcgctgaacctgttcgtgctggaccagaacgacaacgcgcccgagatcctgtaccccgccctccccacagacggttccactggcgtggagctggcgcctcgctccgcagagcccggctacctggtgaccaaggtggtggcggtggacagagactcgggccagaacgcctggctgtcctaccgcctgctcaaggccagcgagccgggactcttctcggtgggtctgcacacgggcgaggtgcgcacggcgcgagccctgctggacagagacgcgctcaagcagagcctcgtggtggccgtccaggaccacggccagccccctctctccgccactgtcacgctcaccgtggccgtggccgacaggatccccgacatcctggccgacctgggcagcctcgagccctccgccaaacccaacgattcggacctcactctgtacctggtggtggcggtggccgcggtctcctgcgtcttcctggccttcgtcatcgtgctgctggcgctcaggctgcggcgctggcacaagtcacgcctgctgcaggcttcgggaggcggcttggcgagtacgcccggctcgcactttgtgggcgcggacggggttcgggctttcctgcagacctattcccacgaggtctccctcactgcggactcgcggaagagccacctgattttcccccagcccaactatgcggacacgctcatcagccaggagagctgtgagaaaagcgagcctcttctgataactcaggatttacttgaaatgaaaggagattccaacctacttcagcaagccccgcccaacacggactggcgtttctctcaggcccagagacccggcaccagcggctcccaaaatggcgatgacaccggcacctggcccaacaaccagtttgacacagagatgctgcaagccatgatcttggcgtccgccagtgaagctgctgatgggagctccaccctgggagggggtgccggcaccatgggattgagcgcccgctacggaccccagttcaccctgcagcacgtgcccgactaccgccagaatgtctacatcccaggcagcaatgccacactgaccaacgcagctggcaagcgggatggcaaggccccagcaggtggcaatggcaacaagaagaagtcgggcaagaaggagaagaagtaacatggaggccaggccaagagccacagggcggcctctccccaaccagcccagcttctccttacctgcacccaggcctcagagtttcagggctaacccccagaatactggtaggggccaaggccatgctccccttgggaaacagaaacaagtgcccagtcagcacctaccccttcccccccagggggttgaatatgcaaaagcagttccgctgggaacccccatccaatcaactgctgtacccatgggggtagtggggttactgtagacaccaagaaccatttgccacaccccgtttagttacagctgaactcctccatcttccaaatcaatcaggcccatccatcccatgcctccctcctccccaccccactccaacagttcctctttcccgagtaaggtggttggggtgttgaagtaccaagtaacctacaagcctcctagttctgaaaagttggaagggcatcatgacctcttggcctctcctttgattctcaatcttcccccaaagcatggtttggtgccagccccttcacctccttccagagcccaagatcaatgctcaagttttggaggacatgatcaccatccccatggtactgatgcttgctggatttagggagggcattttgctaccaagcctcttcccaacgccctggggaccagtcttctgttttgtttttcattgtttgacgtttccactgcatgccttgacttcccccacctcctcctcaaacaagagactccactgcatgttccaagacagtatggggtggtaagataaggaagggaagtgtgtggatgtggatggtgggggcatggacaaagcttgacacatcaagttatcaaggccttggaggaggctctgtatgtcctcaggggactgacaacatcctccagattccagccataaaccaataactaggctggacccttcccactacataatagggctcagcccaggcagccagctttgggctgagctaacaggaccaatggattaaactggcatttcagtccaaggaagctcgaagcaggtttaggaccaggtccccttgagaggtcagaggggcctctgtgggtgctgggtactccagaggtgccactggtggaagggtcagcggagccccagcaggaagggtgggccagccaggccattcttagtccctgggttggggaggcagggagctagggcagggaccaaatgaacagaaagtctcagcccaggatggggcttcttcaacagggcccctgccctcctgaagcctcagtccttcaccttgccaggtgccgtttctcttccgtgaaggccactgcccaggtccccagtgcgccccctagtggccatagcctggttaaagttccccagtgcctccttgtgcatagaccttcttctcccacccccttctgcccctgggtccccggccatccagcggggctgccagagaaccccagacctgcccttacagtagtgtagcgccccctccctctttcggctggtgtagaatagccagtagtgtagtgcggtgtgcttttacgtgatggcgggtgggcagcgggcggcgggctccgcgcagccgtctgtccttgatctgcccgcggcggcccgtgttgtgttttgtgctgtgtccacgcgctaaggcgaccccctcccccgtactgacttctcctataagcgcttctcttcgcatagtcacgtagctcccaccccaccctcttcctgtgtctcacgcaagttttatactctaatatttatatggctttttttcttcgacaaaaaaataataaaacgtttcttctgaaaagctg

SEQ ID NO: 172178 - DNA, 2695 bp, Homo sapiens
  Payload ID: 13847
  Gene Symbol: PCDHGA3
  Gene Name: protocadherin gamma subfamily A, 3
  Uniprot ID: Q9Y5H0
  ENST ID: ENST00000619750
  CDS Start-End: 206-2695
accatttccttgctcctaaaatgcaaagaaccagcaaatcagactcagaagatccggggcggctgccaacctcacctcttagtcaaccagctgtttgacctgtgaattaggcccgtaaaagacttcgtttcttgagaaaataagattggagtccgtcgtaggaaactggaaccgaattcagagaaagcgattcaccgaaaaggaaatgaccaattgcctgagtttccgaaatggcagaggactggccctgctgtgcgcgctcctggggacgctgtgcgaaacaggatccggtcagatccgctactcggtgtctgaggagctagataaaggttccttcgtgggcaacatcgctaacgacctggggctagagccccgggagctggcggagcgcggagtccgcatcgtctccagaggtaggacgcagcttttctctctgaatccgcaaagcggcagcttggtcaccgcggagaggatagaccgggaggagctctgcgctcagatcccgctgtgtctggtaaaaattaacattctggttgaggataaattgaaaatttttgaagtagaaatagaaattaaagatattaatgataatgctcctaatttcccaacagaggaattggaaataaaaattggtgaactaacggttcctggaacccgatttccaattaaaactgcttttgacccagatgtaggcattaactccctgcagaactacaagcttagccccaatgactacttctctctggctgtgaatagcgtctctgagggggccaagtatccagagctggtgctggagcgggccctggaccgtgagaaaaaagaaattcaccagcttgtcctggttgcctctgatggtggcgaccctgtccactctggcaacttgcacatccaagtgatagtcctggatgcaaatgacaacccaccaatgtttactcagcctgagtaccgtgtgagtgtttgggagaacgtgcctgtgggtacccggctgctcacggtgaatgccactgaccctgacgagggattcaatgctcaagtgtcttatattctagataaaatgcctgggaaaatcgctgagattttccatcttaactcagtgagtggagaagtatcaatattaaaaagtctagattatgaggatgccatgttctatgaaattaaaattgaagcacaggatggaccaggtcttctttcaagagccaagattctagtcacggttctggatgtgaatgacaatgctccagaaattacaatcacgtctctcacaagctcagtcccagaagagggcaccgttggaagagaaattgctcttatcgacgtgcatgaccgagattctgggcagaatgggcaggttgaagtttttgtcctgggaaatctgccatttaagttagaaaaatcaatagatcaatattaccgcttagtgacggccacatccctggaccgcgaacaaatatcagaatataacattagtctgagagcctcagatgggggaagcccgccactgtccacagaaactcacatcaccctgcatgtgattgacatcaatgacaacccacccaccttccctcatttatcctactccgcctacattccagaaaacaaccccagaggagcctccatcttctcagtgacagcccaggacccagatagcaacaacaacgcccgcatcacttatgcattgaccgaggacactctccagggggcgcccctgtcctccttcgtctctatcaactccaacactggcgtcctatacgcgctgagatccttcgactacgagcaatttagagacttaaagctactggtgacagccagcgacagcgggaaccctccactcagcagcaacgtgtcgctgaacctgttcgtgctggaccagaacgacaacgcgcccgagatcctgtaccccgccctccccacagacggttccactggcgtggagctggcgcctcgctccgcagagcccggctacctggtgaccaaggtggtggcggtggacagagactcgggccagaacgcctggctgtcctaccgcctgctcaaggccagcgagccgggactcttctcggtgggtctgcacacgggcgaggtgcgcacggcgcgagccctgctggacagagacgcgctcaagcagagcctcgtggtggccgtccaggaccacggccagccccctctctccgccactgtcacgctcaccgtggccgtggccgacaggatccccgacatcctggccgacctgggcagcctcgagccctccgccaaacccaacgattcggacctcactctgtacctggtggtggcggtggccgcggtctcctgcgtcttcctggccttcgtcatcgtgctgctggcgctcaggctgcggcgctggcacaagtcacgcctgctgcaggcttcgggaggcggcttggcgagtacgcccggctcgcactttgtgggcgcggacggggttcgggctttcctgcagacctattcccacgaggtctccctcactgcggactcgcggaagagccacctgattttcccccagcccaactatgcggacacgctcatcagccaggagagctgtgagaaaagcgagcctcttctgataactcaggatttacttgaaatgaaaggagattccaacctacttcaggtgagtttatttatttctttgattattaagaacaaatatgagaatgtggttattataaagctttaa

SEQ ID NO: 172179 - DNA, 2712 bp, Homo sapiens
  Payload ID: 13847
  Gene Symbol: PCDHGA3
  Gene Name: protocadherin gamma subfamily A, 3
  ENST ID: ENST00000612467
  CDS Start-End: 1-324
atgaccaattgcctgagtttccgaaatggcagaggactggccctgctgtgcgcgctcctggggacgctgtgcgaaacaggatccggtcagatccgctactcggtgtctgaggagctagataaaggttccttcgtgggcaacatcgctaacgacctggggctagagccccgggagctggcggagcgcggagtccgcatcgtctccagaggtaggacgcagcttttctctctgaatccgcaaagcggcagcttggtcaccgcggagaggatagaccgggaggagctctgcgctcagatcccgctgtgtctgaggaattggaaataaaaattggtgaactaacggttcctggaacccgatttccaattaaaactgcttttgacccagatgtaggcattaactccctgcagaactacaagcttagccccaatgactacttctctctggctgtgaatagcgtctctgagggggccaagtatccagagctggtgctggagcgggccctggaccgtgagaaaaaagaaattcaccagcttgtcctggttgcctctgatggtggcgaccctgtccactctggcaacttgcacatccaagtgatagtcctggatgcaaatgacaacccaccaatgtttactcagcctgagtaccgtgtgagtgtttgggagaacgtgcctgtgggtacccggctgctcacggtgaatgccactgaccctgacgagggattcaatgctcaagtgtcttatattctagataaaatgcctgggaaaatcgctgagattttccatcttaactcagtgagtggagaagtatcaatattaaaaagtctagattatgaggatgccatgttctatgaaattaaaattgaagcacaggatggaccaggtcttctttcaagagccaagattctagtcacggttctggatgtgaatgacaatgctccagaaattacaatcacgtctctcacaagctcagtcccagaagagggcaccgttggaagagaaattgctcttatcgacgtgcatgaccgagattctgggcagaatgggcaggttgaagtttttgtcctgggaaatctgccatttaagttagaaaaatcaatagatcaatattaccgcttagtgacggccacatccctggaccgcgaacaaatatcagaatataacattagtctgagagcctcagatgggggaagcccgccactgtccacagaaactcacatcaccctgcatgtgattgacatcaatgacaacccacccaccttccctcatttatcctactccgcctacattccagaaaacaaccccagaggagcctccatcttctcagtgacagcccaggacccagatagcaacaacaacgcccgcatcacttatgcattgaccgaggacactctccagggggcgcccctgtcctccttcgtctctatcaactccaacactggcgtcctatacgcgctgagatccttcgactacgagcaatttagagacttaaagctactggtgacagccagcgacagcgggaaccctccactcagcagcaacgtgtcgctgaacctgttcgtgctggaccagaacgacaacgcgcccgagatcctgtaccccgccctccccacagacggttccactggcgtggagctggcgcctcgctccgcagagcccggctacctggtgaccaaggtggtggcggtggacagagactcgggccagaacgcctggctgtcctaccgcctgctcaaggccagcgagccgggactcttctcggtgggtctgcacacgggcgaggtgcgcacggcgcgagccctgctggacagagacgcgctcaagcagagcctcgtggtggccgtccaggaccacggccagccccctctctccgccactgtcacgctcaccgtggccgtggccgacaggatccccgacatcctggccgacctgggcagcctcgagccctccgccaaacccaacgattcggacctcactctgtacctggtggtggcggtggccgcggtctcctgcgtcttcctggccttcgtcatcgtgctgctggcgctcaggctgcggcgctggcacaagtcacgcctgctgcaggcttcgggaggcggcttggcgagtacgcccggctcgcactttgtgggcgcggacggggttcgggctttcctgcagacctattcccacgaggtctccctcactgcggactcgcggaagagccacctgattttcccccagcccaactatgcggacacgctcatcagccaggagagctgtgagaaaagcgagcctcttctgataactcaggatttacttgaaatgaaaggagattccaacctacttcagcaagccccgcccaacacggactggcgtttctctcaggcccagagacccggcaccagcggctcccaaaatggcgatgacaccggcacctggcccaacaaccagtttgacacagagatgctgcaagccatgatcttggcgtccgccagtgaagctgctgatgggagctccaccctgggagggggtgccggcaccatgggattgagcgcccgctacggaccccagttcaccctgcagcacgtgcccgactaccgccagaatgtctacatcccaggcagcaatgccacactgaccaacgcagctggcaagcgggatggcaaggccccagcaggtggcaatggcaacaagaagaagtcgggcaagaaggagaagaagtaacatggaggcc

SEQ ID NO: 172180 - DNA, 4778 bp, Homo sapiens
  Payload ID: 13848
  Gene Symbol: PCDHGA4
  Gene Name: protocadherin gamma subfamily A, 4
  ENST ID: ENST00000571252
  CDS Start-End: 84-2972
tcacaagatttctgcagcacaaagcactggctctggagctttatgaaagcttcaagcggaagccctgagagctctggctgtgaatgcactttattttggacccagaagatcctggggctcctcaggcctcgacagagggaaaaccgaagcacaggcgactccgcggcggggttgtaatggcggcgcctcctgctcgcccagaccacacccggctgctccagatctgccttctcctgggggttctggtggaaatcagggccgaacagattctctactcggtgtttgaggagcaggaagaaggctcagtggtgggcaacatcgccaaggacctggggttggcgccccgggagctggcggagcgcggagtccgcatcgtctccagaggtaggacgcagcttttcgccctgaacccgcgcagcggcaccttggtcaccgcgggtaggatagacagggaggagctctgcgacagatctccaaactgtgtgacaaacctggagattcttctagaagatacagtgaagattttgcgggtagaggtggaaataatcgatgttaatgataacccacccagttttgggacagaacagagggaaataaaagttgctgaaaatgaaaatcctggggcaagatttcctcttcctgaagcttttgatccggatgtaggtgtaaactccctgcagggttaccagctcaactcaaacggttacttttccctggacgtgcaaagtggggccgatgggattaagtacccagagctggtgctggaacgcgctctagatcgcgaggaagaggcggttcaccacctcgttctcacggccttcgatggaggtgacccggttcgctctggcactgccaggattctcataatacttgtggataccaacgataatgctcccgtgttcactcagcccgagtaccacgtaagtgttcgtgagaacgttcctgtaggcactcggctactcaccgtaaaagccactgatccagatgaaggagccaatggagacgtgacgtattctttccggaaagtaagagacaaaatatcacagctatttcagttgaattctctgagtggggatataacaatattggggggtctagattatgaggactctggattctatgacatagatgtagaagcccatgatgggcctggtctccgagctagaagcaaggtactggtgacagttctggatgaaaatgacaacgcaccagaagtcacagttacatctctcaccagctcagtccaggaatcttcttccccgggtacagtaattgcacttttcaacgtgcatgacagtgactcaggaggaaatggcctagtcacatgttctattccagataatctgccattcacacttgaaaagacctatggaaattattatcggttgttgacacacagaacactggacagggaagaagtctcagaatataacatcactgtaactgccactgaccagggaactcctccactgtctacagaaactcatatttcactgcaagtgatggacatcaatgacaacccacccactttccctcatgcttcctactctgcttacattcctgaaaacaaccccagaggagcctccatcttatctatgactgctcaagaccctgacagtggtgacaatgcccgaatcacttactccctggccgaagacaccttccagggtgcacctctgtcctcctatgtctccatcaactccaatacagggatcctatatgctctttgctccttcgactatgagcagtttagagacctgcagctgctgatgacagccagtgacagtggagaccctccactcagcagcaatgtgtcactgagcctctttgtgctggaccagaacgacaatgtccctgagatcctgtaccccaccttccctactgatggctccactggtgtggagctggcaccccgctccgcagattccggctacctggtgaccaaagtggtggcagtggacagagactcaggtcagaatgcctggctgtcctacagcctactcaagtccagcgagccgggactatttgcagtggggctgcacacaggcgaggtgcgcaccgcacgggccctgctggacagagacgcgctcaagcagaggcttgtagtggtcgtccaggaccatggccagccccctctctcggccaccgtcacactcactgtggctgtggccgacagcatcccagatgtcctggctgacttgggcagcctcaagccttcagcagacccagacgactcgggcctcacactctatctcgtggtggcagtggccgctgtctcctgcgtcttcctggcttttgtcacggtgctgctagcactcaagctgagacgctggcacaagtcacgcctgcttcacgctgaaggcagcaggttggcaggtgtgcctgcctcgcactttgtgggcgtggacggggttcgggctttcctgcagacctattcccacgaggtctccctcaccgcggactcgcggaagagtcacctgatcttctcccaacccagctatgcagacacgctcatcagccgggagagttgtgagaaaagcgagcctcttctgataactcaggatttacttgaaacaaaaggagaccctaatcttcagcaagccccgcccaacacggactggcgtttctctcaggcccagagacccggcaccagcggctcccaaaatggcgatgacaccggcacctggcccaacaaccagtttgacacagagatgctgcaagccatgatcttggcgtccgccagtgaagctgctgatgggagctccaccctgggagggggtgccggcaccatgggattgagcgcccgctacggaccccagttcaccctgcagcacgtgcccgactaccgccagaatgtctacatcccaggcagcaatgccacactgaccaacgcagctggcaagcgggatggcaaggccccagcaggtggcaatggcaacaagaagaagtcgggcaagaaggagaagaagtaacatggaggccaggccaagagccacagggcggcctctccccaaccagcccagcttctccttacctgcacccaggcctcagagtttcagggctaacccccagaatactggtaggggccaaggccatgctccccttgggaaacagaaacaagtgcccagtcagcacctaccccttcccccccagggggttgaatatgcaaaagcagttccgctgggaacccccatccaatcaactgctgtacccatgggggtagtggggttactgtagacaccaagaaccatttgccacaccccgtttagttacagctgaactcctccatcttccaaatcaatcaggcccatccatcccatgcctccctcctccccaccccactccaacagttcctctttcccgagtaaggtggttggggtgttgaagtaccaagtaacctacaagcctcctagttctgaaaagttggaagggcatcatgacctcttggcctctcctttgattctcaatcttcccccaaagcatggtttggtgccagccccttcacctccttccagagcccaagatcaatgctcaagttttggaggacatgatcaccatccccatggtactgatgcttgctggatttagggagggcattttgctaccaagcctcttcccaacgccctggggaccagtcttctgttttgtttttcattgtttgacgtttccactgcatgccttgacttcccccacctcctcctcaaacaagagactccactgcatgttccaagacagtatggggtggtaagataaggaagggaagtgtgtggatgtggatggtgggggcatggacaaagcttgacacatcaagttatcaaggccttggaggaggctctgtatgtcctcaggggactgacaacatcctccagattccagccataaaccaataactaggctggacccttcccactacataatagggctcagcccaggcagccagctttgggctgagctaacaggaccaatggattaaactggcatttcagtccaaggaagctcgaagcaggtttaggaccaggtccccttgagaggtcagaggggcctctgtgggtgctgggtactccagaggtgccactggtggaagggtcagcggagccccagcaggaagggtgggccagccaggccattcttagtccctgggttggggaggcagggagctagggcagggaccaaatgaacagaaagtctcagcccaggatggggcttcttcaacagggcccctgccctcctgaagcctcagtccttcaccttgccaggtgccgtttctcttccgtgaaggccactgcccaggtccccagtgcgccccctagtggccatagcctggttaaagttccccagtgcctccttgtgcatagaccttcttctcccacccccttctgcccctgggtccccggccatccagcggggctgccagagaaccccagacctgcccttacagtagtgtagcgccccctccctctttcggctggtgtagaatagccagtagtgtagtgcggtgtgcttttacgtgatggcgggtgggcagcgggcggcgggctccgcgcagccgtctgtccttgatctgcccgcggcggcccgtgttgtgttttgtgctgtgtccacgcgctaaggcgaccccctcccccgtactgacttctcctataagcgcttctcttcgcatagtcacgtagctcccaccccaccctcttcctgtgtctcacgcaagttttatactctaatatttatatggctttttttcttcgacaaaaaaataataaaacgtttcttctgaaaagctg

SEQ ID NO: 172181 - DNA, 2691 bp, Homo sapiens
  Payload ID: 13848
  Gene Symbol: PCDHGA4
  Gene Name: protocadherin gamma subfamily A, 4
  ENST ID: ENST00000612927
  CDS Start-End: 69-2624
agcacaaagcactggctctggagctttatgaaagcttcaagcggaagccctgagagctctggctgtgaatgcactttattttggacccagaagatcctggggctcctcaggcctcgacagagggaaaaccgaagcacaggcgactccgcggcggggttgtaatggcggcgcctcctgctcgcccagaccacacccggctgctccagatctgccttctcctgggggttctggtggaaatcagggccgaacagattctctactcggtgtttgaggagcaggaagaaggctcagtggtgggcaacatcgccaaggacctggggttggcgccccgggagctggcggagcgcggagtccgcatcgtctccagaggtaggacgcagcttttcgccctgaacccgcgcagcggcaccttggtcaccgcgggtaggatagacagggaggagctctgcgacagatctccaaactgtgtgacaaacctggagattcttctagaagatacagtgaagattttgcgggtagaggtggaaataatcgatgttaatgataacccacccagttttgggacagaacagagggaaataaaagttgctgaaaatgaaaatcctggggcaagatttcctcttcctgaagcttttgatccggatgtaggtgtaaactccctgcagggttaccagctcaactcaaacggttacttttccctggacgtgcaaagtggggccgatgggattaagtacccagagctggtgctggaacgcgctctagatcgcgaggaagaggcggttcaccacctcgttctcacggccttcgatggaggtgacccggttcgctctggcactgccaggattctcataatacttgtggataccaacgataatgctcccgtgttcactcagcccgagtaccacgtaagtgttcgtgagaacgttcctgtaggcactcggctactcaccgtaaaagccactgatccagatgaaggagccaatggagacgtgacgtattctttccggaaagtaagagacaaaatatcacagctatttcagttgaattctctgagtggggatataacaatattggggggtctagattatgaggactctggattctatgacatagatgtagaagcccatgatgggcctggtctccgagctagaagcaaggtactggtgacagttctggatgaaaatgacaacgcaccagaagtcacagttacatctctcaccagctcagtccaggaatcttcttccccgggtacagtaattgcacttttcaacgtgcatgacagtgactcaggaggaaatggcctagtcacatgttctattccagataatctgccattcacacttgaaaagacctatggaaattattatcggttgttgacacacagaacactggacagggaagaagtctcagaatataacatcactgtaactgccactgaccagggaactcctccactgtctacagaaactcatatttcactgcaagtgatggacatcaatgacaacccacccactttccctcatgcttcctactctgcttacattcctgaaaacaaccccagaggagcctccatcttatctatgactgctcaagaccctgacagtggtgacaatgcccgaatcacttactccctggccgaagacaccttccagggtgcacctctgtcctcctatgtctccatcaactccaatacagggatcctatatgctctttgctccttcgactatgagcagtttagagacctgcagctgctgatgacagccagtgacagtggagaccctccactcagcagcaatgtgtcactgagcctctttgtgctggaccagaacgacaatgtccctgagatcctgtaccccaccttccctactgatggctccactggtgtggagctggcaccccgctccgcagattccggctacctggtgaccaaagtggtggcagtggacagagactcaggtcagaatgcctggctgtcctacagcctactcaagtccagcgagccgggactatttgcagtggggctgcacacaggcgaggtgcgcaccgcacgggccctgctggacagagacgcgctcaagcagaggcttgtagtggtcgtccaggaccatggccagccccctctctcggccaccgtcacactcactgtggctgtggccgacagcatcccagatgtcctggctgacttgggcagcctcaagccttcagcagacccagacgactcgggcctcacactctatctcgtggtggcagtggccgctgtctcctgcgtcttcctggcttttgtcacggtgctgctagcactcaagctgagacgctggcacaagtcacgcctgcttcacgctgaaggcagcaggttggcaggtgtgcctgcctcgcactttgtgggcgtggacggggttcgggctttcctgcagacctattcccacgaggtctccctcaccgcggactcgcggaagagtcacctgatcttctcccaacccagctatgcagacacgctcatcagccgggagagttgtgagaaaagcgagcctcttctgataactcaggatttacttgaaacaaaaggagaccctaatcttcaggtgagtcaatcttataatagatcataccacactgaaatatagacaaagagttgtgtaaatgtctctcattttatatgtaatatatcaaataaagttgcctcttttaata

SEQ ID NO: 172182 - DNA, 4602 bp, Homo sapiens
  Payload ID: 13849
  Gene Symbol: PCDHGA5
  Gene Name: protocadherin gamma subfamily A, 5
  Uniprot ID: Q9Y5G8
  ENST ID: ENST00000518069
  CDS Start-End: 1-2796
atggcgagtccacctaggggctggggctgcggagagctgctgctgcccttcatgctcctggggacgctgtgcgagccaggatccgggcagatccgctactcgatgccggaggagctggacaaaggctccttcgtcggcaacatagccaaggaccttgggctggagccccaggagctggcggagcgcggagtccgcatcgtctccagaggtaggacgcagctttttgccctgaacccgcgaagcggcagcttggtcaccgcgggcaggatagaccgggaggagctctgcgctcagagcccactgtgtgtggtgaactttaacatcttggttgagaacaaaatgaaaatttatggagtagaagtagaaataatcgatattaatgataacttcccgcgtttccgggatgaagagttaaaagtaaaagttaatgaaaatgcggctgcagggacacggttagtgcttcccttcgcgcgggatgcggatgtgggtgtgaactctctccggagttaccagctcagctccaatctgcacttctctctggatgtggtaagcggaactgatggacaaaagtatccggagctggtgttggaacagcccctagaccgcgagaaagagactgttcacgacctcctcctcacagctttagatggcggagacccggtactctccggcaccacgcacatccgtgttacggtcctcgacgcaaacgacaatgcgcccctgttcaccccatccgagtacagcgtgagtgttccagagaacatacctgtgggcactcggctgctcatgctaaccgccacggatccagatgagggaataaacgggaaattgacctactcttttcgcaatgaagaagaaaaaatttcggagactttccaacttgattccaacctgggggaaatctcaactctacaatcactggactatgaagaatccagattctacctcatggaagtggtagctcaggatggaggcgctcttgttgccagcgctaaggtggtggtcacagtacaggacgtgaatgacaatgcccccgaagtgatcctcacctctctgaccagttcgatctctgaagactgtcttcccggaactgtaatcgcgctgtttagcgtacatgatggtgattctggagaaaatggtgagattgcatgctctattcctaggaatttgccttttaaattggagaagtcagttgataattactatcacctattaacaactagggacctggacagagaagagacttcagattataatatcactttaaccgtcatggaccatggaaccccgcccctctctacagaaagccacatccccttgaaagtagcagacgttaatgacaacccacccaatttccctcaagcctcctactccacctctgtcacagaaaacaatcccagaggtgtctctatcttctctgtgacagcccatgaccccgacagcggcgacaacgctcgagtcacctactccctggctgaagacacatttcagggggcgcccttgtcctcctatgtatccattaactctgacaccggtgtcctgtatgctctgagatccttcgactatgagcagttgagagacctacagttgtgggtgacagccagcgacagtgggaaccctccacttagcagcaacgtgtcgctgagcctgtttgtgctggaccagaacgacaatacgcctgagatcctgtaccccgccctccccacagacggttccacgggcgtggagctggcgcctcgctccgcagaacctggctacctggtgaccaaggtggtagcggtggacaaagattcaggccagaacgcctggctgtcctaccgcctgcttaaggccagcgagccaggactctttgcggttgggctgcacacgggcgaggtgcgcacagcgcgagccctgctggacagagacgcgctcaagcagagcctcgtggtggccgtcgaagaccatggccagccccctctgtcagccaccttcacggtcaccgttgccgtggccgacaggatccctgacatcctggctgacctaggcagtatcaagacccccattgaccctgaggatctggacctcacactctatcttgtggtggcagtggctgcagtctcctgcgtcttcctggccttcgtcatcgtgctgctggtgctcagactgaggcgctggcacaagtcacgcctgcttcaggctgaaggcagcaggttggcgggtgtgcccgcctcgcactttgtgggcgtggatggggttcgggctttcctgcagacctattcccacgaggtctccctcaccgcggactcgaggaagagtcacctgatctttccccagcccaactacgcagacacgctccttagtgaagagagctgtgagaaaagcgagcctcttctgatgtctgataaggtagatgcaaacaaagaagaacggcgagttcagcaagccccgcccaacacggactggcgtttctctcaggcccagagacccggcaccagcggctcccaaaatggcgatgacaccggcacctggcccaacaaccagtttgacacagagatgctgcaagccatgatcttggcgtccgccagtgaagctgctgatgggagctccaccctgggagggggtgccggcaccatgggattgagcgcccgctacggaccccagttcaccctgcagcacgtgcccgactaccgccagaatgtctacatcccaggcagcaatgccacactgaccaacgcagctggcaagcgggatggcaaggccccagcaggtggcaatggcaacaagaagaagtcgggcaagaaggagaagaagtaacatggaggccaggccaagagccacagggcggcctctccccaaccagcccagcttctccttacctgcacccaggcctcagagtttcagggctaacccccagaatactggtaggggccaaggccatgctccccttgggaaacagaaacaagtgcccagtcagcacctaccccttcccccccagggggttgaatatgcaaaagcagttccgctgggaacccccatccaatcaactgctgtacccatgggggtagtggggttactgtagacaccaagaaccatttgccacaccccgtttagttacagctgaactcctccatcttccaaatcaatcaggcccatccatcccatgcctccctcctccccaccccactccaacagttcctctttcccgagtaaggtggttggggtgttgaagtaccaagtaacctacaagcctcctagttctgaaaagttggaagggcatcatgacctcttggcctctcctttgattctcaatcttcccccaaagcatggtttggtgccagccccttcacctccttccagagcccaagatcaatgctcaagttttggaggacatgatcaccatccccatggtactgatgcttgctggatttagggagggcattttgctaccaagcctcttcccaacgccctggggaccagtcttctgttttgtttttcattgtttgacgtttccactgcatgccttgacttcccccacctcctcctcaaacaagagactccactgcatgttccaagacagtatggggtggtaagataaggaagggaagtgtgtggatgtggatggtgggggcatggacaaagcttgacacatcaagttatcaaggccttggaggaggctctgtatgtcctcaggggactgacaacatcctccagattccagccataaaccaataactaggctggacccttcccactacataatagggctcagcccaggcagccagctttgggctgagctaacaggaccaatggattaaactggcatttcagtccaaggaagctcgaagcaggtttaggaccaggtccccttgagaggtcagaggggcctctgtgggtgctgggtactccagaggtgccactggtggaagggtcagcggagccccagcaggaagggtgggccagccaggccattcttagtccctgggttggggaggcagggagctagggcagggaccaaatgaacagaaagtctcagcccaggatggggcttcttcaacagggcccctgccctcctgaagcctcagtccttcaccttgccaggtgccgtttctcttccgtgaaggccactgcccaggtccccagtgcgccccctagtggccatagcctggttaaagttccccagtgcctccttgtgcatagaccttcttctcccacccccttctgcccctgggtccccggccatccagcggggctgccagagaaccccagacctgcccttacagtagtgtagcgccccctccctctttcggctggtgtagaatagccagtagtgtagtgcggtgtgcttttacgtgatggcgggtgggcagcgggcggcgggctccgcgcagccgtctgtccttgatctgcccgcggcggcccgtgttgtgttttgtgctgtgtccacgcgctaaggcgaccccctcccccgtactgacttctcctataagcgcttctcttcgcatagtcacgtagctcccaccccaccctcttcctgtgtctcacgcaagttttatactctaatatttatatggctttttttcttcgacaaaaaaataataaaacgtttcttctgaaaagctg

SEQ ID NO: 172183 - DNA, 3552 bp, Homo sapiens
  Payload ID: 13849
  Gene Symbol: PCDHGA5
  Gene Name: protocadherin gamma subfamily A, 5
  Uniprot ID: Q9Y5G8
  ENST ID: ENST00000611914
  CDS Start-End: 100-2541
gcccattttcgtcagggaatatgtacccatcggctttagataaataaggaaacagcaggctgaaccagaactaagagaaaattgggcagagagaaggcaatggcgagtccacctaggggctggggctgcggagagctgctgctgcccttcatgctcctggggacgctgtgcgagccaggatccgggcagatccgctactcgatgccggaggagctggacaaaggctccttcgtcggcaacatagccaaggaccttgggctggagccccaggagctggcggagcgcggagtccgcatcgtctccagaggtaggacgcagctttttgccctgaacccgcgaagcggcagcttggtcaccgcgggcaggatagaccgggaggagctctgcgctcagagcccactgtgtgtggtgaactttaacatcttggttgagaacaaaatgaaaatttatggagtagaagtagaaataatcgatattaatgataacttcccgcgtttccgggatgaagagttaaaagtaaaagttaatgaaaatgcggctgcagggacacggttagtgcttcccttcgcgcgggatgcggatgtgggtgtgaactctctccggagttaccagctcagctccaatctgcacttctctctggatgtggtaagcggaactgatggacaaaagtatccggagctggtgttggaacagcccctagaccgcgagaaagagactgttcacgacctcctcctcacagctttagatggcggagacccggtactctccggcaccacgcacatccgtgttacggtcctcgacgcaaacgacaatgcgcccctgttcaccccatccgagtacagcgtgagtgttccagagaacatacctgtgggcactcggctgctcatgctaaccgccacggatccagatgagggaataaacgggaaattgacctactcttttcgcaatgaagaagaaaaaatttcggagactttccaacttgattccaacctgggggaaatctcaactctacaatcactggactatgaagaatccagattctacctcatggaagtggtagctcaggatggaggcgctcttgttgccagcgctaaggtggtggtcacagtacaggacgtgaatgacaatgcccccgaagtgatcctcacctctctgaccagttcgatctctgaagactgtcttcccggaactgtaatcgcgctgtttagcgtacatgatggtgattctggagaaaatggtgagattgcatgctctattcctaggaatttgccttttaaattggagaagtcagttgataattactatcacctattaacaactagggacctggacagagaagagacttcagattataatatcactttaaccgtcatggaccatggaaccccgcccctctctacagaaagccacatccccttgaaagtagcagacgttaatgacaacccacccaatttccctcaagcctcctactccacctctgtcacagaaaacaatcccagaggtgtctctatcttctctgtgacagcccatgaccccgacagcggcgacaacgctcgagtcacctactccctggctgaagacacatttcagggggcgcccttgtcctcctatgtatccattaactctgacaccggtgtcctgtatgctctgagatccttcgactatgagcagttgagagacctacagttgtgggtgacagccagcgacagtgggaaccctccacttagcagcaacgtgtcgctgagcctgtttgtgctggaccagaacgacaatacgcctgagatcctgtaccccgccctccccacagacggttccacgggcgtggagctggcgcctcgctccgcagaacctggctacctggtgaccaaggtggtagcggtggacaaagattcaggccagaacgcctggctgtcctaccgcctgcttaaggccagcgagccaggactctttgcggttgggctgcacacgggcgaggtgcgcacagcgcgagccctgctggacagagacgcgctcaagcagagcctcgtggtggccgtcgaagaccatggccagccccctctgtcagccaccttcacggtcaccgttgccgtggccgacaggatccctgacatcctggctgacctaggcagtatcaagacccccattgaccctgaggatctggacctcacactctatcttgtggtggcagtggctgcagtctcctgcgtcttcctggccttcgtcatcgtgctgctggtgctcagactgaggcgctggcacaagtcacgcctgcttcaggctgaaggcagcaggttggcgggtgtgcccgcctcgcactttgtgggcgtggatggggttcgggctttcctgcagacctattcccacgaggtctccctcaccgcggactcgaggaagagtcacctgatctttccccagcccaactacgcagacacgctccttagtgaagagagctgtgagaaaagcgagcctcttctgatgtctgataaggtagatgcaaacaaagaagaacggcgagttcaggttagttttctctttcggtaaggatgaccagaacattttcatttgtttcctttttcatgtttctgtcatattcagaatcagctagttatgtaaatagtggaacattatttgctgtattggagattaattttttttatataattcatgctttctccatttgttttcaaattctgttttgggaagtctagctgatatctgtagacttaagtgaaacaaataccttaaaggaaagtggttaaatataatcattttacccaaatattttgttatattggaactgcagttctattaatagaaaagatgttttatttattcaaattgttagatatattgttctcttttgagtgtctgcctagacaccattagtgaatgtgttttggaaaggataatgtataggactgatattttagtctacctgaaatttgtttaaggaaataatttacagtatttacataaatcagtggaaaggtacagagaacttctgggtcataaatatcagaaaagaggccgggtgcggtggctgacgcctgtaatcccagcactttgggaggctgaggtgggcggatcacgaggtcaggagatcgagaccatcctggctaacacggtgaaaccctgttctactaaaaatacaaaaaattagccgggcgtggtggcaggcgcctgtagtcccagctactcggaaggctgaggcaggagaatggggtgaacccgggaggaggagcttgcagtaagccgagatcgcgccactgcactccagcctgggagacagaacgagactccgtctcaaaataaataaataaataaataaataaataaataaatatcagaaaagtagataaaatttatattaatgataacatgtagcattctaaagtctggaaagtttgtgttaagccatgtagttattggatatgtgggcttgttgagagaagaaatcagtgtaaaggaaccttaaggttgggcttcgttctgtgatgtaaagcctccagagagttacatactgctgcactcaataaatgtaaatatgtcaca

SEQ ID NO: 172184 - DNA, 4775 bp, Homo sapiens
  Payload ID: 13850
  Gene Symbol: PCDHGA6
  Gene Name: protocadherin gamma subfamily A, 6
  Uniprot ID: Q9Y5G7
  ENST ID: ENST00000517434
  CDS Start-End: 171-2969
gcaaattagacgggaaagcaggaaagctgtgcagaaattctgacctgaaacgcttcgcatccggtctctgcttgttgaaggaccttcaccgctatttctgagaagagcaaaagtgatgcagatctgttcttcctcttcttaatcccagagaagttcctaataagccagtaatggcgcctccgcagaggcatccgcagcgcagcgagcaggtcctgctcctcacgctcctggggacgctgtggggggccgcggcagcgcagatccgctactctattcccgaggagctggagaaaggctccttcgtaggcaacatcgtcaaggatctgggactggagccccaggagttggcggagcacggagtccgcatcgtctccagaggtaggatgcagcttttctctctgaatccgcgaaacggcagcttggtcaccgcgggtaggatagaccgcgaggagctctgtgctcagagcccgcggtgtctggtgagttttaacatccttgtcgaggataaactgaatctttatcccgtggaagtggaaatagtggacattaatgacaatacaccccgattcttaaaggaagaattggaagtgaaaattctcgaaaacgcagctccatcctctcgttttccactaatggaggtctatgaccctgatgtgggaatgaactcccttcagggatttaagctcagtggtaatagtcacttctcagtggacgtgcaaagcgaagcccatgggcccaagtacccggagctggtgctggagggcacactggaccgggaaggagaagccgtttaccgcctggtccttactgccatggatggcggcgaccctgtccgctcaagcgtcgcccaaattctggtaacagttctagatgtgaatgacaacactccaatgtttactcagcctgtctaccgtgtaagtgttcctgaaaacctgccagtaggcacaccagtgttggcagtgactgccaccgaccaggatgaaggagtccacggggaagtaacttattcctttgtgaagattacagaaaagatctcacaaattttctgtttgaatgttttgactggagaaatttcaacttctgcaaatctagactatgaggactcgagtttttatgagctgggtgttgaagcccgggatgggccaggtcttcgagacagagcgaaagtcttaataactatcttggatgtcaatgataatgtaccagaagtggttgttacatctggaagcagaacaattgctgaaagtgcacctccaggaacagtaatcgccctttttcaagtgttcgatcgagactctggcctgaatggcctggtaacctgttccatcccgagaagtctcccatttgaattggaaaaatcagttggcaattattatcgattagtgacaaatgcagctctagaccgggaagaggtattcttgtacaacatcactgtgacagccacggacaaaggaacaccacctctgtctacagaaacaatcatctctctaaatgtggcagacaccaacgacaacccgcccaccttcccccattcatcctactcagtctatgtccttgaaaacaaccccaggggtgcctccatcttctctgtgaatgcactggaccctgacgtggaccagaacgcccaagtctcctactcactggcagaagacaccctccagggggcgcccctgtcctcctacgtgtccatcaactccgacactgggattctgtacgccctgcgctccttcgactatgagcagttgagagacctacagctgtgggtgacagccagcgacagcggggacccgcctcttagcagcaacgtgtcactgagcctgtttgtgctggaccagaatgacaatgcgcccgagatcctgtaccccgccctccccacagacggttccactggcgtggagctggcgccccgctccgcagagcccggctacctggtgaccaaggtggtggcggtggacagagactcgggccagaacgcctggctgtcctaccgcctgctcaaggccagcgagccaggacttttctcagtgggcctgcacacgggcgaggtgcgcacggcgcgcgccctgctggacagagacgcgctcaagcagagcctagtggtggccgtccaggaccacggccagccccctctctccgccactgtcacgctcaccgtggccgtggccgacaggatccccgacatcctggccgacctgggcagcctcgagccctccgccaaacccaacgattcggacctcactctgtacctggtggtggcggtggccgcggtctcctgcgtcttcctggccttcgtcatcgtgctgctggcgctcagactgcagcgctggcacaagtcacgcctgctgcaggcttcgggaggtggcttagcgagcatgcccggctcgcactttgtgggcgtggaaggggttcgggctttcctgcagacctattcccacgaggtctcactcactgcagactcgcgtaagagtcatctgattttcccccagcccaactatgccgacacgcttatcaaccaggagagctatgagaaaagcgagcctcttctgataactcaggatttacttgaaacgaaaggagaacccaggcaacttcagcaagccccgcccaacacggactggcgtttctctcaggcccagagacccggcaccagcggctcccaaaatggcgatgacaccggcacctggcccaacaaccagtttgacacagagatgctgcaagccatgatcttggcgtccgccagtgaagctgctgatgggagctccaccctgggagggggtgccggcaccatgggattgagcgcccgctacggaccccagttcaccctgcagcacgtgcccgactaccgccagaatgtctacatcccaggcagcaatgccacactgaccaacgcagctggcaagcgggatggcaaggccccagcaggtggcaatggcaacaagaagaagtcgggcaagaaggagaagaagtaacatggaggccaggccaagagccacagggcggcctctccccaaccagcccagcttctccttacctgcacccaggcctcagagtttcagggctaacccccagaatactggtaggggccaaggccatgctccccttgggaaacagaaacaagtgcccagtcagcacctaccccttcccccccagggggttgaatatgcaaaagcagttccgctgggaacccccatccaatcaactgctgtacccatgggggtagtggggttactgtagacaccaagaaccatttgccacaccccgtttagttacagctgaactcctccatcttccaaatcaatcaggcccatccatcccatgcctccctcctccccaccccactccaacagttcctctttcccgagtaaggtggttggggtgttgaagtaccaagtaacctacaagcctcctagttctgaaaagttggaagggcatcatgacctcttggcctctcctttgattctcaatcttcccccaaagcatggtttggtgccagccccttcacctccttccagagcccaagatcaatgctcaagttttggaggacatgatcaccatccccatggtactgatgcttgctggatttagggagggcattttgctaccaagcctcttcccaacgccctggggaccagtcttctgttttgtttttcattgtttgacgtttccactgcatgccttgacttcccccacctcctcctcaaacaagagactccactgcatgttccaagacagtatggggtggtaagataaggaagggaagtgtgtggatgtggatggtgggggcatggacaaagcttgacacatcaagttatcaaggccttggaggaggctctgtatgtcctcaggggactgacaacatcctccagattccagccataaaccaataactaggctggacccttcccactacataatagggctcagcccaggcagccagctttgggctgagctaacaggaccaatggattaaactggcatttcagtccaaggaagctcgaagcaggtttaggaccaggtccccttgagaggtcagaggggcctctgtgggtgctgggtactccagaggtgccactggtggaagggtcagcggagccccagcaggaagggtgggccagccaggccattcttagtccctgggttggggaggcagggagctagggcagggaccaaatgaacagaaagtctcagcccaggatggggcttcttcaacagggcccctgccctcctgaagcctcagtccttcaccttgccaggtgccgtttctcttccgtgaaggccactgcccaggtccccagtgcgccccctagtggccatagcctggttaaagttccccagtgcctccttgtgcatagaccttcttctcccacccccttctgcccctgggtccccggccatccagcggggctgccagagaaccccagacctgcccttacagtagtgtagcgccccctccctctttcggctggtgtagaatagccagtagtgtagtgcggtgtgcttttacgtgatggcgggtgggcagcgggcggcgggctccgcgcagccgtctgtccttgatctgcccgcggcggcccgtgttgtgttttgtgctgtgtccacgcgctaaggcgaccccctcccccgtactgacttctcctataagcgcttctcttcgcatagtcacgtagctcccaccccaccctcttcctgtgtctcacgcaagttttatactctaatatttatatggctttttttcttcgacaaaaaaataataaaacgtttcttctgaaaagctg

SEQ ID NO: 172185 - DNA, 5650 bp, Homo sapiens
  Payload ID: 13850
  Gene Symbol: PCDHGA6
  Gene Name: protocadherin gamma subfamily A, 6
  Uniprot ID: Q9Y5G7
  ENST ID: ENST00000610583
  CDS Start-End: 92-2548
ggaccttcaccgctatttctgagaagagcaaaagtgatgcagatctgttcttcctcttcttaatcccagagaagttcctaataagccagtaatggcgcctccgcagaggcatccgcagcgcagcgagcaggtcctgctcctcacgctcctggggacgctgtggggggccgcggcagcgcagatccgctactctattcccgaggagctggagaaaggctccttcgtaggcaacatcgtcaaggatctgggactggagccccaggagttggcggagcacggagtccgcatcgtctccagaggtaggatgcagcttttctctctgaatccgcgaaacggcagcttggtcaccgcgggtaggatagaccgcgaggagctctgtgctcagagcccgcggtgtctggtgagttttaacatccttgtcgaggataaactgaatctttatcccgtggaagtggaaatagtggacattaatgacaatacaccccgattcttaaaggaagaattggaagtgaaaattctcgaaaacgcagctccatcctctcgttttccactaatggaggtctatgaccctgatgtgggaatgaactcccttcagggatttaagctcagtggtaatagtcacttctcagtggacgtgcaaagcgaagcccatgggcccaagtacccggagctggtgctggagggcacactggaccgggaaggagaagccgtttaccgcctggtccttactgccatggatggcggcgaccctgtccgctcaagcgtcgcccaaattctggtaacagttctagatgtgaatgacaacactccaatgtttactcagcctgtctaccgtgtaagtgttcctgaaaacctgccagtaggcacaccagtgttggcagtgactgccaccgaccaggatgaaggagtccacggggaagtaacttattcctttgtgaagattacagaaaagatctcacaaattttctgtttgaatgttttgactggagaaatttcaacttctgcaaatctagactatgaggactcgagtttttatgagctgggtgttgaagcccgggatgggccaggtcttcgagacagagcgaaagtcttaataactatcttggatgtcaatgataatgtaccagaagtggttgttacatctggaagcagaacaattgctgaaagtgcacctccaggaacagtaatcgccctttttcaagtgttcgatcgagactctggcctgaatggcctggtaacctgttccatcccgagaagtctcccatttgaattggaaaaatcagttggcaattattatcgattagtgacaaatgcagctctagaccgggaagaggtattcttgtacaacatcactgtgacagccacggacaaaggaacaccacctctgtctacagaaacaatcatctctctaaatgtggcagacaccaacgacaacccgcccaccttcccccattcatcctactcagtctatgtccttgaaaacaaccccaggggtgcctccatcttctctgtgaatgcactggaccctgacgtggaccagaacgcccaagtctcctactcactggcagaagacaccctccagggggcgcccctgtcctcctacgtgtccatcaactccgacactgggattctgtacgccctgcgctccttcgactatgagcagttgagagacctacagctgtgggtgacagccagcgacagcggggacccgcctcttagcagcaacgtgtcactgagcctgtttgtgctggaccagaatgacaatgcgcccgagatcctgtaccccgccctccccacagacggttccactggcgtggagctggcgccccgctccgcagagcccggctacctggtgaccaaggtggtggcggtggacagagactcgggccagaacgcctggctgtcctaccgcctgctcaaggccagcgagccaggacttttctcagtgggcctgcacacgggcgaggtgcgcacggcgcgcgccctgctggacagagacgcgctcaagcagagcctagtggtggccgtccaggaccacggccagccccctctctccgccactgtcacgctcaccgtggccgtggccgacaggatccccgacatcctggccgacctgggcagcctcgagccctccgccaaacccaacgattcggacctcactctgtacctggtggtggcggtggccgcggtctcctgcgtcttcctggccttcgtcatcgtgctgctggcgctcagactgcagcgctggcacaagtcacgcctgctgcaggcttcgggaggtggcttagcgagcatgcccggctcgcactttgtgggcgtggaaggggttcgggctttcctgcagacctattcccacgaggtctcactcactgcagactcgcgtaagagtcatctgattttcccccagcccaactatgccgacacgcttatcaaccaggagagctatgagaaaagcgagcctcttctgataactcaggatttacttgaaacgaaaggagaacccaggcaacttcaggtgagtttctttccgcctaagcgggaagagtaatctgatcttcccgcaacccaactaatcagacaggctcatcagctagatcggctgttatagaagcgaacctcttttggtacaggaagattcgtgattttgtaaagtggaagactcccttgttcaggtgagggtatcgtttttttttttttttttttttgagacggagtctcgctctgtcgcccaggccggactgcggactgcagtggcgcaatctcggctcactgcaagctccgcttcccgggttcacgccattctcctgcctcagcctccctagtagctgggactacaggcgcccgccaccgcgcccggctaatttttttgtatttttagtagagacggggtttcaccttgttagccaggatggtctcgatctcctgacctcatgatccacccgcctcggcctcccaaagtgctgggattacaggcgtgagccaccgcgcccggccgagggtatcgtttttattggttgacaggaaaattcaagattgtctttgattagtgcttagttttcttagccctttgcagagagtcacataattctaatgtttttcttttatatcaaaagaatgttctgaagtcttaattttgtgggggaaaataatgcatgtcctagtttttctttacctttctcttcttggcaaactatttgtgtcttggattgagtacatctcgtttcttaggttttttcctactatgtgacatttgtaaggttctttctttttctaatgtgggaaaaaaaataaccttaatttaggtcagtgttaaagatcaagatcttggttttagctagcatggtggttcacgcctgtaatcccacctcttcaggaggctgaggcaggaggatcccttgagaccaggagtttgagaccagcctgggtgactctgtctctaccaaaaagaaaaaaaagtagccagatgtgtggcgtacacctgtagtcccagctactcgagaagctctgataggaggattgcttaagtccaggggtatgaggctgcagtgagatataattgtgtcactgcaccctagcctgggagacagaatgagactttttctctctctctctcaaaaaaaaaaaaagattttgttttttctcagtgttacttgataactataaacgacagacgttcatacaagagatctttcacctttactacttaggaatcaaaaattatttttgaaaagataagaatcattggtaactgcagcaggggacaccagatctttggtgttaaaagacctgaataacattcctgtaactatctgttatttacttgggccagttacaatcgccattatcttccaattaaaattaagatttaaaagacttctcttatcagagataggatccccctctgttgcccagtctggagtaaaaatccacctgtaactgctgcttatagagtgtgtatccagggcaacttgaatctatgttcctgggttgcaatcctaaagcttggctcaaataagctctacttatattattttttaaaacaagactttccttatctatctgactcaaattctaagaaaataattttataactttttttcaaactctaaagcagcatagtgaacacgtatttgttgacatcaccattattataattattgggttgttaacaataactaagcaccgatgctgtgtgcctactacagtgtcttttgcatactgtgtgcctgatagtatttaagagtgaaaatggccgggtgcggtggctcatgcctgtaatcccaacactttgggaggccaaggcaggcatctcacgaagtcaggagttcgagaccagcctgaccaacatggtgaaaccccgtctctactaaaaatacaaaaattagccaggtggggtggcatgggcctgtaatcgcagctactcgggaggctgaggcaggagaatcgcttgaacccatgaggcagaggttgcagtgagccaagatcgtgccactgcactccagtctgggtgacagagcgagactctgtctcaaaaaataataatgataattaataaataaagagtgaacatgaattttaaaacatgctcggtagtgtctgcttacaggacatatctctaaaaatagatgactgactggtgaatgggagaacaaatgttaatgaggttcaaataaaaatttaaatattttagcattttaacccagacaataaggctttcatcatataggaactctttattgaaatatttcaagaaaaaagggattatcatttagaagactgattagtcttatttattatgactgaaatgtgcaaacagaatcattgtttcatgaacagaaaacagcagagtttttgactgtcaatgatgttcgaatagaaaatggatcactaaggagataggagattctgttatcgacagtcttcaaaagtaagttgatggccctggaatgaatggagtacaggggattctctaatttgatgacttgttgaactacattatagtcaagatttttctccagtcatgagttggaagattctacaatctggtggtattatagaatggattggccacttgtgcatctgaatttgttatgaatgtgtaagaaaaaagcaattgagaagataccttgaaaataaatgagaacctcctttgtaacctgactttgtcagtcttcttaaagataacattgagttgatgtgtttttaaataagctgctaagagtaatatgtgtttttctgaaccaatattgtggtatttacatttaaggaattgttatagatttatttatttcaagtttccaaaggtatatacctaaacaagagatctaatcatacacatcttcaaagctcattttcttgtatctttgtgatataatttgataaaataacaattttaaacaacttgaatcttggatattagtctcatgagttagatgggctgttatacatatgattatttcataaactctgaaagtgtgaatgttattttactatactaccaatttgggatgttaaactacatcttgagcatttgttgttatagggaaagctcactaactacttttcatggagatcaggctggtttattttattctcttattacctgtgaccatttcatttaaacaaataaaatatttctctgatggaaaaa

SEQ ID NO: 172186 - DNA, 4605 bp, Homo sapiens
  Payload ID: 13851
  Gene Symbol: PCDHGA7
  Gene Name: protocadherin gamma subfamily A, 7
  Uniprot ID: Q9Y5G6
  ENST ID: ENST00000518325
  CDS Start-End: 1-2799
atggcggctcagccgaggggcggggactacagaggattcttcctgctctccatcctcctggggaccccctgggaagcctgggcaggacgtattctctactccgtgtcggaggagacggacaaagggtcctttgtgggagacatcgccaaggacctggggctggagccccgggagctggcggagcgcggagtccgcatcatctccagaggtaggacgcagcttttcgccctgaaccagcgcagcggcagcttggtcactgcgggcaggatagaccgggaagagatctgcgctcagagtgcgcggtgtctggtaaactttaacatcctgatggaagataaaatgaatctttaccctatagacgtggaaataatagatattaatgacaacgttccaagattcttgacggaagaaataaatgtaaaaataatggagaatacagctcctggggttcggtttccgttaagcgaggctggggatccagatgtgggcacgaactccctccagagttaccagctcagccccaatcgccacttctccctggctgtgcaaagtggagacgatgaaactaagtacccggaactggtgctggagcgggtgctggaccgggaggaagagcgggttcaccacctggtcctcacagcctctgatggcggcgacccgccccgatccagcaccgcccacatccaggtgacagtggtggatgtgaatgaccacacgcctgtcttctctctgcctcagtaccaagtaactgtccccgagaatgtgccagtgggtacaagactgctcacggtacatgctatcgacctggacgagggagtcaatggggaagtgacatattcttttcggaaaataactcctaaacttccaaagatgtttcatctgaactcgcttacaggagaaatatcaactttagaaggattagattatgaagaaactgccttctatgaaatggaggttcaggctcaagatggtcctggtagtctgacaaaggcaaaagtactgatcacagttttagatgtaaatgataatgctccagaagtgactatgacgtctttaagtagctcaatccctgaagacacacctcttgggacagtcattgctcttttctacctacaagacagagattctggaaagaatggtgaggtgacctgcaccattccagaaaacctaccttttaaattagaaaaatcaatagataattattatagattggtcacaaccaaaaacttggaccgggaaacactctctttgtataacatcacactgaaagccacagatggtggaactcctcccttgtccagggaaactcacatattcatgcaggtggcagacaccaacgataacccacccaccttcccccactcatcctactcagtctacatcgctgagaacaaccccagaggggcctccattttcttagtgactgcacaggaccacgacagtgaggataatgcccagatcacttattccttggccgaagacaccatccagggggctccagtgtcctcctatgtctccataaactctgacactggagtcctgtacgcgctgcaatcctttgattatgagcagttgagagaactacaactaagagtgactgcacatgacagcggggacccgcctctcagcagcaacatgtcactgagcctgttcgtgctggaccagaatgacaacccgcccgagatcctgtacccggccctccccacagatggttctactggcatggagctggcaccccgctccgcagagcccggctacctggtgaccaaggtggtggcggtggacaaagattcaggccagaacgcctggctgtcatacctcctgcttaaggccagcgagccaggactctttgcggttgggctgtacacgggcgaggtgcgcacggctcgggccctgctggacagagatgccctcaagcagagcctcgtggtggccgtccaggaccacggtcagcctcctctgtcagccaccgtcacactcaccgtggctgtggctgacagcatccccgaagtcttggccgacctgggcagccttgagccctccgacggtccttacaactatgacctcacgttgtacctggtggtggcggtggccacagtctcctgcgtcttcctagccttcgtcctcgtactgctggcgctcaggctgcggcgctggcacaagtcacgcctgctgcaggcttcagaaggtggcttggcgaacgtgcccacctcgcactttgtgggcatggacggggtgcaggctttcctgcagacctattcccatgaggtctccctcaccgcggactctcggaagagtcacctgatcttcccccagcccaactatgtagacatgctcatcagccaggagagctgtgagaaaaatgattctttgctaacatccgtagattttcaggaatgtaaagaaaacctgccaagtattcagcaagccccgcccaacacggactggcgtttctctcaggcccagagacccggcaccagcggctcccaaaatggcgatgacaccggcacctggcccaacaaccagtttgacacagagatgctgcaagccatgatcttggcgtccgccagtgaagctgctgatgggagctccaccctgggagggggtgccggcaccatgggattgagcgcccgctacggaccccagttcaccctgcagcacgtgcccgactaccgccagaatgtctacatcccaggcagcaatgccacactgaccaacgcagctggcaagcgggatggcaaggccccagcaggtggcaatggcaacaagaagaagtcgggcaagaaggagaagaagtaacatggaggccaggccaagagccacagggcggcctctccccaaccagcccagcttctccttacctgcacccaggcctcagagtttcagggctaacccccagaatactggtaggggccaaggccatgctccccttgggaaacagaaacaagtgcccagtcagcacctaccccttcccccccagggggttgaatatgcaaaagcagttccgctgggaacccccatccaatcaactgctgtacccatgggggtagtggggttactgtagacaccaagaaccatttgccacaccccgtttagttacagctgaactcctccatcttccaaatcaatcaggcccatccatcccatgcctccctcctccccaccccactccaacagttcctctttcccgagtaaggtggttggggtgttgaagtaccaagtaacctacaagcctcctagttctgaaaagttggaagggcatcatgacctcttggcctctcctttgattctcaatcttcccccaaagcatggtttggtgccagccccttcacctccttccagagcccaagatcaatgctcaagttttggaggacatgatcaccatccccatggtactgatgcttgctggatttagggagggcattttgctaccaagcctcttcccaacgccctggggaccagtcttctgttttgtttttcattgtttgacgtttccactgcatgccttgacttcccccacctcctcctcaaacaagagactccactgcatgttccaagacagtatggggtggtaagataaggaagggaagtgtgtggatgtggatggtgggggcatggacaaagcttgacacatcaagttatcaaggccttggaggaggctctgtatgtcctcaggggactgacaacatcctccagattccagccataaaccaataactaggctggacccttcccactacataatagggctcagcccaggcagccagctttgggctgagctaacaggaccaatggattaaactggcatttcagtccaaggaagctcgaagcaggtttaggaccaggtccccttgagaggtcagaggggcctctgtgggtgctgggtactccagaggtgccactggtggaagggtcagcggagccccagcaggaagggtgggccagccaggccattcttagtccctgggttggggaggcagggagctagggcagggaccaaatgaacagaaagtctcagcccaggatggggcttcttcaacagggcccctgccctcctgaagcctcagtccttcaccttgccaggtgccgtttctcttccgtgaaggccactgcccaggtccccagtgcgccccctagtggccatagcctggttaaagttccccagtgcctccttgtgcatagaccttcttctcccacccccttctgcccctgggtccccggccatccagcggggctgccagagaaccccagacctgcccttacagtagtgtagcgccccctccctctttcggctggtgtagaatagccagtagtgtagtgcggtgtgcttttacgtgatggcgggtgggcagcgggcggcgggctccgcgcagccgtctgtccttgatctgcccgcggcggcccgtgttgtgttttgtgctgtgtccacgcgctaaggcgaccccctcccccgtactgacttctcctataagcgcttctcttcgcatagtcacgtagctcccaccccaccctcttcctgtgtctcacgcaagttttatactctaatatttatatggctttttttcttcgacaaaaaaataataaaacgtttcttctgaaaagctg

SEQ ID NO: 172187 - DNA, 3262 bp, Homo sapiens
  Payload ID: 13851
  Gene Symbol: PCDHGA7
  Gene Name: protocadherin gamma subfamily A, 7
  Uniprot ID: Q9Y5G6
  ENST ID: ENST00000617050
  CDS Start-End: 162-2615
gacagattgcgataagccctcttccaggctgcactaaactcaagcctctatcctgctggattctgagctccccttcctaagacagaggggtccacccggatacacccgcattctgaagcacttcccgagatcggcgcctaagcaagagaagcaggacgactatggcggctcagccgaggggcggggactacagaggattcttcctgctctccatcctcctggggaccccctgggaagcctgggcaggacgtattctctactccgtgtcggaggagacggacaaagggtcctttgtgggagacatcgccaaggacctggggctggagccccgggagctggcggagcgcggagtccgcatcatctccagaggtaggacgcagcttttcgccctgaaccagcgcagcggcagcttggtcactgcgggcaggatagaccgggaagagatctgcgctcagagtgcgcggtgtctggtaaactttaacatcctgatggaagataaaatgaatctttaccctatagacgtggaaataatagatattaatgacaacgttccaagattcttgacggaagaaataaatgtaaaaataatggagaatacagctcctggggttcggtttccgttaagcgaggctggggatccagatgtgggcacgaactccctccagagttaccagctcagccccaatcgccacttctccctggctgtgcaaagtggagacgatgaaactaagtacccggaactggtgctggagcgggtgctggaccgggaggaagagcgggttcaccacctggtcctcacagcctctgatggcggcgacccgccccgatccagcaccgcccacatccaggtgacagtggtggatgtgaatgaccacacgcctgtcttctctctgcctcagtaccaagtaactgtccccgagaatgtgccagtgggtacaagactgctcacggtacatgctatcgacctggacgagggagtcaatggggaagtgacatattcttttcggaaaataactcctaaacttccaaagatgtttcatctgaactcgcttacaggagaaatatcaactttagaaggattagattatgaagaaactgccttctatgaaatggaggttcaggctcaagatggtcctggtagtctgacaaaggcaaaagtactgatcacagttttagatgtaaatgataatgctccagaagtgactatgacgtctttaagtagctcaatccctgaagacacacctcttgggacagtcattgctcttttctacctacaagacagagattctggaaagaatggtgaggtgacctgcaccattccagaaaacctaccttttaaattagaaaaatcaatagataattattatagattggtcacaaccaaaaacttggaccgggaaacactctctttgtataacatcacactgaaagccacagatggtggaactcctcccttgtccagggaaactcacatattcatgcaggtggcagacaccaacgataacccacccaccttcccccactcatcctactcagtctacatcgctgagaacaaccccagaggggcctccattttcttagtgactgcacaggaccacgacagtgaggataatgcccagatcacttattccttggccgaagacaccatccagggggctccagtgtcctcctatgtctccataaactctgacactggagtcctgtacgcgctgcaatcctttgattatgagcagttgagagaactacaactaagagtgactgcacatgacagcggggacccgcctctcagcagcaacatgtcactgagcctgttcgtgctggaccagaatgacaacccgcccgagatcctgtacccggccctccccacagatggttctactggcatggagctggcaccccgctccgcagagcccggctacctggtgaccaaggtggtggcggtggacaaagattcaggccagaacgcctggctgtcatacctcctgcttaaggccagcgagccaggactctttgcggttgggctgtacacgggcgaggtgcgcacggctcgggccctgctggacagagatgccctcaagcagagcctcgtggtggccgtccaggaccacggtcagcctcctctgtcagccaccgtcacactcaccgtggctgtggctgacagcatccccgaagtcttggccgacctgggcagccttgagccctccgacggtccttacaactatgacctcacgttgtacctggtggtggcggtggccacagtctcctgcgtcttcctagccttcgtcctcgtactgctggcgctcaggctgcggcgctggcacaagtcacgcctgctgcaggcttcagaaggtggcttggcgaacgtgcccacctcgcactttgtgggcatggacggggtgcaggctttcctgcagacctattcccatgaggtctccctcaccgcggactctcggaagagtcacctgatcttcccccagcccaactatgtagacatgctcatcagccaggagagctgtgagaaaaatgattctttgctaacatccgtagattttcaggaatgtaaagaaaacctgccaagtattcaggtgagcccagcccttcctttatttccatgaggaatttatttgcatgatatttctctattattttgcaaaacaaatgttttgaaaatagggatttaaaaaactttatagaggtaaaaatgagtttaccagtttccttcagtggtgacactttaatatagaacacataggatatagtatttctttagtgaaagcctatggacaagattatgaatatgtggactatcacattttataatttccacctactttccaatctatgttccaacctactttcttaactcatatattttatacattggaatgaatcgagtctttcatattgcacaaggttagcaggaataaaacacacctcagctgtcttctcaggattctctttagcattcaaatatgtaaaaggttctgaaagatttcttccatgtgaagatttttttctgtggctgattctgcctccatgtacctcagcttggtggtcctaaaaaatcttgattgcttcttgacctatttacagtataatcatttattaatggggtggtagtagaaggttggatttatgcctaaagaatgaaatgtgtgtgtatcacacttcactaagatctatatcaaagacagacatcaagtctaatgccacactaaaggccatcggacaaaaccaataaaatatgtcaaataaaatgtca

SEQ ID NO: 172188 - DNA, 4605 bp, Homo sapiens
  Payload ID: 13852
  Gene Symbol: PCDHGA8
  Gene Name: protocadherin gamma subfamily A, 8
  Uniprot ID: Q9Y5G5
  ENST ID: ENST00000398604
  CDS Start-End: 1-2799
atggccgctccacagagtcgccccagacgcggcgagctgatcctgctgtgcgcgctgctgggaacgctgtgggaaatcgggaggggacagattcgctactctgtgccagaagagacggacaaaggctccttcgtgggtaatatctccaaggacctggggctggacccccggaagctggcgaagcacggagtccgtatcgtctccagaggtaggacgcagctctttgctctgaacccgcgcagcggcagcttgatcaccgcgggcaggatagatcgggaggagctctgcgctcagagcccgcggtgtctgataaatattaacaccctggttgaggataaaggaaaactctttggggtagaaatagaaataattgatattaacgataataacccaaaattccaggtcgaagatctagaagtaaaaattaacgaaatcgcggttcctggagcacgttatccactcccagaagctgttgacccggatgtgggcgtgaactccctccagagctaccagctcagccccaatcaccacttctccctggacgtgcagactggagacaatggagccataaacccagagctggtgctggagcgcgccctggacagggaggaagaggctgctcaccacctggtcctcacggcctcggatggcggcaagccgcctcgctctagcacagtgcgcatccacgtgacagtgttggatacaaatgacaatgccccggtttttcctcacccgatttaccgagtgaaagtccttgagaacatgcccccaggcacgcggctgcttactgtaacagccagcgacccggatgagggaatcaacggaaaagtggcatacaaattccggaaaattaatgaaaaacaaactccgttattccagcttaatgaaaatactggggaaatatcaatagcaaaaagtctagattatgaagaatgttcattttatgaaatggaaatacaagccgaagatgtgggggcacttctggggaggaccaaattgctcatttcggtggaagatgtaaatgacaatagaccagaagtgatcattacgtctttgtttagcccagtgttagaaaattctcttcccgggacagtaattgccttcttgagtgtgcatgaccaagactctggaaagaatggtcaagttgtctgttacacacgtgataatttaccttttaaattagaaaagtcaataggtaattattatagattagtgacaaggaaatatttggaccgagaaaatgtctctatctacaatatcacagtgatggcctcagatctaggaacaccacctctgtccactgaaactcaaatcgctctgcacgtggcagacattaacgacaaccctcctactttccctcatgcctcctactcagcgtatatcctagagaacaacctgagaggagcctccatcttttccttgactgcacacgaccccgacagccaggagaatgcccaggtcacttactctgtgaccgaggacacgctgcagggggcgcccctgtcctcgtatatctccatcaactctgacaccggtgtcctgtatgcgctgcaatctttcgactatgagcagatccgagacctgcagctactggtaacagccagcgacagcggggacccgcccctcagcagcaacatgtcactgagcctgttcgtgctggaccagaatgacaacgcgcccgagatcctgtaccccgccctccccacagacggttccactggcgtggagctggcgccccgctccgcagagcgtggctacctggtgaccaaggtggtggcggtggacagagactcgggccagaacgcctggctgtcctaccgcctgctcaaggccagcgagccgggactcttctcggtgggtctgcacacgggcgaggtgcgcacggcgcgagccctgctggacagagatgcgctcaagcagagcctcgtggtggccgtccaggaccatggccagccccctctctccgccactgtcacgctcaccgtagccgtggctgacagcatccccgaagtcctgaccgagttgggcagtctgaagccttcggtcgacccgaacgattcgagccttacactctatctcgtggtggcagtggctgccatctcctgtgtcttcctcgcctttgtcgctgtgcttctggggctcaggctgaggcgctggcacaagtcacgcctgctccaggattccggtggcagattggtaggcgtgcctgcctcacattttgtgggtgttgaggaggtacaggctttcctgcagacctattcccaggaagtctccctcaccgccgactcgcggaagagtcacctgatctttccccagcccaactacgcagacatgctcatcagtcaggagggctgtgagaaaaatgattctttgttaacatccgtagattttcatgaatataagaatgaagctgatcatggtcagcaagccccgcccaacacggactggcgtttctctcaggcccagagacccggcaccagcggctcccaaaatggcgatgacaccggcacctggcccaacaaccagtttgacacagagatgctgcaagccatgatcttggcgtccgccagtgaagctgctgatgggagctccaccctgggagggggtgccggcaccatgggattgagcgcccgctacggaccccagttcaccctgcagcacgtgcccgactaccgccagaatgtctacatcccaggcagcaatgccacactgaccaacgcagctggcaagcgggatggcaaggccccagcaggtggcaatggcaacaagaagaagtcgggcaagaaggagaagaagtaacatggaggccaggccaagagccacagggcggcctctccccaaccagcccagcttctccttacctgcacccaggcctcagagtttcagggctaacccccagaatactggtaggggccaaggccatgctccccttgggaaacagaaacaagtgcccagtcagcacctaccccttcccccccagggggttgaatatgcaaaagcagttccgctgggaacccccatccaatcaactgctgtacccatgggggtagtggggttactgtagacaccaagaaccatttgccacaccccgtttagttacagctgaactcctccatcttccaaatcaatcaggcccatccatcccatgcctccctcctccccaccccactccaacagttcctctttcccgagtaaggtggttggggtgttgaagtaccaagtaacctacaagcctcctagttctgaaaagttggaagggcatcatgacctcttggcctctcctttgattctcaatcttcccccaaagcatggtttggtgccagccccttcacctccttccagagcccaagatcaatgctcaagttttggaggacatgatcaccatccccatggtactgatgcttgctggatttagggagggcattttgctaccaagcctcttcccaacgccctggggaccagtcttctgttttgtttttcattgtttgacgtttccactgcatgccttgacttcccccacctcctcctcaaacaagagactccactgcatgttccaagacagtatggggtggtaagataaggaagggaagtgtgtggatgtggatggtgggggcatggacaaagcttgacacatcaagttatcaaggccttggaggaggctctgtatgtcctcaggggactgacaacatcctccagattccagccataaaccaataactaggctggacccttcccactacataatagggctcagcccaggcagccagctttgggctgagctaacaggaccaatggattaaactggcatttcagtccaaggaagctcgaagcaggtttaggaccaggtccccttgagaggtcagaggggcctctgtgggtgctgggtactccagaggtgccactggtggaagggtcagcggagccccagcaggaagggtgggccagccaggccattcttagtccctgggttggggaggcagggagctagggcagggaccaaatgaacagaaagtctcagcccaggatggggcttcttcaacagggcccctgccctcctgaagcctcagtccttcaccttgccaggtgccgtttctcttccgtgaaggccactgcccaggtccccagtgcgccccctagtggccatagcctggttaaagttccccagtgcctccttgtgcatagaccttcttctcccacccccttctgcccctgggtccccggccatccagcggggctgccagagaaccccagacctgcccttacagtagtgtagcgccccctccctctttcggctggtgtagaatagccagtagtgtagtgcggtgtgcttttacgtgatggcgggtgggcagcgggcggcgggctccgcgcagccgtctgtccttgatctgcccgcggcggcccgtgttgtgttttgtgctgtgtccacgcgctaaggcgaccccctcccccgtactgacttctcctataagcgcttctcttcgcatagtcacgtagctcccaccccaccctcttcctgtgtctcacgcaagttttatactctaatatttatatggctttttttcttcgacaaaaaaataataaaacgtttcttctgaaaagctg

SEQ ID NO: 172189 - DNA, 6480 bp, Homo sapiens
  Payload ID: 13852
  Gene Symbol: PCDHGA8
  Gene Name: protocadherin gamma subfamily A, 8
  Uniprot ID: Q9Y5G5
  ENST ID: ENST00000610569
  CDS Start-End: 2658-5120
gaaagacggagtttaatttcctaaaatgtagtgagcagttgagttcaggacaagacatactttgcggtgattcatctggggccttatttccactttgtaattccagtgaattgacttcccatcaggtgagtttcctttaagtataatttaatgctcattgcctacccatttctccatattcacaagaaaatatacatatttgcaggaaaatatataatttttagatgtcatggatcattttaggaaagttgtagtcagttaaaaagctgtcatatcattctacaaaggaggagtaaagtaggagcaattgtgtggcccaacatttgtttgttttttagccaagcttagatttataaagcaatgagggtgtggttttaaccacaaagtgaaagtgttagacagttgttggctctctcctaaaaagtgaatgagatttttcctatacattttccttcttgttgactaatatatgatgaatacttttttcagcttggatataccataaatataaaaataataaagccaaagaatttaagctaaaattcaacacttttcttaactaatttaactggtatggtctccatagtagtccactgttttgtttcctgtgttaacttcccttttgtttcaaaagctcttagaataaggagtcaactggatttttatgtccatggaccccttgtgattatatgcagtgtacgctgtgtgtgcgtgtgtgtgtgtgtgtgtgtgagagagatccttttacttagaaaaaggtctactatgctcattagaagatcaaaagcagattctccttacttgtaacataggagtttcaggattaatctgtattcaagctcattctatatccttcatcaaagaaaagacaatgttttgtgtctgttgtccctctcacacacagccctaatatataatgtgtaactgccttatctgcagccctaaactaatatagctagaggtcttctaatcattctcctacctctaggaaagaaatatagtcttgaaaactgccaatctggtgtgcatacaaaatatatacaaaataccaaggaacattatatgagccttttgctaggtatatctaagcaactgcttcagttaatggccactttacaaattgctgaaagaaggaaacgtctttcgattcttttttttttctttttttttttttgagacagagtctctgtctgttactcaggctgtagtgcagtggcacaatgatagctccctccagcctcaaactcctgggctcaagcattccttctgcatcagcctcctgactagctggaactcaggctcatgccaccagacctggctaatttttctgttttcagtagagaaaatattttctttcactaatttaactggtatggtttccattgtctacccagttttccatatgcataagaaaatatattcacaggaaaatataaagttttcagatttcatgagtggttttaagaaagttttagtcagtgaaaaaactatcataccagtcttcaaaggaagggtgaaataagttcatctgctacgttgcccaggctggtcttgaagggaaacagacttttttgtagtcatacttatcctttggcttcttagtaagtattatatagtcattactttttgcagttttttagatcaaagtgttaatgtaggtaaagttaattttagaatatatgtaaaagtcaagtctgctttaaatttaatcatctctttggtgaaagggatgggatggagctttgctttttatcatatattcatctgtacctttcaagtattcaaatagaaaaatataaacaatgtaaataaaatagcaaaacaatgtaatatctcataaaactgcaatggtaaaagcatttatcctattgaaattccacaatttttatttgaaaatattatcgacatgtaattcaagtggcatttagaagaataatttaaaagcaacaactctatagaaagcttgtaaaatgattaagtagtttaaaccaaataaaacaatttctgagtcagtcatctccagtaggtctattttagtctcaagataaattcatttctggtgacaactgaagttcttagttatttgttagtatatattggagacatttacaataaagcttagagcacaatgggaaatgaaagtatcatgttttttttaagaccaaatgtattgcagaaatgtgagtaatttaatccgatgctacaatctgatcattctgatctaatctgatcatttaataacactaaataaaaccttcatctcacattctttggctgtttcttttaaaatatgggtttacggataaatcaaataaattcaaaacaaagtaataagcaaatgatttttttttctcagtaatctagtagagtattacatttagaagtaatctgtatctcagtgcagtaactatttaggactgtaagcgccgctgttcacctactggaagacaaatgcaaccgaaaacactcagatctcacacctcacgaagacccgcagatgccacaaactaactgctggactgcagcgaaacccgacccctgtttggaggcactccaggtttccggaggattgtcatctccatagctgcggcaagaaactaaataagacccatttatgcacagtgaagattctgagaggattctgcagcaaaacaacaatggccgctccacagagtcgccccagacgcggcgagctgatcctgctgtgcgcgctgctgggaacgctgtgggaaatcgggaggggacagattcgctactctgtgccagaagagacggacaaaggctccttcgtgggtaatatctccaaggacctggggctggacccccggaagctggcgaagcacggagtccgtatcgtctccagaggtaggacgcagctctttgctctgaacccgcgcagcggcagcttgatcaccgcgggcaggatagatcgggaggagctctgcgctcagagcccgcggtgtctgataaatattaacaccctggttgaggataaaggaaaactctttggggtagaaatagaaataattgatattaacgataataacccaaaattccaggtcgaagatctagaagtaaaaattaacgaaatcgcggttcctggagcacgttatccactcccagaagctgttgacccggatgtgggcgtgaactccctccagagctaccagctcagccccaatcaccacttctccctggacgtgcagactggagacaatggagccataaacccagagctggtgctggagcgcgccctggacagggaggaagaggctgctcaccacctggtcctcacggcctcggatggcggcaagccgcctcgctctagcacagtgcgcatccacgtgacagtgttggatacaaatgacaatgccccggtttttcctcacccgatttaccgagtgaaagtccttgagaacatgcccccaggcacgcggctgcttactgtaacagccagcgacccggatgagggaatcaacggaaaagtggcatacaaattccggaaaattaatgaaaaacaaactccgttattccagcttaatgaaaatactggggaaatatcaatagcaaaaagtctagattatgaagaatgttcattttatgaaatggaaatacaagccgaagatgtgggggcacttctggggaggaccaaattgctcatttcggtggaagatgtaaatgacaatagaccagaagtgatcattacgtctttgtttagcccagtgttagaaaattctcttcccgggacagtaattgccttcttgagtgtgcatgaccaagactctggaaagaatggtcaagttgtctgttacacacgtgataatttaccttttaaattagaaaagtcaataggtaattattatagattagtgacaaggaaatatttggaccgagaaaatgtctctatctacaatatcacagtgatggcctcagatctaggaacaccacctctgtccactgaaactcaaatcgctctgcacgtggcagacattaacgacaaccctcctactttccctcatgcctcctactcagcgtatatcctagagaacaacctgagaggagcctccatcttttccttgactgcacacgaccccgacagccaggagaatgcccaggtcacttactctgtgaccgaggacacgctgcagggggcgcccctgtcctcgtatatctccatcaactctgacaccggtgtcctgtatgcgctgcaatctttcgactatgagcagatccgagacctgcagctactggtaacagccagcgacagcggggacccgcccctcagcagcaacatgtcactgagcctgttcgtgctggaccagaatgacaacgcgcccgagatcctgtaccccgccctccccacagacggttccactggcgtggagctggcgccccgctccgcagagcgtggctacctggtgaccaaggtggtggcggtggacagagactcgggccagaacgcctggctgtcctaccgcctgctcaaggccagcgagccgggactcttctcggtgggtctgcacacgggcgaggtgcgcacggcgcgagccctgctggacagagatgcgctcaagcagagcctcgtggtggccgtccaggaccatggccagccccctctctccgccactgtcacgctcaccgtagccgtggctgacagcatccccgaagtcctgaccgagttgggcagtctgaagccttcggtcgacccgaacgattcgagccttacactctatctcgtggtggcagtggctgccatctcctgtgtcttcctcgcctttgtcgctgtgcttctggggctcaggctgaggcgctggcacaagtcacgcctgctccaggattccggtggcagattggtaggcgtgcctgcctcacattttgtgggtgttgaggaggtacaggctttcctgcagacctattcccaggaagtctccctcaccgccgactcgcggaagagtcacctgatctttccccagcccaactacgcagacatgctcatcagtcaggagggctgtgagaaaaatgattctttgttaacatccgtagattttcatgaatataagaatgaagctgatcatggtcaggtgagtttagttctttgcttgcttttaatttccagatgaattttatttggcataaattatgttttgaaaaacattgtgaagatagttgaaaataatttttaaggtgtatcacagagttttgggtttattttggtggtgttactataaaattgaactctaatagtcataggttattgtttcatttgcttttaaacgacttggaaaagattgttcaaccattttaagccttccagtattttattcctattatcactcattcacttaagaagtagctacccgtccatactggtaattttgctattgtttgtgtgtgtgtgtgtgtgtgtgtgtgtgtgtgtgtgtgtgtgtgtgtgtatcccaaactagaacttcagaaaattatcaagaagtctaaagccttgttattagcttagcaaaagtaaaatatatctcagaatttttagggttatgtttagcatttgaacctgtaactaggctcttgtagatttcttcactttaaacctcttttctgagccctgtttctgtaccagtgcccttcaaaactttaatacttcttaccatccttcaaaacatgaacaaactttaaagatggatcttggtgggagatgagactggttactaaatattaagtatgtgagtcagtggtcacctgggctccatgcccatggagacatgaaatctaaagcctagaatgtccattgctcccccaaacaaaaaacaaaagcaaaaacattagatctgaattaaaatgtaattttaaactgttgaaagtgacttttgtaaaatatgtaagaacatatttcaatacaattccaattagctgtttcggttgtgcattgatgtgaagtggtgagaatgttgatattaagaaccaatgtttcaggtacacaagttctaaataagctgatcaattcaattaaagttattcagtcttggctggacacagtgcctcatgtctgaaatcccagcactttgggaggctggggcaggaggaccgcttgagccccgggggtttgaaactgcagtgagctatgatcatgccactgcactccagcctaggtggcagaactagaccctgtctctaaaaaaactattattaggccgggtgcggtggctcacgcctgtaatcccagcactttgggagactgaggtgggtggatcacctgaggtcaggagttcaagatcagcctggcaaacatggtgaaaccccgtctctactaaaaactacaaaaattagccaggcatggtggcatgcgcctgtggtcccagctactcgggaggctgaggcagaagaatcacttgaacccgggaggtggaggttgcagtgagcctcgatcctgtcactgcactccagcctgggcaacagggtgagactccgtctcaaaaaaaaaaaaaacta

SEQ ID NO: 172190 - DNA, 4605 bp, Homo sapiens
  Payload ID: 13853
  Gene Symbol: PCDHGA9
  Gene Name: protocadherin gamma subfamily A, 9
  Uniprot ID: Q9Y5G4
  ENST ID: ENST00000573521
  CDS Start-End: 1-2799
atggcagctccaaccaaatgccagctccgcggaagattagtcctgctatgctcgctcctggggatgctatgggaggccagggccagtcagattcgctactcagtgcctgaagagacagaaaagggctatattgtgggcaacatctccaaggacctggctctggagccccgggagctggcggagcgccgagtccgcatcgtctctagaggtaggacgcagcttttctctctgaacccgcgcagcggcaccttggtcaccgcgggtaggatagaccgggaggagctctgtgctcagagcccgcggtgtctggtgaactttaaagtcctggttgaagacagagtgaaactgtacggaatagaaatagaagtaactgatattaacgacagcgccccaaagttccaggccgaaagtctggaagtaaaaattaacgaaatcgcggttcctggagcacgttatccacttccagaagctattgatccggatgttggcgtgaactccctccagagctaccagctcagccccaatcaccacttctccctgaacgtgcagactggagacaatggagccataaacccagagctggtgctggagcgcgccctggacagggaggaggcaactgcccaccacctggtcctcacggcctcggatggcggcgagccgcgtcgctccagcacagtgcgcatccatgtgacagtgttggatacaaatgataatgccccggtttttgctcaacggatttaccgagttaaagtccttgagaacgtgcccccaggcacctggctgcttactgcaacagccagcgacctggatgagggaatcaacggaaaagtggcatacaaattctggaaaattaatgaaaaacaatctctgctattccagcttaatgaaaatactggggaaatatcaacagcaaaaagtctagattatgaagaatgttcattttatgaaatggaaatacaagctgaagatggtgggggattgaaagggtggacaaaagtgctcatttcggtggaagatgtaaatgacaatagacctgaagtgaccattacatctctgtttagcccagtgagagaagacgcacctcagggaacagtaattcttcttttcaatgctcatgaccgagactccgggaagaatggtcaagttgtctgttctatccaggagaatctatcttttacattagaaaattcagaagaagattattacagattgttgacggcccaaattcttgaccgagaaaaagcctcagaatataatatcacggtgactgcaacagacagaggaactccgcccctgtccacagaaattcacatcaccctgcaagtgactgacatcaatgataatccacctgctttctctcaagcctcctactcagtctacctcccggaaaacaacgccagaggtacttccatcttctccgtgattgcctatgaccctgatagcaatgagaattctagagttatttactccttggcagaggataccatccaagggtctcctctctccacctatgtctctattaactcagacactggtgtgctgtatgctctgtgctcctttgactatgagcagtttagagatttgcaaatgcaggtgacggcaagtgacagtggaagcccaccacttagcagcaatgtgtcattgagactgtttgttttggaccagaatgacaatgccccagaaatcctgtaccctgccctccccactgatggttctactggtgtggagctggcaccccgctctgcagagcctggctacctggtgaccaaggtggtggcagtggacagagactcaggccagaatgcttggctctcctaccgcctattcaaggccagtgagccagggctcttctcggtggggctgcacacaggtgaagtgcgcacagctcgggccctgctagatagagatgcgctcaaacagagccttgtggtggctgtacaggaccatggccagccccctctctcggccactgtcacgctcacagtagccatagctgacagcatcccagacatcctggctgacctgggcagtcttcagatccctgcagacctggaggcctcagaccttaccctctacctcgttgtggctgtggcagtcgtctcctgtgtcttcctcaccttcgttatcacgctgctggccctcaggctgaggcactggcactcctcgcatctgctgcgggctaccagtgatgggttggctggtgtgcccacctcacactttgtgggtgtagatggggttcgagctttcctacagacctattctcaggagttctccctcaccgctgactcaaggaagagtcacctgatcttcccccagcccaactatgcagacacactcatcagccagcagagctgtgagaaaaatgagcctttgtgcgtctctgttgattccaagtttcctatagaagacacccctttggttccgcaagccccgcccaacacggactggcgtttctctcaggcccagagacccggcaccagcggctcccaaaatggcgatgacaccggcacctggcccaacaaccagtttgacacagagatgctgcaagccatgatcttggcgtccgccagtgaagctgctgatgggagctccaccctgggagggggtgccggcaccatgggattgagcgcccgctacggaccccagttcaccctgcagcacgtgcccgactaccgccagaatgtctacatcccaggcagcaatgccacactgaccaacgcagctggcaagcgggatggcaaggccccagcaggtggcaatggcaacaagaagaagtcgggcaagaaggagaagaagtaacatggaggccaggccaagagccacagggcggcctctccccaaccagcccagcttctccttacctgcacccaggcctcagagtttcagggctaacccccagaatactggtaggggccaaggccatgctccccttgggaaacagaaacaagtgcccagtcagcacctaccccttcccccccagggggttgaatatgcaaaagcagttccgctgggaacccccatccaatcaactgctgtacccatgggggtagtggggttactgtagacaccaagaaccatttgccacaccccgtttagttacagctgaactcctccatcttccaaatcaatcaggcccatccatcccatgcctccctcctccccaccccactccaacagttcctctttcccgagtaaggtggttggggtgttgaagtaccaagtaacctacaagcctcctagttctgaaaagttggaagggcatcatgacctcttggcctctcctttgattctcaatcttcccccaaagcatggtttggtgccagccccttcacctccttccagagcccaagatcaatgctcaagttttggaggacatgatcaccatccccatggtactgatgcttgctggatttagggagggcattttgctaccaagcctcttcccaacgccctggggaccagtcttctgttttgtttttcattgtttgacgtttccactgcatgccttgacttcccccacctcctcctcaaacaagagactccactgcatgttccaagacagtatggggtggtaagataaggaagggaagtgtgtggatgtggatggtgggggcatggacaaagcttgacacatcaagttatcaaggccttggaggaggctctgtatgtcctcaggggactgacaacatcctccagattccagccataaaccaataactaggctggacccttcccactacataatagggctcagcccaggcagccagctttgggctgagctaacaggaccaatggattaaactggcatttcagtccaaggaagctcgaagcaggtttaggaccaggtccccttgagaggtcagaggggcctctgtgggtgctgggtactccagaggtgccactggtggaagggtcagcggagccccagcaggaagggtgggccagccaggccattcttagtccctgggttggggaggcagggagctagggcagggaccaaatgaacagaaagtctcagcccaggatggggcttcttcaacagggcccctgccctcctgaagcctcagtccttcaccttgccaggtgccgtttctcttccgtgaaggccactgcccaggtccccagtgcgccccctagtggccatagcctggttaaagttccccagtgcctccttgtgcatagaccttcttctcccacccccttctgcccctgggtccccggccatccagcggggctgccagagaaccccagacctgcccttacagtagtgtagcgccccctccctctttcggctggtgtagaatagccagtagtgtagtgcggtgtgcttttacgtgatggcgggtgggcagcgggcggcgggctccgcgcagccgtctgtccttgatctgcccgcggcggcccgtgttgtgttttgtgctgtgtccacgcgctaaggcgaccccctcccccgtactgacttctcctataagcgcttctcttcgcatagtcacgtagctcccaccccaccctcttcctgtgtctcacgcaagttttatactctaatatttatatggctttttttcttcgacaaaaaaataataaaacgtttcttctgaaaagctg

SEQ ID NO: 172191 - DNA, 2568 bp, Homo sapiens
  Payload ID: 13853
  Gene Symbol: PCDHGA9
  Gene Name: protocadherin gamma subfamily A, 9
  Uniprot ID: Q9Y5G4
  ENST ID: ENST00000616887
  CDS Start-End: 22-2508
aaattccaaagcgaggcagcaatggcagctccaaccaaatgccagctccgcggaagattagtcctgctatgctcgctcctggggatgctatgggaggccagggccagtcagattcgctactcagtgcctgaagagacagaaaagggctatattgtgggcaacatctccaaggacctggctctggagccccgggagctggcggagcgccgagtccgcatcgtctctagaggtaggacgcagcttttctctctgaacccgcgcagcggcaccttggtcaccgcgggtaggatagaccgggaggagctctgtgctcagagcccgcggtgtctggtgaactttaaagtcctggttgaagacagagtgaaactgtacggaatagaaatagaagtaactgatattaacgacagcgccccaaagttccaggccgaaagtctggaagtaaaaattaacgaaatcgcggttcctggagcacgttatccacttccagaagctattgatccggatgttggcgtgaactccctccagagctaccagctcagccccaatcaccacttctccctgaacgtgcagactggagacaatggagccataaacccagagctggtgctggagcgcgccctggacagggaggaggcaactgcccaccacctggtcctcacggcctcggatggcggcgagccgcgtcgctccagcacagtgcgcatccatgtgacagtgttggatacaaatgataatgccccggtttttgctcaacggatttaccgagttaaagtccttgagaacgtgcccccaggcacctggctgcttactgcaacagccagcgacctggatgagggaatcaacggaaaagtggcatacaaattctggaaaattaatgaaaaacaatctctgctattccagcttaatgaaaatactggggaaatatcaacagcaaaaagtctagattatgaagaatgttcattttatgaaatggaaatacaagctgaagatggtgggggattgaaagggtggacaaaagtgctcatttcggtggaagatgtaaatgacaatagacctgaagtgaccattacatctctgtttagcccagtgagagaagacgcacctcagggaacagtaattcttcttttcaatgctcatgaccgagactccgggaagaatggtcaagttgtctgttctatccaggagaatctatcttttacattagaaaattcagaagaagattattacagattgttgacggcccaaattcttgaccgagaaaaagcctcagaatataatatcacggtgactgcaacagacagaggaactccgcccctgtccacagaaattcacatcaccctgcaagtgactgacatcaatgataatccacctgctttctctcaagcctcctactcagtctacctcccggaaaacaacgccagaggtacttccatcttctccgtgattgcctatgaccctgatagcaatgagaattctagagttatttactccttggcagaggataccatccaagggtctcctctctccacctatgtctctattaactcagacactggtgtgctgtatgctctgtgctcctttgactatgagcagtttagagatttgcaaatgcaggtgacggcaagtgacagtggaagcccaccacttagcagcaatgtgtcattgagactgtttgttttggaccagaatgacaatgccccagaaatcctgtaccctgccctccccactgatggttctactggtgtggagctggcaccccgctctgcagagcctggctacctggtgaccaaggtggtggcagtggacagagactcaggccagaatgcttggctctcctaccgcctattcaaggccagtgagccagggctcttctcggtggggctgcacacaggtgaagtgcgcacagctcgggccctgctagatagagatgcgctcaaacagagccttgtggtggctgtacaggaccatggccagccccctctctcggccactgtcacgctcacagtagccatagctgacagcatcccagacatcctggctgacctgggcagtcttcagatccctgcagacctggaggcctcagaccttaccctctacctcgttgtggctgtggcagtcgtctcctgtgtcttcctcaccttcgttatcacgctgctggccctcaggctgaggcactggcactcctcgcatctgctgcgggctaccagtgatgggttggctggtgtgcccacctcacactttgtgggtgtagatggggttcgagctttcctacagacctattctcaggagttctccctcaccgctgactcaaggaagagtcacctgatcttcccccagcccaactatgcagacacactcatcagccagcagagctgtgagaaaaatgagcctttgtgcgtctctgttgattccaagtttcctatagaagacacccctttggttccggtgagttcattttttttctttctttcttttctttttttgttttttgttttgttttgtttttgagacagagtcttactctgttacccaggctggaatgcagtggtgtgatctcggctcattgca

SEQ ID NO: 172192 - DNA, 4590 bp, Homo sapiens
  Payload ID: 13854
  Gene Symbol: PCDHGB1
  Gene Name: protocadherin gamma subfamily B, 1
  Uniprot ID: Q9Y5G3
  ENST ID: ENST00000523390
  CDS Start-End: 1-2784
atgcagagagccagagaagccgaaatgatgaaaagtcaggtactgtttcccttcctgctgtctttgttctgcggggccatctcccagcagatccgatacacgattccagaggagctagccaacggctcacgggtggggaaacttgccaaggatctggggctcagtgtccgggagttgccaactcgaaaactgcgggttagtgcagaggattatttcaacgttagtttggagagcggggatttgttagtgaacggtaggatagatcgagagaagatttgcggaaggaaacttgagtgtgcactagaattcgaaacggtcgctgaaaacccaatgaatgttttccacgtggttgttgtaatccaagatattaatgacaatgcaccacgtttcgttgcaaaaggcattgacttagaaatttgtgagtcagccttacccggggtaaaattctctctggattctgctcaagatgcagatgtggaaggcaattcactgaagttatacaccatcaaccccaatcaatacttctctctgtcaacgaaggaaagtcctgatggaagtaaatatccggtattactgctggaaaaacctctagacagggaacatcagagctctcatcgcttaatcctgactgccatggatggcggggacccgcctctaagcggcaccacccatatctggatccgagttacggatgccaatgataatgctcccgtgtttagccaggaggtatacagggttagcctccaagaaaacgtaccgtggggaacctccgtgctgcgggtgatggccacagaccaggatgagggcattaatgcagagatcacctatgccttcctcaattccccaataagtaccagcctcttcaatctcaatccaaatactggcgacatcacaaccaatggcacattggattttgaagagacaagtagatatgtgttgagtgtggaagctaaggatggaggagtacacacagctcactgtaatgttcaaatagaaattgttgacgagaatgacaatgccccagaggtgacattcatgtccttctctaaccagattccagaggattcagaccttggaactgtaatagccctcataaaagtgcgagacaaggattctgggcaaaatggcatggtgacatgctatactcaggaagaagttcctttcaaattagaatccacctcgaagaattattacaagctggtgattgctggagccctaaaccgggagcagacagcagactacaacgtcacaatcatagccaccgacaagggcaaaccagccctttcctccaggacaagcatcaccctgcacatctccgacatcaacgacaatgcacctgttttccatcaggcctcctatgtggtccacgtgtctgagaacaacccacctggcgcctccattgcacaagtaagcgcctccgacccggatttgggacccaacggcagagtctcctactctattctggccagtgacctggagccgcgggagctgttgtcctacgtgtccgtgagcccgcagagcggggtggtgttcgcgcagcgcgccttcgaccacgagcagctgcgcgccttcgagctcacactgcaggccagggaccagggctcccccgcgctcagcgccaacgtgagcctgcgcgtgttggtgggcgacctcaatgacaatgcgccacgggtgctgtaccccgcgctggggcctgatggctccgccctcttcgatatggtgccacgcgccgcagagcccggctacctggtgaccaaggtggtggcggtggacgcagactcaggacacaacgcttggctgtcctaccacgtgctgcaggccagcgagcccgggctcttcagcctggggttgcgcacgggtgaggtgcgcacagcgcgtgccttgggcgacagggacgcggcccgccagcgcctgctggtcgctgtgcgtgatggaggacagccgccactctccgccaccgccacgctgcacctaatcttcgcggatagcctgcaagaggtattgccagacctcagcgaccgccctgagccctctgacccccagacggaactgcagttttacctggttgtggccttggccttgatctcagtgctctttctcctcgcggtgattctagcgatcgccctgcgcctgcgacgttcctccagcctcgacactgagggctgctttcaaaccggtctctgctccaagtctgggcccggggttcctcccaaccacagcgaggggactttgccctattcctacaatctatgtattgcctctcattctgcaaagacagagtttaattctctcaacctgacaccggaaatggctccccctcaggatctgctgtgtgatgatccttctatggttgtatgtgccagtaatgaagatcacaaaatcgcttatgacccttctttgtcttcgcaccaagccccgcccaacacggactggcgtttctctcaggcccagagacccggcaccagcggctcccaaaatggcgatgacaccggcacctggcccaacaaccagtttgacacagagatgctgcaagccatgatcttggcgtccgccagtgaagctgctgatgggagctccaccctgggagggggtgccggcaccatgggattgagcgcccgctacggaccccagttcaccctgcagcacgtgcccgactaccgccagaatgtctacatcccaggcagcaatgccacactgaccaacgcagctggcaagcgggatggcaaggccccagcaggtggcaatggcaacaagaagaagtcgggcaagaaggagaagaagtaacatggaggccaggccaagagccacagggcggcctctccccaaccagcccagcttctccttacctgcacccaggcctcagagtttcagggctaacccccagaatactggtaggggccaaggccatgctccccttgggaaacagaaacaagtgcccagtcagcacctaccccttcccccccagggggttgaatatgcaaaagcagttccgctgggaacccccatccaatcaactgctgtacccatgggggtagtggggttactgtagacaccaagaaccatttgccacaccccgtttagttacagctgaactcctccatcttccaaatcaatcaggcccatccatcccatgcctccctcctccccaccccactccaacagttcctctttcccgagtaaggtggttggggtgttgaagtaccaagtaacctacaagcctcctagttctgaaaagttggaagggcatcatgacctcttggcctctcctttgattctcaatcttcccccaaagcatggtttggtgccagccccttcacctccttccagagcccaagatcaatgctcaagttttggaggacatgatcaccatccccatggtactgatgcttgctggatttagggagggcattttgctaccaagcctcttcccaacgccctggggaccagtcttctgttttgtttttcattgtttgacgtttccactgcatgccttgacttcccccacctcctcctcaaacaagagactccactgcatgttccaagacagtatggggtggtaagataaggaagggaagtgtgtggatgtggatggtgggggcatggacaaagcttgacacatcaagttatcaaggccttggaggaggctctgtatgtcctcaggggactgacaacatcctccagattccagccataaaccaataactaggctggacccttcccactacataatagggctcagcccaggcagccagctttgggctgagctaacaggaccaatggattaaactggcatttcagtccaaggaagctcgaagcaggtttaggaccaggtccccttgagaggtcagaggggcctctgtgggtgctgggtactccagaggtgccactggtggaagggtcagcggagccccagcaggaagggtgggccagccaggccattcttagtccctgggttggggaggcagggagctagggcagggaccaaatgaacagaaagtctcagcccaggatggggcttcttcaacagggcccctgccctcctgaagcctcagtccttcaccttgccaggtgccgtttctcttccgtgaaggccactgcccaggtccccagtgcgccccctagtggccatagcctggttaaagttccccagtgcctccttgtgcatagaccttcttctcccacccccttctgcccctgggtccccggccatccagcggggctgccagagaaccccagacctgcccttacagtagtgtagcgccccctccctctttcggctggtgtagaatagccagtagtgtagtgcggtgtgcttttacgtgatggcgggtgggcagcgggcggcgggctccgcgcagccgtctgtccttgatctgcccgcggcggcccgtgttgtgttttgtgctgtgtccacgcgctaaggcgaccccctcccccgtactgacttctcctataagcgcttctcttcgcatagtcacgtagctcccaccccaccctcttcctgtgtctcacgcaagttttatactctaatatttatatggctttttttcttcgacaaaaaaataataaaacgtttcttctgaaaagctg

SEQ ID NO: 172193 - DNA, 2592 bp, Homo sapiens
  Payload ID: 13854
  Gene Symbol: PCDHGB1
  Gene Name: protocadherin gamma subfamily B, 1
  Uniprot ID: Q9Y5G3
  ENST ID: ENST00000611598
  CDS Start-End: 160-2592
ttcctgctttgtccggtgcactgagcacagacgctgctcctgttcaccctcgagcgcctaactaataagtcctaagctcaaatcacagaagtccagggtgctgccatttctttttgaaaaacatcccagaggaaagaagctccgcggagagttcctgaaatgcagagagccagagaagccgaaatgatgaaaagtcaggtactgtttcccttcctgctgtctttgttctgcggggccatctcccagcagatccgatacacgattccagaggagctagccaacggctcacgggtggggaaacttgccaaggatctggggctcagtgtccgggagttgccaactcgaaaactgcgggttagtgcagaggattatttcaacgttagtttggagagcggggatttgttagtgaacggtaggatagatcgagagaagatttgcggaaggaaacttgagtgtgcactagaattcgaaacggtcgctgaaaacccaatgaatgttttccacgtggttgttgtaatccaagatattaatgacaatgcaccacgtttcgttgcaaaaggcattgacttagaaatttgtgagtcagccttacccggggtaaaattctctctggattctgctcaagatgcagatgtggaaggcaattcactgaagttatacaccatcaaccccaatcaatacttctctctgtcaacgaaggaaagtcctgatggaagtaaatatccggtattactgctggaaaaacctctagacagggaacatcagagctctcatcgcttaatcctgactgccatggatggcggggacccgcctctaagcggcaccacccatatctggatccgagttacggatgccaatgataatgctcccgtgtttagccaggaggtatacagggttagcctccaagaaaacgtaccgtggggaacctccgtgctgcgggtgatggccacagaccaggatgagggcattaatgcagagatcacctatgccttcctcaattccccaataagtaccagcctcttcaatctcaatccaaatactggcgacatcacaaccaatggcacattggattttgaagagacaagtagatatgtgttgagtgtggaagctaaggatggaggagtacacacagctcactgtaatgttcaaatagaaattgttgacgagaatgacaatgccccagaggtgacattcatgtccttctctaaccagattccagaggattcagaccttggaactgtaatagccctcataaaagtgcgagacaaggattctgggcaaaatggcatggtgacatgctatactcaggaagaagttcctttcaaattagaatccacctcgaagaattattacaagctggtgattgctggagccctaaaccgggagcagacagcagactacaacgtcacaatcatagccaccgacaagggcaaaccagccctttcctccaggacaagcatcaccctgcacatctccgacatcaacgacaatgcacctgttttccatcaggcctcctatgtggtccacgtgtctgagaacaacccacctggcgcctccattgcacaagtaagcgcctccgacccggatttgggacccaacggcagagtctcctactctattctggccagtgacctggagccgcgggagctgttgtcctacgtgtccgtgagcccgcagagcggggtggtgttcgcgcagcgcgccttcgaccacgagcagctgcgcgccttcgagctcacactgcaggccagggaccagggctcccccgcgctcagcgccaacgtgagcctgcgcgtgttggtgggcgacctcaatgacaatgcgccacgggtgctgtaccccgcgctggggcctgatggctccgccctcttcgatatggtgccacgcgccgcagagcccggctacctggtgaccaaggtggtggcggtggacgcagactcaggacacaacgcttggctgtcctaccacgtgctgcaggccagcgagcccgggctcttcagcctggggttgcgcacgggtgaggtgcgcacagcgcgtgccttgggcgacagggacgcggcccgccagcgcctgctggtcgctgtgcgtgatggaggacagccgccactctccgccaccgccacgctgcacctaatcttcgcggatagcctgcaagaggtattgccagacctcagcgaccgccctgagccctctgacccccagacggaactgcagttttacctggttgtggccttggccttgatctcagtgctctttctcctcgcggtgattctagcgatcgccctgcgcctgcgacgttcctccagcctcgacactgagggctgctttcaaaccggtctctgctccaagtctgggcccggggttcctcccaaccacagcgaggggactttgccctattcctacaatctatgtattgcctctcattctgcaaagacagagtttaattctctcaacctgacaccggaaatggctccccctcaggatctgctgtgtgatgatccttctatggttgtatgtgccagtaatgaagatcacaaaatcgcttatgacccttctttgtcttcgcacgtgagtttctgcaaatctagttaa

SEQ ID NO: 172194 - DNA, 4602 bp, Homo sapiens
  Payload ID: 13855
  Gene Symbol: PCDHGB2
  Gene Name: protocadherin gamma subfamily B, 2
  Uniprot ID: Q9Y5G2
  ENST ID: ENST00000522605
  CDS Start-End: 1-2796
atgaaagcgagctcagggaggtgcgggctggtgcggtggctgcaggtactgttgcccttcctgttgtctttgttccccggggctctcccagtccagatccgctattcaattccagaggagctggccaaaaactcggtcgtaggaaacctcgccaaggatctggggctcagcgtccgggacttgccagcccggaagctgcgggttagcgcggagaaggaatatttcacagtaaacccagaaagcggagacttacttgtgagtgacagaatagaccgagaacagatatgcgggaagcagcctctgtgtgttctggatttcgatactgtcgctgaaaatccactaaatattttctacatagcagtaattgtgcaggatataaatgataataccccgctattcaaacagactaagattaatttaaaaattggcgaatccactaagccaggtacaacatttccacttgacccagccctggattcagatgttggtcctaactcactacaaagataccaccttaatgacaacgagtactttgatctcgctgagaaacagactccagatggtcgtaaatatcctgagttgattctaaaacactctctggacagagaagagcacagtttacatcaattggtcctcacagctgtggatggcggagacccacctcaaagtggcacgacccaaatccgaatcaaagtcacggatgccaacgataaccctccagtgttcagccaggacgtgtacagggtcaccctgagggaggacgtgccgccgggcttctttgtgcttcaagtgacagccaccgaccgggatgaaggcataaacgcagagatcacctactcctttcataatgtggacgaacaagtgaaacactttttcaacttaaatgaaaaaacaggagaaatcacgacaaaggatgatttggattttgagattgcaagtagttacactctgagtatcgaagcaaaagatcctggagatctagcagcccactgcagtatccaagttgaaattcttgatgacaacgattgtgcacctgaagttattgtgacttcagtatctactcccctaccggaggattcgccaccaggaacagtgatcgccttgataaaaacgagagacagagactctggagaaaatggagaagtttactgccaagtgttgggaaatgccaagtttattttgaaatcttcctcaaagaactattacaaactagtgacagacggcgctctggaccgggaggagatcccagaatacaatctcaccatcacagccaccgacgggggcaagccgcccctctcctccagcataattgtcaccctgcacatctccgacgtcaacgataatgccccagttttccaacagacttcctacatggttcacgtggcagagaacaatcctcctggcgcctctatcgctcaaatcagtgcctctgaccctgacttgggccccagtggccaagtttcctactccatcgtagcgagcgacctgaagccgcgggagattttatcctacgtgtccgtgagcgcgcagagcggggtggtgttcgcgcagcgcgccttcgatcatgagcagctgcgcgccttcgagctcacactgcaggcccgcgaccagggctcgcccgcgctcagcgccaacgtgagcctgcgcgtgttagtgggcgacctcaatgacaatgcgccacgggtgctgtaccccgcgctggggcctgatggctccgccctcttcgatatggtgccacgcgccgcagagcccggctacctggtgaccaaggtggtggcggtggacgcagactcaggacacaacgcttggctgtcctaccacgtgctgcaggccagcgagcccgggctcttcagcctggggttgcgcacgggtgaggtgcgcacagcgcgtgccttgggcgacagggacgcggcccgccagcgcctgctggtcgctgtgcgtgatggaggacagccgccactctccgctacggccacgctgcacctaatcttcgcggatagcctgcaagaggtattgccagacctcagcgaccgccgggagccctctgacccccaggcaaaactgcagttttacctggttgtggccttggccttgatctcagtgctcttcttcctcgcggtgattctggcaatctccctgcgcctgcgactctcttccaggtcagatgcttgggactgttttcagcctggtctcagctccaagcctggacctggggttctccccaattacagtgagggtacattgccctattcctacaacctgtgtgttgcctcacaatcagccaagacagagttcaattttctgaacataaccccggaattggttcccgcgcaagatctcgtctgtgacaatgcctcttgggaacaaaatacaaatcatggagccgctggggtcccttttgcctcagatactattttgaagcaagccccgcccaacacggactggcgtttctctcaggcccagagacccggcaccagcggctcccaaaatggcgatgacaccggcacctggcccaacaaccagtttgacacagagatgctgcaagccatgatcttggcgtccgccagtgaagctgctgatgggagctccaccctgggagggggtgccggcaccatgggattgagcgcccgctacggaccccagttcaccctgcagcacgtgcccgactaccgccagaatgtctacatcccaggcagcaatgccacactgaccaacgcagctggcaagcgggatggcaaggccccagcaggtggcaatggcaacaagaagaagtcgggcaagaaggagaagaagtaacatggaggccaggccaagagccacagggcggcctctccccaaccagcccagcttctccttacctgcacccaggcctcagagtttcagggctaacccccagaatactggtaggggccaaggccatgctccccttgggaaacagaaacaagtgcccagtcagcacctaccccttcccccccagggggttgaatatgcaaaagcagttccgctgggaacccccatccaatcaactgctgtacccatgggggtagtggggttactgtagacaccaagaaccatttgccacaccccgtttagttacagctgaactcctccatcttccaaatcaatcaggcccatccatcccatgcctccctcctccccaccccactccaacagttcctctttcccgagtaaggtggttggggtgttgaagtaccaagtaacctacaagcctcctagttctgaaaagttggaagggcatcatgacctcttggcctctcctttgattctcaatcttcccccaaagcatggtttggtgccagccccttcacctccttccagagcccaagatcaatgctcaagttttggaggacatgatcaccatccccatggtactgatgcttgctggatttagggagggcattttgctaccaagcctcttcccaacgccctggggaccagtcttctgttttgtttttcattgtttgacgtttccactgcatgccttgacttcccccacctcctcctcaaacaagagactccactgcatgttccaagacagtatggggtggtaagataaggaagggaagtgtgtggatgtggatggtgggggcatggacaaagcttgacacatcaagttatcaaggccttggaggaggctctgtatgtcctcaggggactgacaacatcctccagattccagccataaaccaataactaggctggacccttcccactacataatagggctcagcccaggcagccagctttgggctgagctaacaggaccaatggattaaactggcatttcagtccaaggaagctcgaagcaggtttaggaccaggtccccttgagaggtcagaggggcctctgtgggtgctgggtactccagaggtgccactggtggaagggtcagcggagccccagcaggaagggtgggccagccaggccattcttagtccctgggttggggaggcagggagctagggcagggaccaaatgaacagaaagtctcagcccaggatggggcttcttcaacagggcccctgccctcctgaagcctcagtccttcaccttgccaggtgccgtttctcttccgtgaaggccactgcccaggtccccagtgcgccccctagtggccatagcctggttaaagttccccagtgcctccttgtgcatagaccttcttctcccacccccttctgcccctgggtccccggccatccagcggggctgccagagaaccccagacctgcccttacagtagtgtagcgccccctccctctttcggctggtgtagaatagccagtagtgtagtgcggtgtgcttttacgtgatggcgggtgggcagcgggcggcgggctccgcgcagccgtctgtccttgatctgcccgcggcggcccgtgttgtgttttgtgctgtgtccacgcgctaaggcgaccccctcccccgtactgacttctcctataagcgcttctcttcgcatagtcacgtagctcccaccccaccctcttcctgtgtctcacgcaagttttatactctaatatttatatggctttttttcttcgacaaaaaaataataaaacgtttcttctgaaaagctg

SEQ ID NO: 172195 - DNA, 2588 bp, Homo sapiens
  Payload ID: 13855
  Gene Symbol: PCDHGB2
  Gene Name: protocadherin gamma subfamily B, 2
  Uniprot ID: Q9Y5G2
  ENST ID: ENST00000622527
  CDS Start-End: 95-2530
aaaacaaaagcaggaaaagtgaccttagcccggattctgccatccccggaaggcttattcctcctatgggcaaaggagcaaagggagccagaagatgaaagcgagctcagggaggtgcgggctggtgcggtggctgcaggtactgttgcccttcctgttgtctttgttccccggggctctcccagtccagatccgctattcaattccagaggagctggccaaaaactcggtcgtaggaaacctcgccaaggatctggggctcagcgtccgggacttgccagcccggaagctgcgggttagcgcggagaaggaatatttcacagtaaacccagaaagcggagacttacttgtgagtgacagaatagaccgagaacagatatgcgggaagcagcctctgtgtgttctggatttcgatactgtcgctgaaaatccactaaatattttctacatagcagtaattgtgcaggatataaatgataataccccgctattcaaacagactaagattaatttaaaaattggcgaatccactaagccaggtacaacatttccacttgacccagccctggattcagatgttggtcctaactcactacaaagataccaccttaatgacaacgagtactttgatctcgctgagaaacagactccagatggtcgtaaatatcctgagttgattctaaaacactctctggacagagaagagcacagtttacatcaattggtcctcacagctgtggatggcggagacccacctcaaagtggcacgacccaaatccgaatcaaagtcacggatgccaacgataaccctccagtgttcagccaggacgtgtacagggtcaccctgagggaggacgtgccgccgggcttctttgtgcttcaagtgacagccaccgaccgggatgaaggcataaacgcagagatcacctactcctttcataatgtggacgaacaagtgaaacactttttcaacttaaatgaaaaaacaggagaaatcacgacaaaggatgatttggattttgagattgcaagtagttacactctgagtatcgaagcaaaagatcctggagatctagcagcccactgcagtatccaagttgaaattcttgatgacaacgattgtgcacctgaagttattgtgacttcagtatctactcccctaccggaggattcgccaccaggaacagtgatcgccttgataaaaacgagagacagagactctggagaaaatggagaagtttactgccaagtgttgggaaatgccaagtttattttgaaatcttcctcaaagaactattacaaactagtgacagacggcgctctggaccgggaggagatcccagaatacaatctcaccatcacagccaccgacgggggcaagccgcccctctcctccagcataattgtcaccctgcacatctccgacgtcaacgataatgccccagttttccaacagacttcctacatggttcacgtggcagagaacaatcctcctggcgcctctatcgctcaaatcagtgcctctgaccctgacttgggccccagtggccaagtttcctactccatcgtagcgagcgacctgaagccgcgggagattttatcctacgtgtccgtgagcgcgcagagcggggtggtgttcgcgcagcgcgccttcgatcatgagcagctgcgcgccttcgagctcacactgcaggcccgcgaccagggctcgcccgcgctcagcgccaacgtgagcctgcgcgtgttagtgggcgacctcaatgacaatgcgccacgggtgctgtaccccgcgctggggcctgatggctccgccctcttcgatatggtgccacgcgccgcagagcccggctacctggtgaccaaggtggtggcggtggacgcagactcaggacacaacgcttggctgtcctaccacgtgctgcaggccagcgagcccgggctcttcagcctggggttgcgcacgggtgaggtgcgcacagcgcgtgccttgggcgacagggacgcggcccgccagcgcctgctggtcgctgtgcgtgatggaggacagccgccactctccgctacggccacgctgcacctaatcttcgcggatagcctgcaagaggtattgccagacctcagcgaccgccgggagccctctgacccccaggcaaaactgcagttttacctggttgtggccttggccttgatctcagtgctcttcttcctcgcggtgattctggcaatctccctgcgcctgcgactctcttccaggtcagatgcttgggactgttttcagcctggtctcagctccaagcctggacctggggttctccccaattacagtgagggtacattgccctattcctacaacctgtgtgttgcctcacaatcagccaagacagagttcaattttctgaacataaccccggaattggttcccgcgcaagatctcgtctgtgacaatgcctcttgggaacaaaatacaaatcatggagccgctggggtcccttttgcctcagatactattttgaaggtgagctttaattaatttattttcacttctggttttattgtttcacctaatttgggtaggaagttccactgcg

SEQ ID NO: 172196 - DNA, 4727 bp, Homo sapiens
  Payload ID: 13856
  Gene Symbol: PCDHGB3
  Gene Name: protocadherin gamma subfamily B, 3
  Uniprot ID: Q9Y5G1
  ENST ID: ENST00000576222
  CDS Start-End: 132-2921
cagcggagacacccattagagaacccaagcacaaagacaaagcaaatagttggtcctgctcggagaactcttgggattatttaaagatctcctctcctcggatttagaaaggcaaaggcgcagagagcgggatgggaaatagctccggatggaggggcccagcagggcagaggcgaatgctatttctcttcctgctctctttgttagaccaggctctctccgaaccgatccgctacgctattcccgaggagctggacaggggctcgctggtagggaacctcgccaaggacctggggtttggcgtgggggatttacctactaggaacctgcgggttattgcagagaagaaattctttaccgtgagccccgaaaatgggaacttacttgtgagcgaccgtatagaccgagaggagatttgtggcaagaagtcgacgtgtgttctggaatttgaaatggttgctgaaaagcctttaaacttttttcatgtaactgtgctgatccaggatattaacgacaacccaccgacctttagccaaaatatcactgagctggaaatcagcgaactggctctcactggagccacatttgccctggaatctgcgcaagatcctgatgtaggtgtcaattcgctgcagcagtactacctcagccctgatccgcacttctctttgattcagaaggagaacctggatggcagtaggtacccagagctagtactgaaagcacccctggacagggaagagcagccacatcaccacctggtcctcacagctgtggatgggggcgagccctccagaagctgtaccacccagatcagggtaattgtcgcagatgcaaatgataaccccccagtatttactcaggacatgtacagggtcaatgttgcagagaacctgcccgctggctcctccgtattaaaagtgatggccattgacatggatgagggcatcaatgccgaaatcatctatgccttcatcaatattggcaaggaagtgagacaactgttcaagctggacagtaaaacgggggaactcaccactattggagaactggactttgaagagagagatagctacacaattggggtggaagcaaaggatggtggacatcacactgcatattgtaaagtacagatagatatttcagatgaaaatgacaatgccccggagataaccctggcttctgaatcccaacatatacaagaagatgctgagctggggactgccgttgccctgatcaaaacacatgatctagattctggatttaatggagaaatcctatgccaactaaaaggaaacttcccctttaaaatcgttcaagataccaaaaacacatacaggttggtgacagatggagccctggaccgggagcagatcccagaatacaatgtgacgatcacagctaccgacaaaggcaatccaccgctctcctccagcaagaccatcactctgcacatccttgatgtcaacgacaacgttcccgttttccaccaggcctcctacaccgtgcatgtagctgagaacaatccgcctggagcctccattgcgcatgtcagagcctcggatcccgacttgggacctaatggccttgtctcctactacatcgtggccagtgacctggagccgcgggagctgtcgtcctacgtgtccgtgagcgcgcggagcggggtggtgttcgcgcagcgagccttcgaccacgagcagctgcgtgccttcgagctcactctgcaggcccgcgaccagggctcgcctacgctcagcgccaacgtgagcctgcgcgtgttggtggacgaccgcaacgacaatgcaccgctggtgctgtacccagctctggggcccgaaggctctgcgctcttcgatatggtgccgcgctctgcagagcctggctacctggtgaccaaggtggtggcggtggacgcagactcgggatacaacgcctggctgtcctaccacattgtgcaggccagcgagcccgggctgttcagcctgggcctgcgcacgggtgaggtgcgcacggcgcgtaccttgggcgacagggaggccgcccgccagcgcctgctggtcactgtgcgtgatggaggacagcagcctctttcagccaccgtcatgctgcacctaatcttcgcagatagcttgcaagagatacaacctgaccttagcgaccgccccactccctctgaccctcaggcggagctacagtttcacctagtagtggcgttggccttgatctcagtgctcttcctcctcgcggtgattctggcaatctccctgcgcctgcgatgctcctccagacccgccactgagggctactttcagcctggtgtctgcttcaagactgtacctggagttctccccacctacagcgaaaggactttgccttattcctacaatccgtgtgctgcctcacattcctcaaacaccgagtttaaatttctcaatataaaggctgaaaatgctgcaccacaagatcttctatgtgatgaagcctcttggtttgaaagtaatgacaatccagaaatgccttctaattcaggcaatttgcaaaagcaagccccgcccaacacggactggcgtttctctcaggcccagagacccggcaccagcggctcccaaaatggcgatgacaccggcacctggcccaacaaccagtttgacacagagatgctgcaagccatgatcttggcgtccgccagtgaagctgctgatgggagctccaccctgggagggggtgccggcaccatgggattgagcgcccgctacggaccccagttcaccctgcagcacgtgcccgactaccgccagaatgtctacatcccaggcagcaatgccacactgaccaacgcagctggcaagcgggatggcaaggccccagcaggtggcaatggcaacaagaagaagtcgggcaagaaggagaagaagtaacatggaggccaggccaagagccacagggcggcctctccccaaccagcccagcttctccttacctgcacccaggcctcagagtttcagggctaacccccagaatactggtaggggccaaggccatgctccccttgggaaacagaaacaagtgcccagtcagcacctaccccttcccccccagggggttgaatatgcaaaagcagttccgctgggaacccccatccaatcaactgctgtacccatgggggtagtggggttactgtagacaccaagaaccatttgccacaccccgtttagttacagctgaactcctccatcttccaaatcaatcaggcccatccatcccatgcctccctcctccccaccccactccaacagttcctctttcccgagtaaggtggttggggtgttgaagtaccaagtaacctacaagcctcctagttctgaaaagttggaagggcatcatgacctcttggcctctcctttgattctcaatcttcccccaaagcatggtttggtgccagccccttcacctccttccagagcccaagatcaatgctcaagttttggaggacatgatcaccatccccatggtactgatgcttgctggatttagggagggcattttgctaccaagcctcttcccaacgccctggggaccagtcttctgttttgtttttcattgtttgacgtttccactgcatgccttgacttcccccacctcctcctcaaacaagagactccactgcatgttccaagacagtatggggtggtaagataaggaagggaagtgtgtggatgtggatggtgggggcatggacaaagcttgacacatcaagttatcaaggccttggaggaggctctgtatgtcctcaggggactgacaacatcctccagattccagccataaaccaataactaggctggacccttcccactacataatagggctcagcccaggcagccagctttgggctgagctaacaggaccaatggattaaactggcatttcagtccaaggaagctcgaagcaggtttaggaccaggtccccttgagaggtcagaggggcctctgtgggtgctgggtactccagaggtgccactggtggaagggtcagcggagccccagcaggaagggtgggccagccaggccattcttagtccctgggttggggaggcagggagctagggcagggaccaaatgaacagaaagtctcagcccaggatggggcttcttcaacagggcccctgccctcctgaagcctcagtccttcaccttgccaggtgccgtttctcttccgtgaaggccactgcccaggtccccagtgcgccccctagtggccatagcctggttaaagttccccagtgcctccttgtgcatagaccttcttctcccacccccttctgcccctgggtccccggccatccagcggggctgccagagaaccccagacctgcccttacagtagtgtagcgccccctccctctttcggctggtgtagaatagccagtagtgtagtgcggtgtgcttttacgtgatggcgggtgggcagcgggcggcgggctccgcgcagccgtctgtccttgatctgcccgcggcggcccgtgttgtgttttgtgctgtgtccacgcgctaaggcgaccccctcccccgtactgacttctcctataagcgcttctcttcgcatagtcacgtagctcccaccccaccctcttcctgtgtctcacgcaagttttatactctaatatttatatggctttttttcttcgacaaaaaaataataaaacgtttcttctgaaaagctg

SEQ ID NO: 172197 - DNA, 2445 bp, Homo sapiens
  Payload ID: 13856
  Gene Symbol: PCDHGB3
  Gene Name: protocadherin gamma subfamily B, 3
  ENST ID: ENST00000618934
  CDS Start-End: 1-2445
atgggaaatagctccggatggaggggcccagcagggcagaggcgaatgctatttctcttcctgctctctttgttagaccaggctctctccgaaccgatccgctacgctattcccgaggagctggacaggggctcgctggtagggaacctcgccaaggacctggggtttggcgtgggggatttacctactaggaacctgcgggttattgcagagaagaaattctttaccgtgagccccgaaaatgggaacttacttgtgagcgaccgtatagaccgagaggagatttgtggcaagaagtcgacgtgtgttctggaatttgaaatggttgctgaaaagcctttaaacttttttcatgtaactgtgctgatccaggatattaacgacaacccaccgacctttagccaaaatatcactgagctggaaatcagcgaactggctctcactggagccacatttgccctggaatctgcgcaagatcctgatgtaggtgtcaattcgctgcagcagtactacctcagccctgatccgcacttctctttgattcagaaggagaacctggatggcagtaggtacccagagctagtactgaaagcacccctggacagggaagagcagccacatcaccacctggtcctcacagctgtggatgggggcgagccctccagaagctgtaccacccagatcagggtaattgtcgcagatgcaaatgataaccccccagtatttactcaggacatgtacagggtcaatgttgcagagaacctgcccgctggctcctccgtattaaaagtgatggccattgacatggatgagggcatcaatgccgaaatcatctatgccttcatcaatattggcaaggaagtgagacaactgttcaagctggacagtaaaacgggggaactcaccactattggagaactggactttgaagagagagatagctacacaattggggtggaagcaaaggatggtggacatcacactgcatattgtaaagtacagatagatatttcagatgaaaatgacaatgccccggagataaccctggcttctgaatcccaacatatacaagaagatgctgagctggggactgccgttgccctgatcaaaacacatgatctagattctggatttaatggagaaatcctatgccaactaaaaggaaacttcccctttaaaatcgttcaagataccaaaaacacatacaggttggtgacagatggagccctggaccgggagcagatcccagaatacaatgtgacgatcacagctaccgacaaaggcaatccaccgctctcctccagcaagaccatcactctgcacatccttgatgtcaacgacaacgttcccgttttccaccaggcctcctacaccgtgcatgtagctgagaacaatccgcctggagcctccattgcgcatgtcagagcctcggatcccgacttgggacctaatggccttgtctcctactacatcgtggccagtgacctggagccgcgggagctgtcgtcctacgtgtccgtgagcgcgcggagcggggtggtgttcgcgcagcgagccttcgaccacgagcagctgcgtgccttcgagctcactctgcaggcccgcgaccagggctcgcctacgctcagcgccaacgtgagcctgcgcgtgttggtggacgaccgcaacgacaatgcaccgctggtgctgtacccagctctggggcccgaaggctctgcgctcttcgatatggtgccgcgctctgcagagcctggctacctggtgaccaaggtggtggcggtggacgcagactcgggatacaacgcctggctgtcctaccacattgtgcaggccagcgagcccgggctgttcagcctgggcctgcgcacgggtgaggtgcgcacggcgcgtaccttgggcgacagggaggccgcccgccagcgcctgctggtcactgtgcgtgatggaggacagcagcctctttcagccaccgtcatgctgcacctaatcttcgcagatagcttgcaagagatacaacctgaccttagcgaccgccccactccctctgaccctcaggcggagctacagtttcacctagtagtggcgttggccttgatctcagtgctcttcctcctcgcggtgattctggcaatctccctgcgcctgcgatgctcctccagacccgccactgagggctactttcagcctggtgtctgcttcaagactgtacctggagttctccccacctacagcgaaaggactttgccttattcctacaatccgtgtgctgcctcacattcctcaaacaccgagtttaaatttctcaatataaaggctgaaaatgctgcaccacaagatcttctatgtgatgaagcctcttggtttgaaagtaatgacaatccagaaatgccttctaattcaggcaatttgcaaaaggtgagtttcttcaaacctttccttccataa

SEQ ID NO: 172198 - DNA, 4578 bp, Homo sapiens
  Payload ID: 13857
  Gene Symbol: PCDHGB4
  Gene Name: protocadherin gamma subfamily B, 4
  Uniprot ID: Q9UN71
  ENST ID: ENST00000519479
  CDS Start-End: 1-2772
atggggagcggcgccggggagctgggccgggctgagaggctgccagtgctctttctcttcctgctgtctttgttctgcccggcgctctgtgagcagatccgctacaggattcccgaggaaatgcccaagggctccgtagtggggaacctcgccacggacctggggttcagcgtccaggagttaccgactcgaaaactgcgcgtcagttcggagaagccttacttcaccgtgagcgcagagagcggggagttgcttgtgagcagcaggctagacagggaggagatatgcgggaagaagccagcttgtgctctggaatttgaggctgttgctgaaaatccactgaacttttatcacgtgaatgtggagatcgaggacattaatgaccacacgccaaaattcacgcaaaattcctttgagctgcaaataagtgagtctgcacagcctggcacacgatttatattaggatctgcccatgatgcggatattggtagcaacacactgcagaattaccaactcagtcccagtgatcatttctcactgataaataaagagaaatcagatggcagtaaataccctgagatggtattgaagacacctttggacagagaaaagcagaaatcctaccacttgactttgactgccttggactttggagctccacccctaagcagcactgcacagatacacgttctagtgactgatgccaatgataatgctccagtgttcagtcaagacgtatacagggtgagcctttcagaaaacgtgtacccggggaccacggtgctacaggtgactgccacggaccaggatgagggtgtcaatgccgagattactttctctttcagtgaagctagccagatcacccaatttgacctgaactctaacaccggggaaattactgttttaaatacattagattttgaagaagtcaaagaatattccatagttttggaagcaagggacggtggaggaatgattgcgcaatgcacagtggaggtagaagtcatagatgaaaatgacaacgccccagaagtgatattccagtctctacccaacctaattatggaggacgccgagctgggaacacatattgctttgctcaaagtccgtgacaaggattccagacacaatggagaagtgacttgtaaattggaaggtgatgttccatttaaaatattaacttcttcaagaaacacgtataaattagtgacagatgctgttctagaccgcgagcagaatccagagtacaatataaccgttacggcaacagatcggggcaagcctcccctctcctccagttccagcatcaccctgcacattggtgatgtaaatgacaacgctccggttttctcacagtcttcctatatagtccacgtggccgagaacaacccgcctggagcctctatttcacaagtcagggcttctgatccggacttggggcccaacggccaagtctcttactgcatcatggccagtgacctggagcagcgggagctgtcatcctacgtgtccataagcgcggagagcggggtggtgttcgcgcagcgcgccttcgaccacgagcagctgcgcgccttcgaactcacactgcaggcccgcgaccagggctcgccagcgctcagcgcgaacgtgagcctgcgcgtgttagtggacgaccgcaacgacaatgcgccacgggtgctgtaccccgcgctgggtcccgacggctctgcgctcttcgatatggtgccgcacgctgcagagcctggctacttggtgaccaaggtagtggcggtggacgcagactcaggacacaacgcctggctgtcctaccacgtgctgcaggctagcgagcccgggctcttcagcctggggctgcgcacgggcgaagtgcgcacagcgcgtgccttaggcgacagggacgccgtccgccagcgccttctggtcgccgtgcgtgacggtggacagccaccactctcggccactgccacgttgcacctggtcttcgccgacagcttgcaggaggtgctgccggatatcactgaccgccccgacccctctgacctccaggctgagctgcagttttacctagtggtggccttggccttgatctcagtgctcttcctcgtggccatgattctggccattgccttgcgcctgcgacgctcctccagccccgcctcctggagctgcttccagcctggtctctgtgttaaatccgaatccgtggttccccccaactacagcgaggggactttgccttattcctacaatctatgtgttgcacatacaggaaagacggagtttaatttcctaaaatgtagtgagcagttgagttcaggacaagacatactttgcggtgattcatctggggccttatttccactttgtaattccagtgaattgacttcccatcagcaagccccgcccaacacggactggcgtttctctcaggcccagagacccggcaccagcggctcccaaaatggcgatgacaccggcacctggcccaacaaccagtttgacacagagatgctgcaagccatgatcttggcgtccgccagtgaagctgctgatgggagctccaccctgggagggggtgccggcaccatgggattgagcgcccgctacggaccccagttcaccctgcagcacgtgcccgactaccgccagaatgtctacatcccaggcagcaatgccacactgaccaacgcagctggcaagcgggatggcaaggccccagcaggtggcaatggcaacaagaagaagtcgggcaagaaggagaagaagtaacatggaggccaggccaagagccacagggcggcctctccccaaccagcccagcttctccttacctgcacccaggcctcagagtttcagggctaacccccagaatactggtaggggccaaggccatgctccccttgggaaacagaaacaagtgcccagtcagcacctaccccttcccccccagggggttgaatatgcaaaagcagttccgctgggaacccccatccaatcaactgctgtacccatgggggtagtggggttactgtagacaccaagaaccatttgccacaccccgtttagttacagctgaactcctccatcttccaaatcaatcaggcccatccatcccatgcctccctcctccccaccccactccaacagttcctctttcccgagtaaggtggttggggtgttgaagtaccaagtaacctacaagcctcctagttctgaaaagttggaagggcatcatgacctcttggcctctcctttgattctcaatcttcccccaaagcatggtttggtgccagccccttcacctccttccagagcccaagatcaatgctcaagttttggaggacatgatcaccatccccatggtactgatgcttgctggatttagggagggcattttgctaccaagcctcttcccaacgccctggggaccagtcttctgttttgtttttcattgtttgacgtttccactgcatgccttgacttcccccacctcctcctcaaacaagagactccactgcatgttccaagacagtatggggtggtaagataaggaagggaagtgtgtggatgtggatggtgggggcatggacaaagcttgacacatcaagttatcaaggccttggaggaggctctgtatgtcctcaggggactgacaacatcctccagattccagccataaaccaataactaggctggacccttcccactacataatagggctcagcccaggcagccagctttgggctgagctaacaggaccaatggattaaactggcatttcagtccaaggaagctcgaagcaggtttaggaccaggtccccttgagaggtcagaggggcctctgtgggtgctgggtactccagaggtgccactggtggaagggtcagcggagccccagcaggaagggtgggccagccaggccattcttagtccctgggttggggaggcagggagctagggcagggaccaaatgaacagaaagtctcagcccaggatggggcttcttcaacagggcccctgccctcctgaagcctcagtccttcaccttgccaggtgccgtttctcttccgtgaaggccactgcccaggtccccagtgcgccccctagtggccatagcctggttaaagttccccagtgcctccttgtgcatagaccttcttctcccacccccttctgcccctgggtccccggccatccagcggggctgccagagaaccccagacctgcccttacagtagtgtagcgccccctccctctttcggctggtgtagaatagccagtagtgtagtgcggtgtgcttttacgtgatggcgggtgggcagcgggcggcgggctccgcgcagccgtctgtccttgatctgcccgcggcggcccgtgttgtgttttgtgctgtgtccacgcgctaaggcgaccccctcccccgtactgacttctcctataagcgcttctcttcgcatagtcacgtagctcccaccccaccctcttcctgtgtctcacgcaagttttatactctaatatttatatggctttttttcttcgacaaaaaaataataaaacgtttcttctgaaaagctg

SEQ ID NO: 172199 - DNA, 4725 bp, Homo sapiens
  Payload ID: 13857
  Gene Symbol: PCDHGB4
  Gene Name: protocadherin gamma subfamily B, 4
  Uniprot ID: Q9UN71
  ENST ID: ENST00000615384
  CDS Start-End: 188-2599
agggcagccccagctcagactccccagcgccagcctttacaccgcttcctcctcggaaaaagaagaattttttcttgaactggaactgcaactaaagtccgttcggagatccaaaaatctgcaatacagaggttatttgtaacccggcgtctccaggctggtgagcaagctgaggagagcaagagggatggggagcggcgccggggagctgggccgggctgagaggctgccagtgctctttctcttcctgctgtctttgttctgcccggcgctctgtgagcagatccgctacaggattcccgaggaaatgcccaagggctccgtagtggggaacctcgccacggacctggggttcagcgtccaggagttaccgactcgaaaactgcgcgtcagttcggagaagccttacttcaccgtgagcgcagagagcggggagttgcttgtgagcagcaggctagacagggaggagatatgcgggaagaagccagcttgtgctctggaatttgaggctgttgctgaaaatccactgaacttttatcacgtgaatgtggagatcgaggacattaatgaccacacgccaaaattcacgcaaaattcctttgagctgcaaataagtgagtctgcacagcctggcacacgatttatattaggatctgcccatgatgcggatattggtagcaacacactgcagaattaccaactcagtcccagtgatcatttctcactgataaataaagagaaatcagatggcagtaaataccctgagatggtattgaagacacctttggacagagaaaagcagaaatcctaccacttgactttgactgccttggactttggagctccacccctaagcagcactgcacagatacacgttctagtgactgatgccaatgataatgctccagtgttcagtcaagacgtatacagggtgagcctttcagaaaacgtgtacccggggaccacggtgctacaggtgactgccacggaccaggatgagggtgtcaatgccgagattactttctctttcagtgaagctagccagatcacccaatttgacctgaactctaacaccggggaaattactgttttaaatacattagattttgaagaagtcaaagaatattccatagttttggaagcaagggacggtggaggaatgattgcgcaatgcacagtggaggtagaagtcatagatgaaaatgacaacgccccagaagtgatattccagtctctacccaacctaattatggaggacgccgagctgggaacacatattgctttgctcaaagtccgtgacaaggattccagacacaatggagaagtgacttgtaaattggaaggtgatgttccatttaaaatattaacttcttcaagaaacacgtataaattagtgacagatgctgttctagaccgcgagcagaatccagagtacaatataaccgttacggcaacagatcggggcaagcctcccctctcctccagttccagcatcaccctgcacattggtgatgtaaatgacaacgctccggttttctcacagtcttcctatatagtccacgtggccgagaacaacccgcctggagcctctatttcacaagtcagggcttctgatccggacttggggcccaacggccaagtctcttactgcatcatggccagtgacctggagcagcgggagctgtcatcctacgtgtccataagcgcggagagcggggtggtgttcgcgcagcgcgccttcgaccacgagcagctgcgcgccttcgaactcacactgcaggcccgcgaccagggctcgccagcgctcagcgcgaacgtgagcctgcgcgtgttagtggacgaccgcaacgacaatgcgccacgggtgctgtaccccgcgctgggtcccgacggctctgcgctcttcgatatggtgccgcacgctgcagagcctggctacttggtgaccaaggtagtggcggtggacgcagactcaggacacaacgcctggctgtcctaccacgtgctgcaggctagcgagcccgggctcttcagcctggggctgcgcacgggcgaagtgcgcacagcgcgtgccttaggcgacagggacgccgtccgccagcgccttctggtcgccgtgcgtgacggtggacagccaccactctcggccactgccacgttgcacctggtcttcgccgacagcttgcaggaggtgctgccggatatcactgaccgccccgacccctctgacctccaggctgagctgcagttttacctagtggtggccttggccttgatctcagtgctcttcctcgtggccatgattctggccattgccttgcgcctgcgacgctcctccagccccgcctcctggagctgcttccagcctggtctctgtgttaaatccgaatccgtggttccccccaactacagcgaggggactttgccttattcctacaatctatgtgttgcacatacaggaaagacggagtttaatttcctaaaatgtagtgagcagttgagttcaggacaagacatactttgcggtgattcatctggggccttatttccactttgtaattccagtgaattgacttcccatcaggtgagtttcctttaagtataatttaatgctcattgcctacccatttctccatattcacaagaaaatatacatatttgcaggaaaatatataatttttagatgtcatggatcattttaggaaagttgtagtcagttaaaaagctgtcatatcattctacaaaggaggagtaaagtaggagcaattgtgtggcccaacatttgtttgttttttagccaagcttagatttataaagcaatgagggtgtggttttaaccacaaagtgaaagtgttagacagttgttggctctctcctaaaaagtgaatgagatttttcctatacattttccttcttgttgactaatatatgatgaatacttttttcagcttggatataccataaatataaaaataataaagccaaagaatttaagctaaaattcaacacttttcttaactaatttaactggtatggtctccatagtagtccactgttttgtttcctgtgttaacttcccttttgtttcaaaagctcttagaataaggagtcaactggatttttatgtccatggaccccttgtgattatatgcagtgtacgctgtgtgtgcgtgtgtgtgtgtgtgtgtgtgagagagatccttttacttagaaaaaggtctactatgctcattagaagatcaaaagcagattctccttacttgtaacataggagtttcaggattaatctgtattcaagctcattctatatccttcatcaaagaaaagacaatgttttgtgtctgttgtccctctcacacacagccctaatatataatgtgtaactgccttatctgcagccctaaactaatatagctagaggtcttctaatcattctcctacctctaggaaagaaatatagtcttgaaaactgccaatctggtgtgcatacaaaatatatacaaaataccaaggaacattatatgagccttttgctaggtatatctaagcaactgcttcagttaatggccactttacaaattgctgaaagaaggaaacgtctttcgattcttttttttttctttttttttttttgagacagagtctctgtctgttactcaggctgtagtgcagtggcacaatgatagctccctccagcctcaaactcctgggctcaagcattccttctgcatcagcctcctgactagctggaactcaggctcatgccaccagacctggctaatttttctgttttcagtagagaaaatattttctttcactaatttaactggtatggtttccattgtctacccagttttccatatgcataagaaaatatattcacaggaaaatataaagttttcagatttcatgagtggttttaagaaagttttagtcagtgaaaaaactatcataccagtcttcaaaggaagggtgaaataagttcatctgctacgttgcccaggctggtcttgaagggaaacagacttttttgtagtcatacttatcctttggcttcttagtaagtattatatagtcattactttttgcagttttttagatcaaagtgttaatgtaggtaaagttaattttagaatatatgtaaaagtcaagtctgctttaaatttaatcatctctttggtgaaagggatgggatggagctttgctttttatcatatattcatctgtacctttcaagtattcaaatagaaaaatataaacaatgtaaataaaatagcaaaacaatgtaatatctcataaaactgcaatggtaaaagcatttatcctattgaaattccacaatttttatttgaaaatattatcgacatgtaattcaagtggcatttagaagaataatttaaaagcaacaactctatagaaagcttgtaaaatgattaagtagtttaaaccaaataaaacaatttctgagtcagtcatctccagtaggtctattttagtctcaagataaattcatttctggtgacaactgaagttcttagttatttgttagtatatattggagacatttacaataaagcttagagcacaatgggaaatgaaagtatcatgttttttttaagaccaaatgtattgcagaaatgtgagtaatttaatccgatgctacaatctgatcattctgatctaatctgatcatttaataacactaaataaaaccttcatctcaca

SEQ ID NO: 172200 - DNA, 4578 bp, Homo sapiens
  Payload ID: 13858
  Gene Symbol: PCDHGB5
  Gene Name: protocadherin gamma subfamily B, 5
  Uniprot ID: Q9Y5G0
  ENST ID: ENST00000617380
  CDS Start-End: 1-2772
atggggagcggcgccggggagctgggccgggctgagaggctgccagtgctctttctcttcctgctgtctttgttctgcccggcgctctgtgagcagatccgctacaggattcccgaggaaatgcccaagggctccgtagtggggaacctcgccacggacctggggttcagcgtccaggagttaccgactcgaaaactgcgcgtcagttcggagaagccttacttcaccgtgagcgcagagagcggggagttgcttgtgagcagcaggctagacagggaggagatatgcgggaagaagccagcttgtgctctggaatttgaggctgttgctgaaaatccactgaacttttatcacgtgaatgtggagatcgaggacattaatgaccacacgccaaaattcacgcaaaattcctttgagctgcaaataagtgagtctgcacagcctggcacaagatttatactagaagtagcagaagatgcagatattggcttaaactctctgcagaagtataaactctctcttaacccaagtttctcattaataattaaggagaaacaggatggtagtaaatacccggaactggcactggagaaaaccttagaccgggaacaacagagttaccatcgtttagtcctgactgccttggacggtggacatccacccctaagcggcaccactgagctccggatccaggtaaccgacgccaatgataatcccccggtattcaaccgagacgtgtacagagtcagccttcgggaaaacgtgccaccaggcaccactgtgttgcaagtgtcagccactgaccaagacgagggcatcaactcagaaattacttattccttctacagaaccgggcaaatctttagtctgaattcaaagagcggagaaattaccactcaaaagaaactggattttgaagagaccaaggaatattcaatggttgtagaagggagggatggtggtggactggttgcacaatgtacagttgaaattaatattcaagatgaaaatgacaatagcccagaagttacattccattctctacttgaaatgattctggaaaacgcggtgcctggaacactaattgctttgatcaaaatacatgaccaagattctggggaaaatggggaggttaattgtcaattacaaggcgaagtcccttttaagattatctcttcatccaaaaattcgtataagttggtaacagatggaaccctagaccgagagcaaaccccggagtacaatgtcaccatcacagccacagacaggggcaagccgcccctctcctccagcataagcgtcatcctacatatcagagacgtcaacgataacgctccggttttccaccaggcgtcctacttagtcagtgtacccgaaaacaaccctcctggggcctccatcgcgcaagtctgcgcctcggacctggacttggggttgaacggccaagtctcctactctatcatggccagcgacctagagcctctggcactggcctcttacgtgtccatgagcgcgcaaagtggggtggtgttcgcgcagcgcgcctttgactacgagcagctgcgcaccttcgaactcacactacaggcccgcgaccagggctcgcctgcgctcagcgcaaacgtgagcctgcgcgtgttggtgggcgaccgaaacgacaacgcaccgcgggtgctgtaccccgcgctgggtcccgacggctctgcgctcttcgatatggtgccgcgcgctgcagagcccggctacctggtgaccaaggtagtggccgtggacgcagactcaggacacaacgcctggctgtcctaccacgtgctgcaggctagcgagcccgggctcttcagcctggggctgcgcacaggagaggtgcgcacagcgcgtgccttgggcgacagggacgcggcccgccagcgcctgctggttgctgtgcgtgatggtggacagccgccactctccgccaccgccacgctgcacttggtctttgctgacagcttgcaggaggtgctgccggatatcactgaccgccctgtaccctctgacccccaggctgagctgcagttttacctagtggtggccttggccttgatctcagtgctcttcctcctggccgtgattctggccgttgccttgcgcctgcgacgctcctccagccctgccgcctggagctgcttccaacctggtctctgtgtcaagtctggacctgtggttccccccaactacagtcaggggactttgccttattcctacaacctatgtgttgcacatacaggaaagacggagtttaatttcctaaaatgtagtgagcaattgagttcaggacaagacatactttgtggtgattcatctggggccttatttccactttgtaattccagcgagtcgacttcccatcctgagttgcaagccccgcccaacacggactggcgtttctctcaggcccagagacccggcaccagcggctcccaaaatggcgatgacaccggcacctggcccaacaaccagtttgacacagagatgctgcaagccatgatcttggcgtccgccagtgaagctgctgatgggagctccaccctgggagggggtgccggcaccatgggattgagcgcccgctacggaccccagttcaccctgcagcacgtgcccgactaccgccagaatgtctacatcccaggcagcaatgccacactgaccaacgcagctggcaagcgggatggcaaggccccagcaggtggcaatggcaacaagaagaagtcgggcaagaaggagaagaagtaacatggaggccaggccaagagccacagggcggcctctccccaaccagcccagcttctccttacctgcacccaggcctcagagtttcagggctaacccccagaatactggtaggggccaaggccatgctccccttgggaaacagaaacaagtgcccagtcagcacctaccccttcccccccagggggttgaatatgcaaaagcagttccgctgggaacccccatccaatcaactgctgtacccatgggggtagtggggttactgtagacaccaagaaccatttgccacaccccgtttagttacagctgaactcctccatcttccaaatcaatcaggcccatccatcccatgcctccctcctccccaccccactccaacagttcctctttcccgagtaaggtggttggggtgttgaagtaccaagtaacctacaagcctcctagttctgaaaagttggaagggcatcatgacctcttggcctctcctttgattctcaatcttcccccaaagcatggtttggtgccagccccttcacctccttccagagcccaagatcaatgctcaagttttggaggacatgatcaccatccccatggtactgatgcttgctggatttagggagggcattttgctaccaagcctcttcccaacgccctggggaccagtcttctgttttgtttttcattgtttgacgtttccactgcatgccttgacttcccccacctcctcctcaaacaagagactccactgcatgttccaagacagtatggggtggtaagataaggaagggaagtgtgtggatgtggatggtgggggcatggacaaagcttgacacatcaagttatcaaggccttggaggaggctctgtatgtcctcaggggactgacaacatcctccagattccagccataaaccaataactaggctggacccttcccactacataatagggctcagcccaggcagccagctttgggctgagctaacaggaccaatggattaaactggcatttcagtccaaggaagctcgaagcaggtttaggaccaggtccccttgagaggtcagaggggcctctgtgggtgctgggtactccagaggtgccactggtggaagggtcagcggagccccagcaggaagggtgggccagccaggccattcttagtccctgggttggggaggcagggagctagggcagggaccaaatgaacagaaagtctcagcccaggatggggcttcttcaacagggcccctgccctcctgaagcctcagtccttcaccttgccaggtgccgtttctcttccgtgaaggccactgcccaggtccccagtgcgccccctagtggccatagcctggttaaagttccccagtgcctccttgtgcatagaccttcttctcccacccccttctgcccctgggtccccggccatccagcggggctgccagagaaccccagacctgcccttacagtagtgtagcgccccctccctctttcggctggtgtagaatagccagtagtgtagtgcggtgtgcttttacgtgatggcgggtgggcagcgggcggcgggctccgcgcagccgtctgtccttgatctgcccgcggcggcccgtgttgtgttttgtgctgtgtccacgcgctaaggcgaccccctcccccgtactgacttctcctataagcgcttctcttcgcatagtcacgtagctcccaccccaccctcttcctgtgtctcacgcaagttttatactctaatatttatatggctttttttcttcgacaaaaaaataataaaacgtttcttctgaaaagctg

SEQ ID NO: 172201 - DNA, 2670 bp, Homo sapiens
  Payload ID: 13858
  Gene Symbol: PCDHGB5
  Gene Name: protocadherin gamma subfamily B, 5
  Uniprot ID: Q9Y5G0
  ENST ID: ENST00000621169
  CDS Start-End: 142-2598
gcttcctcctcggaaaaagaatcgtttcctaaactggaactggaactaaagcccgttcggagatccaaaaatctacaatacagaggttatttgtaacctggcgtctccaggctggtgagcaagctgaggagagcaagagggatggggagcggcgccggggagctgggccgggctgagaggctgccagtgctctttctcttcctgctgtctttgttctgcccggcgctctgtgagcagatccgctacaggattcccgaggaaatgcccaagggctccgtagtggggaacctcgccacggacctggggttcagcgtccaggagttaccgactcgaaaactgcgcgtcagttcggagaagccttacttcaccgtgagcgcagagagcggggagttgcttgtgagcagcaggctagacagggaggagatatgcgggaagaagccagcttgtgctctggaatttgaggctgttgctgaaaatccactgaacttttatcacgtgaatgtggagatcgaggacattaatgaccacacgccaaaattcacgcaaaattcctttgagctgcaaataagtgagtctgcacagcctggcacaagatttatactagaagtagcagaagatgcagatattggcttaaactctctgcagaagtataaactctctcttaacccaagtttctcattaataattaaggagaaacaggatggtagtaaatacccggaactggcactggagaaaaccttagaccgggaacaacagagttaccatcgtttagtcctgactgccttggacggtggacatccacccctaagcggcaccactgagctccggatccaggtaaccgacgccaatgataatcccccggtattcaaccgagacgtgtacagagtcagccttcgggaaaacgtgccaccaggcaccactgtgttgcaagtgtcagccactgaccaagacgagggcatcaactcagaaattacttattccttctacagaaccgggcaaatctttagtctgaattcaaagagcggagaaattaccactcaaaagaaactggattttgaagagaccaaggaatattcaatggttgtagaagggagggatggtggtggactggttgcacaatgtacagttgaaattaatattcaagatgaaaatgacaatagcccagaagttacattccattctctacttgaaatgattctggaaaacgcggtgcctggaacactaattgctttgatcaaaatacatgaccaagattctggggaaaatggggaggttaattgtcaattacaaggcgaagtcccttttaagattatctcttcatccaaaaattcgtataagttggtaacagatggaaccctagaccgagagcaaaccccggagtacaatgtcaccatcacagccacagacaggggcaagccgcccctctcctccagcataagcgtcatcctacatatcagagacgtcaacgataacgctccggttttccaccaggcgtcctacttagtcagtgtacccgaaaacaaccctcctggggcctccatcgcgcaagtctgcgcctcggacctggacttggggttgaacggccaagtctcctactctatcatggccagcgacctagagcctctggcactggcctcttacgtgtccatgagcgcgcaaagtggggtggtgttcgcgcagcgcgcctttgactacgagcagctgcgcaccttcgaactcacactacaggcccgcgaccagggctcgcctgcgctcagcgcaaacgtgagcctgcgcgtgttggtgggcgaccgaaacgacaacgcaccgcgggtgctgtaccccgcgctgggtcccgacggctctgcgctcttcgatatggtgccgcgcgctgcagagcccggctacctggtgaccaaggtagtggccgtggacgcagactcaggacacaacgcctggctgtcctaccacgtgctgcaggctagcgagcccgggctcttcagcctggggctgcgcacaggagaggtgcgcacagcgcgtgccttgggcgacagggacgcggcccgccagcgcctgctggttgctgtgcgtgatggtggacagccgccactctccgccaccgccacgctgcacttggtctttgctgacagcttgcaggaggtgctgccggatatcactgaccgccctgtaccctctgacccccaggctgagctgcagttttacctagtggtggccttggccttgatctcagtgctcttcctcctggccgtgattctggccgttgccttgcgcctgcgacgctcctccagccctgccgcctggagctgcttccaacctggtctctgtgtcaagtctggacctgtggttccccccaactacagtcaggggactttgccttattcctacaacctatgtgttgcacatacaggaaagacggagtttaatttcctaaaatgtagtgagcaattgagttcaggacaagacatactttgtggtgattcatctggggccttatttccactttgtaattccagcgagtcgacttcccatcctgagttggtgagtttcatttatgtctattctttttcattacccacccaattttctgtatttacatgaaactatcgtacattttcaagtccaatgagttgtcttagggaagtcagagctgctcagaaagctgtcctacca

SEQ ID NO: 172202 - DNA, 4599 bp, Homo sapiens
  Payload ID: 13859
  Gene Symbol: PCDHGB6
  Gene Name: protocadherin gamma subfamily B, 6
  Uniprot ID: Q9Y5F9
  ENST ID: ENST00000520790
  CDS Start-End: 1-2793
atgggagggagctgcgcgcagaggcgccgggccggcccgcggcaggtgctatttcctttgctgctgcctttgttctaccccaccctgagtgagccgatccgctactcgattccggaggagctggccaagggctcggtggtggggaacctcgctaaggatctagggctcagtgtcctggatgtgtcggctcgcaagctgcgagtgagcgcggagaagctgcacttcagcgtagacgcggagagcggggacttacttgtgaagaaccgaatagaccgtgagcaaatatgcaaagagagaagaagatgtgagttgcaattggaagctgtggtggaaaatcctttaaatatttttcatgtcattgtggtgattgaggatgttaatgaccacgcccctcaatttgataaaaaggaaatacatttagaaattttcgaatctgcatccgctggtacacgactatcgcttgaccctgccacggatcctgatataaacataaactcaattaaagattataagataaactctaatccttatttttcattaatggttagagttaattccgatggtggcaaatacccagagttatctctggagaaactcctagaccgggaagaacagagatctcatagcttgatattgactgccttggacggaggggacccaccaagaagtgccaccgctcacatagaaatttctgtcaaggataccaatgataaccccccggttttcagcagagacgaatatagaattagtcttagtgaaaatctgccccctgggtcccctgtgttgcaagtgacagccactgaccaggatgagggggtcaatgctgagataaactactacttccgaagcactgcccagagcacaaaacatatgttctcattggatgagaaaacaggtatgattaagaataaccagtcatttgattttgaagatgtagaaaggtacaccatggaagtggaagcgaaggacggaggtggtctctctacccagtgtaaagtaatcatagaaatccttgatgaaaacgacaacagcccagaaataatcatcacttctctctctgatcagattttggagaattcacctccaggaatggttgttgccctcttcaaaacacgggatctggatttcggaggaaatggagaagtcaggtgtaatatagaaacagacattccattcaagatttattcttcttccaataactactacaaactggtgacagatggagccctggaccgagagcagacaccagaatacaatgtcaccatcgtagccactgacaggggcaagccgcctctttcttccagtagaagcatcaccttgtatgtcgctgacatcaacgacaacgccccagttttcgaccagacgtcctacgtggtccacgtggccgagaacaacccgccaggagcctccattgcgcaagtgagcgcctctgacccggatttggggctcaatggccacatctcctactctatagtggcgagtgacctagagcccctggcggtgtcgtcatacgtgtcagtgagcgcgcagagcggggtggtgttcgcgcagcgcgcctttgatcacgagcagctgcgcgccttcgcgctcacgctgcaggcccgcgaccacggctcgcccacgctcagcgccaacgtgagcctgcgcgtgttggtgggagaccgcaatgacaacgcaccgcgggtgctgtacccagctctgggtcctgacggctccgcgttcttcgatatggtacctcgctctgcagagcccggctacctagtgactaaggtggtagcggtggacgccgactcgggacacaacgcctggctgtcctaccacgtgctgcaggccagtgagcccggactcttcagcctggggctgcgcactggggaggtgcgcacggctcgagccttaggcgacagggacgcagcccgccagcgcctgctggtcgctgtgcgtgacggtggacagccgccactctctgccaccgccacgcttcatctggtcttcgcagacaacttgcaagagatactgccagacctcagcgaccgccctgtactctctgacccccaggctgaactgcagttttacctggtggtggccttggccttaatctcagtgctcttcctcctcgccgtgattctggccattgccttgcgcctgcgacgctctctcagccctgctacttgggactgcttccatcctggtctctgtgtcaagtctggacctgtagttccccccaactacagtgaggggactttgccttattcttataatctgtgcattgcacatacgggtacaaaagagtttaatttcctaaaatgcagtgtgcccctacattccaatgaagacatggtttgcagtgtttctcctggagccttaattccacctcatggtggggaggatttgacttcacatcctgagactctgacttcgcaagccccgcccaacacggactggcgtttctctcaggcccagagacccggcaccagcggctcccaaaatggcgatgacaccggcacctggcccaacaaccagtttgacacagagatgctgcaagccatgatcttggcgtccgccagtgaagctgctgatgggagctccaccctgggagggggtgccggcaccatgggattgagcgcccgctacggaccccagttcaccctgcagcacgtgcccgactaccgccagaatgtctacatcccaggcagcaatgccacactgaccaacgcagctggcaagcgggatggcaaggccccagcaggtggcaatggcaacaagaagaagtcgggcaagaaggagaagaagtaacatggaggccaggccaagagccacagggcggcctctccccaaccagcccagcttctccttacctgcacccaggcctcagagtttcagggctaacccccagaatactggtaggggccaaggccatgctccccttgggaaacagaaacaagtgcccagtcagcacctaccccttcccccccagggggttgaatatgcaaaagcagttccgctgggaacccccatccaatcaactgctgtacccatgggggtagtggggttactgtagacaccaagaaccatttgccacaccccgtttagttacagctgaactcctccatcttccaaatcaatcaggcccatccatcccatgcctccctcctccccaccccactccaacagttcctctttcccgagtaaggtggttggggtgttgaagtaccaagtaacctacaagcctcctagttctgaaaagttggaagggcatcatgacctcttggcctctcctttgattctcaatcttcccccaaagcatggtttggtgccagccccttcacctccttccagagcccaagatcaatgctcaagttttggaggacatgatcaccatccccatggtactgatgcttgctggatttagggagggcattttgctaccaagcctcttcccaacgccctggggaccagtcttctgttttgtttttcattgtttgacgtttccactgcatgccttgacttcccccacctcctcctcaaacaagagactccactgcatgttccaagacagtatggggtggtaagataaggaagggaagtgtgtggatgtggatggtgggggcatggacaaagcttgacacatcaagttatcaaggccttggaggaggctctgtatgtcctcaggggactgacaacatcctccagattccagccataaaccaataactaggctggacccttcccactacataatagggctcagcccaggcagccagctttgggctgagctaacaggaccaatggattaaactggcatttcagtccaaggaagctcgaagcaggtttaggaccaggtccccttgagaggtcagaggggcctctgtgggtgctgggtactccagaggtgccactggtggaagggtcagcggagccccagcaggaagggtgggccagccaggccattcttagtccctgggttggggaggcagggagctagggcagggaccaaatgaacagaaagtctcagcccaggatggggcttcttcaacagggcccctgccctcctgaagcctcagtccttcaccttgccaggtgccgtttctcttccgtgaaggccactgcccaggtccccagtgcgccccctagtggccatagcctggttaaagttccccagtgcctccttgtgcatagaccttcttctcccacccccttctgcccctgggtccccggccatccagcggggctgccagagaaccccagacctgcccttacagtagtgtagcgccccctccctctttcggctggtgtagaatagccagtagtgtagtgcggtgtgcttttacgtgatggcgggtgggcagcgggcggcgggctccgcgcagccgtctgtccttgatctgcccgcggcggcccgtgttgtgttttgtgctgtgtccacgcgctaaggcgaccccctcccccgtactgacttctcctataagcgcttctcttcgcatagtcacgtagctcccaccccaccctcttcctgtgtctcacgcaagttttatactctaatatttatatggctttttttcttcgacaaaaaaataataaaacgtttcttctgaaaagctg

SEQ ID NO: 172203 - DNA, 4601 bp, Homo sapiens
  Payload ID: 13859
  Gene Symbol: PCDHGB6
  Gene Name: protocadherin gamma subfamily B, 6
  Uniprot ID: Q9Y5F9
  ENST ID: ENST00000616430
  CDS Start-End: 183-2645
agaaagaagaaaaccagctcccacacagagcctcccggctgcgcagacctttcccagcacagcggattgccagctccgagacccgggactcctcctgtcctgggccgaatgctcttttagcgcggtagagtgcactttctccaactggaaaagcggggacccagcgagaacccgagcgaacgatgggagggagctgcgcgcagaggcgccgggccggcccgcggcaggtgctatttcctttgctgctgcctttgttctaccccaccctgagtgagccgatccgctactcgattccggaggagctggccaagggctcggtggtggggaacctcgctaaggatctagggctcagtgtcctggatgtgtcggctcgcaagctgcgagtgagcgcggagaagctgcacttcagcgtagacgcggagagcggggacttacttgtgaagaaccgaatagaccgtgagcaaatatgcaaagagagaagaagatgtgagttgcaattggaagctgtggtggaaaatcctttaaatatttttcatgtcattgtggtgattgaggatgttaatgaccacgcccctcaatttgataaaaaggaaatacatttagaaattttcgaatctgcatccgctggtacacgactatcgcttgaccctgccacggatcctgatataaacataaactcaattaaagattataagataaactctaatccttatttttcattaatggttagagttaattccgatggtggcaaatacccagagttatctctggagaaactcctagaccgggaagaacagagatctcatagcttgatattgactgccttggacggaggggacccaccaagaagtgccaccgctcacatagaaatttctgtcaaggataccaatgataaccccccggttttcagcagagacgaatatagaattagtcttagtgaaaatctgccccctgggtcccctgtgttgcaagtgacagccactgaccaggatgagggggtcaatgctgagataaactactacttccgaagcactgcccagagcacaaaacatatgttctcattggatgagaaaacaggtatgattaagaataaccagtcatttgattttgaagatgtagaaaggtacaccatggaagtggaagcgaaggacggaggtggtctctctacccagtgtaaagtaatcatagaaatccttgatgaaaacgacaacagcccagaaataatcatcacttctctctctgatcagattttggagaattcacctccaggaatggttgttgccctcttcaaaacacgggatctggatttcggaggaaatggagaagtcaggtgtaatatagaaacagacattccattcaagatttattcttcttccaataactactacaaactggtgacagatggagccctggaccgagagcagacaccagaatacaatgtcaccatcgtagccactgacaggggcaagccgcctctttcttccagtagaagcatcaccttgtatgtcgctgacatcaacgacaacgccccagttttcgaccagacgtcctacgtggtccacgtggccgagaacaacccgccaggagcctccattgcgcaagtgagcgcctctgacccggatttggggctcaatggccacatctcctactctatagtggcgagtgacctagagcccctggcggtgtcgtcatacgtgtcagtgagcgcgcagagcggggtggtgttcgcgcagcgcgcctttgatcacgagcagctgcgcgccttcgcgctcacgctgcaggcccgcgaccacggctcgcccacgctcagcgccaacgtgagcctgcgcgtgttggtgggagaccgcaatgacaacgcaccgcgggtgctgtacccagctctgggtcctgacggctccgcgttcttcgatatggtacctcgctctgcagagcccggctacctagtgactaaggtggtagcggtggacgccgactcgggacacaacgcctggctgtcctaccacgtgctgcaggccagtgagcccggactcttcagcctggggctgcgcactggggaggtgcgcacggctcgagccttaggcgacagggacgcagcccgccagcgcctgctggtcgctgtgcgtgacggtggacagccgccactctctgccaccgccacgcttcatctggtcttcgcagacaacttgcaagagatactgccagacctcagcgaccgccctgtactctctgacccccaggctgaactgcagttttacctggtggtggccttggccttaatctcagtgctcttcctcctcgccgtgattctggccattgccttgcgcctgcgacgctctctcagccctgctacttgggactgcttccatcctggtctctgtgtcaagtctggacctgtagttccccccaactacagtgaggggactttgccttattcttataatctgtgcattgcacatacgggtacaaaagagtttaatttcctaaaatgcagtgtgcccctacattccaatgaagacatggtttgcagtgtttctcctggagccttaattccacctcatggtggggaggatttgacttcacatcctgagactctgacttcggtgagtttctcttttttgtgtgtgatttatctaatagtctactagtttctcatattttaggcatactactttattttcatatctagaatcatatgtttaaaatccatagctttttacaatattttctcaatgttttttcaattatagttttcactatgtatttggttcataagttgctctatctttttgtaaaataatgtcaccagactgaagatattttgtctttgtcttttttttttttttttttttttgagatggagtctcgcactgttgcctaggctggagtgcagtggcgtgatctctgctcactgcaacctccgccttctgggttcaagcgattctcctgcctcagcctcccaagtagctgggattactggtgcccctcaccacagctaaattttttgtatttttagtagacatggggtttcactatgtcgaccaggctgttcagaaactcctgtcctcgtgatcctcccaccttggcctctcaaagtgctgggattacaggcgtgagccacaatattttgtcaagttctgactatcgaacagaagcagtggtcttggcatctaagaaaacaaacaagtaacctatctattcaaatttgcgaagacttagtgaatttacgatatcttatttatatatttttaaagcctaaaaatattcagaagacaggcccagtggctcacacctataatcacagcactttgataggctgaatcggaaagtatcacttgagcccaagaattgagaccagcctgggcaatatagggagaccccccatctctactaaaacaacaacaacaaaaaaaaacattagcagagtgtggtagcattcccctgtggtcccagctacttgggaggctgagctgggtggattgcttggtcctgggaggtcaaggttgcagtgagccctgatcttgccactgcactccagcctgggcgacagagtgcgaccctgtctctaaaataaataaataaatatgcaggcagggccaagtgtgctgtaatcccagcactttgggaggtggaggtggagaatctcttgagcgcaggaatttgagaccagcctgggcaacacagggagactccatcgctacagaacatttaaaaattagcagggtgtggtggcacatgcctgtggtctcagctactctggtggctgtggtgggagaatcgcttgagcccaggaagtctaggctgcagtgagctgtctaggtgacagagtgagaccctgtctcaaaaaaaaaagacatttctaagaaataaatgaaatactattgcctttgcactcagtctctgtctctgattctctgatagaagatttttgaagaaaaaagataaaatctttgaagagttctatacttggaaggcatagtgacataaacacttctgaacatcctgttctctgtgtgaaagaagtgaacttctataccctttgcatttgagggaacaattgctactgggttgatgggcacacacagttgaagatatgtgaaccactggactttggcctctgatacaaactgcctaagagaagagattatttatactggtattaatgctctgatgaaaacaggtcatttgacataaacacttacttgttaaaaacctatatcactacatctaactttgttttctaaaacttttagtacttcaaattctacgtatttcttttctcattacaatgcaaacagtttaatttgcaactgtaatatatgttcattttagtttgtgattacctgcttaatcatttaaataggtccatttaacttgtatccctgtaagataaagtatgttttacacaaaaaggttaattaaggctcagtaaaactattctagaagagtactttaaaaacctcttacacaatcctaagctaaataagtttaatgaattaagtagttacaattataaagcttcagagtgaattatctcatgagtttatttaatataatctttgtatgaatgtatactaaataaaattggcctattcaaatcacaa

SEQ ID NO: 172204 - DNA, 4765 bp, Homo sapiens
  Payload ID: 13860
  Gene Symbol: PCDHGB7
  Gene Name: protocadherin gamma subfamily B, 7
  Uniprot ID: Q9Y5F8
  ENST ID: ENST00000398594
  CDS Start-End: 170-2959
ccagctcccacacagaggctcccggctgcgcagaccttgcccagcacaccagattgccagctccgagacccgggactcctcctgtcctgggccgaatgctcttttagcgcggtagagtgcactttctccaactggaaaagcggggacccagcgagaacccgagcgaacgatgggagggagctgcgcgcagaggcgccgggccggcccgcggcaggtactatttcctttgctgctgcctttgttctaccccacgctgtgtgagccgatccgctactcgattccggaggagctggccaagggctcggtggtggggaacctcgctaaggatctagggcttagtgtcctggatgtgtcggctcgcgagctgcgagtgagcgcggagaagctgcacttcagcgtagacgcgcagagcggggacttacttgtgaaggaccgaatagaccgtgagcaaatatgcaaagagagaagaagatgtgagttgcaattggaagctgtggtggaaaatcctttaaatatttttcatgtcattgtggtgattgaggatgttaatgaccacgcccctcaattccggaaagatgaaataaacttagaaatcagtgaatccgtcagcctggggatgggaacaattcttgagtctgcagaagatcctgatattagtatgaattcgctgagcaaataccaactaagtcctaacgagtatttctcattggtggagaaagacaatcctgatggtggcaaatatccagaattagtattgcagaagactctggaccgagaaacgcagagcgctcaccacttggtactgaccgccttagatggtggggaccctccccgaagcggtactgctcagataagaatcctggtaatagatgccaatgacaaccccccagtgttcagccaggacgtgtacagggttagccttcgggaagacgtgcctccaggcacctccatcctgagagtgaaggccactgaccaggacgagggcatcaactcagagatcacttattccttctttggtgtggctgacaaagctcagcacgtgttctctctggattacactacaggaaacattctaactcagcagcctttggattttgaagaagtagaaagatatacgataaacatagaagcaaaagaccgaggatctctctcaacacggtgtaaagtaattgtagaagttgtagacgaaaacgacaacagcccagaaataatcatcacgtcactctctgatcagattatggaggattcccctccaggagtggttgttgccctcttcaaaacacgggaccaagactcaggggaaaatggggaagtcaggtgtagcttaagtagaggtgttccatttaagattcattcttcttctaataattactacaagctagtaacagatgaggccctggatcgggagcagaccccagagtacaacgtcaccatcgcagccacagacaggggcaagcctccgttatcctccagcaaaaccataaccctgcacattactgacgtcaatgacaacgcgccggttttcggacagtcagcctacctggtccacgtgccagaaaacaaccagccgggtgcctccatagcgcaagtcagtgcctctgacccagacttcgggctcaacggccgtgtctcctactctctcattgccagcgacctggagtcacgaacgctgtcgtcctacgtgtccgtgagcgcgcagagcggggtggtgttcgcgcagcgcgccttcgaccacgagcagctgcgcaccttcgagctcacgctgcaggcccgcgaccagggctcgcccgcgctcagcgccaatgtgagcctgcgcgtgttggtgggcgaccgtaacgacaacgcaccgcgggtgctgtaccctgcgctgggtcccgacggctccgcgctcttcgacacagtgccgcgggccgcgcagccaggctacctggtgaccaaggtggtggccgtggacgcggactcggggcacaatgcctggctgtcctaccacgtggtgcaggccagtgagcccgggctcttcagcctggggctgcgaacaggcgaggtgcgcatggtgcgtgctttgggtgacaaggactcggtccgccagcgcctgctagtcgctgtaagagatggaggacagccacccctttcagccactgccacgctgcacctggtgttcgcagatagcttgcaagaggtactgccggatttcagcgaccatcccacaccctctgactcccaggctgagatgcagttttacctggtggtggccttggccttgatttctgtgctctttctcctcgcggtgattctagctattgctctacgcctgcgacagtctttcagccctactgcaggagactgctttgagtcagttctctgctccaagtccggacctgtgggtccccccaactacagtgagggaacgttgccctatgcctataatttttgtgtgcctggggatcaaatgaatccagaatttaattttttcacatctgttgatcattgtccagccacacaagataacctcaacaaagatagcatgctactggctagcattttaactcccagcgttgaagcagataagaagattcttaaacagcaagccccgcccaacacggactggcgtttctctcaggcccagagacccggcaccagcggctcccaaaatggcgatgacaccggcacctggcccaacaaccagtttgacacagagatgctgcaagccatgatcttggcgtccgccagtgaagctgctgatgggagctccaccctgggagggggtgccggcaccatgggattgagcgcccgctacggaccccagttcaccctgcagcacgtgcccgactaccgccagaatgtctacatcccaggcagcaatgccacactgaccaacgcagctggcaagcgggatggcaaggccccagcaggtggcaatggcaacaagaagaagtcgggcaagaaggagaagaagtaacatggaggccaggccaagagccacagggcggcctctccccaaccagcccagcttctccttacctgcacccaggcctcagagtttcagggctaacccccagaatactggtaggggccaaggccatgctccccttgggaaacagaaacaagtgcccagtcagcacctaccccttcccccccagggggttgaatatgcaaaagcagttccgctgggaacccccatccaatcaactgctgtacccatgggggtagtggggttactgtagacaccaagaaccatttgccacaccccgtttagttacagctgaactcctccatcttccaaatcaatcaggcccatccatcccatgcctccctcctccccaccccactccaacagttcctctttcccgagtaaggtggttggggtgttgaagtaccaagtaacctacaagcctcctagttctgaaaagttggaagggcatcatgacctcttggcctctcctttgattctcaatcttcccccaaagcatggtttggtgccagccccttcacctccttccagagcccaagatcaatgctcaagttttggaggacatgatcaccatccccatggtactgatgcttgctggatttagggagggcattttgctaccaagcctcttcccaacgccctggggaccagtcttctgttttgtttttcattgtttgacgtttccactgcatgccttgacttcccccacctcctcctcaaacaagagactccactgcatgttccaagacagtatggggtggtaagataaggaagggaagtgtgtggatgtggatggtgggggcatggacaaagcttgacacatcaagttatcaaggccttggaggaggctctgtatgtcctcaggggactgacaacatcctccagattccagccataaaccaataactaggctggacccttcccactacataatagggctcagcccaggcagccagctttgggctgagctaacaggaccaatggattaaactggcatttcagtccaaggaagctcgaagcaggtttaggaccaggtccccttgagaggtcagaggggcctctgtgggtgctgggtactccagaggtgccactggtggaagggtcagcggagccccagcaggaagggtgggccagccaggccattcttagtccctgggttggggaggcagggagctagggcagggaccaaatgaacagaaagtctcagcccaggatggggcttcttcaacagggcccctgccctcctgaagcctcagtccttcaccttgccaggtgccgtttctcttccgtgaaggccactgcccaggtccccagtgcgccccctagtggccatagcctggttaaagttccccagtgcctccttgtgcatagaccttcttctcccacccccttctgcccctgggtccccggccatccagcggggctgccagagaaccccagacctgcccttacagtagtgtagcgccccctccctctttcggctggtgtagaatagccagtagtgtagtgcggtgtgcttttacgtgatggcgggtgggcagcgggcggcgggctccgcgcagccgtctgtccttgatctgcccgcggcggcccgtgttgtgttttgtgctgtgtccacgcgctaaggcgaccccctcccccgtactgacttctcctataagcgcttctcttcgcatagtcacgtagctcccaccccaccctcttcctgtgtctcacgcaagttttatactctaatatttatatggctttttttcttcgacaaaaaaataataaaacgtttcttctgaaaagctg

SEQ ID NO: 172205 - DNA, 2785 bp, Homo sapiens
  Payload ID: 13860
  Gene Symbol: PCDHGB7
  Gene Name: protocadherin gamma subfamily B, 7
  Uniprot ID: Q9Y5F8
  ENST ID: ENST00000612073
  CDS Start-End: 216-2642
gcctctagcctgggattccctgcgcagccaacaacagaaaagaaaaccagctcccacacagaggctcccggctgcgcagaccttgcccagcacaccagattgccagctccgagacccgggactcctcctgtcctgggccgaatgctcttttagcgcggtagagtgcactttctccaactggaaaagcggggacccagcgagaacccgagcgaacgatgggagggagctgcgcgcagaggcgccgggccggcccgcggcaggtactatttcctttgctgctgcctttgttctaccccacgctgtgtgagccgatccgctactcgattccggaggagctggccaagggctcggtggtggggaacctcgctaaggatctagggcttagtgtcctggatgtgtcggctcgcgagctgcgagtgagcgcggagaagctgcacttcagcgtagacgcgcagagcggggacttacttgtgaaggaccgaatagaccgtgagcaaatatgcaaagagagaagaagatgtgagttgcaattggaagctgtggtggaaaatcctttaaatatttttcatgtcattgtggtgattgaggatgttaatgaccacgcccctcaattccggaaagatgaaataaacttagaaatcagtgaatccgtcagcctggggatgggaacaattcttgagtctgcagaagatcctgatattagtatgaattcgctgagcaaataccaactaagtcctaacgagtatttctcattggtggagaaagacaatcctgatggtggcaaatatccagaattagtattgcagaagactctggaccgagaaacgcagagcgctcaccacttggtactgaccgccttagatggtggggaccctccccgaagcggtactgctcagataagaatcctggtaatagatgccaatgacaaccccccagtgttcagccaggacgtgtacagggttagccttcgggaagacgtgcctccaggcacctccatcctgagagtgaaggccactgaccaggacgagggcatcaactcagagatcacttattccttctttggtgtggctgacaaagctcagcacgtgttctctctggattacactacaggaaacattctaactcagcagcctttggattttgaagaagtagaaagatatacgataaacatagaagcaaaagaccgaggatctctctcaacacggtgtaaagtaattgtagaagttgtagacgaaaacgacaacagcccagaaataatcatcacgtcactctctgatcagattatggaggattcccctccaggagtggttgttgccctcttcaaaacacgggaccaagactcaggggaaaatggggaagtcaggtgtagcttaagtagaggtgttccatttaagattcattcttcttctaataattactacaagctagtaacagatgaggccctggatcgggagcagaccccagagtacaacgtcaccatcgcagccacagacaggggcaagcctccgttatcctccagcaaaaccataaccctgcacattactgacgtcaatgacaacgcgccggttttcggacagtcagcctacctggtccacgtgccagaaaacaaccagccgggtgcctccatagcgcaagtcagtgcctctgacccagacttcgggctcaacggccgtgtctcctactctctcattgccagcgacctggagtcacgaacgctgtcgtcctacgtgtccgtgagcgcgcagagcggggtggtgttcgcgcagcgcgccttcgaccacgagcagctgcgcaccttcgagctcacgctgcaggcccgcgaccagggctcgcccgcgctcagcgccaatgtgagcctgcgcgtgttggtgggcgaccgtaacgacaacgcaccgcgggtgctgtaccctgcgctgggtcccgacggctccgcgctcttcgacacagtgccgcgggccgcgcagccaggctacctggtgaccaaggtggtggccgtggacgcggactcggggcacaatgcctggctgtcctaccacgtggtgcaggccagtgagcccgggctcttcagcctggggctgcgaacaggcgaggtgcgcatggtgcgtgctttgggtgacaaggactcggtccgccagcgcctgctagtcgctgtaagagatggaggacagccacccctttcagccactgccacgctgcacctggtgttcgcagatagcttgcaagaggtactgccggatttcagcgaccatcccacaccctctgactcccaggctgagatgcagttttacctggtggtggccttggccttgatttctgtgctctttctcctcgcggtgattctagctattgctctacgcctgcgacagtctttcagccctactgcaggagactgctttgagtcagttctctgctccaagtccggacctgtgggtccccccaactacagtgagggaacgttgccctatgcctataatttttgtgtgcctggggatcaaatgaatccagaatttaattttttcacatctgttgatcattgtccagccacacaagataacctcaacaaagatagcatgctactggctagcattttaactcccagcgttgaagcagataagaagattcttaaacaggtaagtatttaaaaatgtatttaatcctttttatattacaatatgccaatatattccaatatagtggtattattttaagattctagataacttcttcatagagttcgcaaaatataggtcaaatttatggttatcattattaaaacaaaagttta

SEQ ID NO: 172206 - DNA, 4725 bp, Homo sapiens
  Payload ID: 13861
  Gene Symbol: PCDHGC3
  Gene Name: protocadherin gamma subfamily C, 3
  Uniprot ID: Q9UN70
  ENST ID: ENST00000308177
  CDS Start-End: 115-2919
agaaagccatgtcggactcggcgcccagcgcccaagcgctaacccgctgaaagtttctcagcgaaatctcagggacgatctggaccccgctgagaggaactgcttttgagtgagatggtcccagaggcctggaggagcggactggtaagcaccgggagggtagtgggagttttgcttctgcttggtgccttgaacaaggcttccacggtcattcactatgagatcccggaggaaagagagaagggtttcgctgtgggcaacgtggtcgcgaaccttggtttggatctcggtagcctctcagcccgcaggttccgggtggtgtctggagctagccgaagattctttgaggtgaaccgggagaccggagagatgtttgtgaacgaccgtctggatcgagaggagctgtgtgggacactgccctcttgcactgtaactctggagttggtagtggagaacccgctggagctgttcagcgtggaagtggtgatccaggacatcaacgacaacaatcctgctttccctacccaggaaatgaaattggagattagcgaggccgtggctccggggacgcgctttccgctcgagagcgcgcacgatcccgatgtgggaagcaactctttacaaacctatgagctgagccgaaatgaatactttgcgcttcgcgtgcagacgcgggaggacagcaccaagtacgcggagctggtgttggagcgcgccctggaccgagaacgggagcctagtctccagttagtgctgacggcgttggacggagggaccccagctctctccgccagcctgcctattcacatcaaggtgctggacgcgaatgacaatgcgcctgtcttcaaccagtccttgtaccgggcgcgcgtcctggaggatgcaccctccggcacgcgcgtggtacaagtccttgcaacggatctggatgaaggccccaacggtgaaattatttactccttcggcagccacaaccgcgccggcgtgcggcaactattcgccttagaccttgtaaccgggatgctgacaatcaagggtcggctggacttcgaggacaccaaactccatgagatttacatccaggccaaagacaagggcgccaatcccgaaggagcacattgcaaagtgttggtggaggttgtggatgtgaatgacaacgccccggagatcacagtcacctccgtgtacagcccagtacccgaggatgcccctctggggactgtcatcgctttgctcagtgtgactgacctggatgctggcgagaacgggctggtgacctgcgaagttccaccgggtctccctttcagccttacttcttccctcaagaattacttcactttgaaaaccagtgcagacctggatcgggagactgtgccagaatacaacctcagcatcaccgcccgagacgccggaaccccttccctctcagcccttacaatagtgcgtgttcaagtgtccgacatcaatgacaaccctccacaatcttctcaatcttcctacgacgtttacattgaagaaaacaacctccccggggctccaatactaaacctaagtgtctgggaccccgacgccccgcagaatgctcggctttctttctttctcttggagcaaggagctgaaaccgggctagtgggtcgctatttcacaataaatcgtgacaatggcatagtgtcatccttagtgcccctagactatgaggatcggcgggaatttgaattaacagctcatatcagcgatgggggcaccccggtcctagccaccaacatcagcgtgaacatatttgtcactgatcgcaatgacaatgccccccaggtcctatatcctcggccaggtgggagctcggtggagatgctgcctcgaggtacctcagctggccacctagtgtcacgggtggtaggctgggacgcggatgcagggcacaatgcctggctctcctacagtctcttgggatcccctaaccagagcctttttgccatagggctgcacactggtcaaatcagtactgcccgtccagtccaagacacagattcacccaggcagactctcacggtcttgatcaaagacaatggggagccttcgctctccaccactgctaccctcactgtgtcagtaaccgaggactctcctgaagcccgagccgagttcccctctggctctgccccccgggagcagaaaaaaaatctcaccttttatctacttctttctctaatcctggtttctgtggggtttgtggtcacagtgttcggagtaatcatattcaaagtttacaagtggaagcagtctagagacctataccgagccccggtgagctcactgtaccgaacaccagggccctccttgcacgcggacgccgtgcggggaggcctgatgtcgccgcacctttaccatcaggtgtatctcaccacggactcccgccgcagcgacccgctgctgaagaaacctggtgcagccagtccactggccagccgccagaacacgctgcggagctgtgatccggtgttctataggcaggtgttgggtgcagagagcgcccctcccggacagcaagccccgcccaacacggactggcgtttctctcaggcccagagacccggcaccagcggctcccaaaatggcgatgacaccggcacctggcccaacaaccagtttgacacagagatgctgcaagccatgatcttggcgtccgccagtgaagctgctgatgggagctccaccctgggagggggtgccggcaccatgggattgagcgcccgctacggaccccagttcaccctgcagcacgtgcccgactaccgccagaatgtctacatcccaggcagcaatgccacactgaccaacgcagctggcaagcgggatggcaaggccccagcaggtggcaatggcaacaagaagaagtcgggcaagaaggagaagaagtaacatggaggccaggccaagagccacagggcggcctctccccaaccagcccagcttctccttacctgcacccaggcctcagagtttcagggctaacccccagaatactggtaggggccaaggccatgctccccttgggaaacagaaacaagtgcccagtcagcacctaccccttcccccccagggggttgaatatgcaaaagcagttccgctgggaacccccatccaatcaactgctgtacccatgggggtagtggggttactgtagacaccaagaaccatttgccacaccccgtttagttacagctgaactcctccatcttccaaatcaatcaggcccatccatcccatgcctccctcctccccaccccactccaacagttcctctttcccgagtaaggtggttggggtgttgaagtaccaagtaacctacaagcctcctagttctgaaaagttggaagggcatcatgacctcttggcctctcctttgattctcaatcttcccccaaagcatggtttggtgccagccccttcacctccttccagagcccaagatcaatgctcaagttttggaggacatgatcaccatccccatggtactgatgcttgctggatttagggagggcattttgctaccaagcctcttcccaacgccctggggaccagtcttctgttttgtttttcattgtttgacgtttccactgcatgccttgacttcccccacctcctcctcaaacaagagactccactgcatgttccaagacagtatggggtggtaagataaggaagggaagtgtgtggatgtggatggtgggggcatggacaaagcttgacacatcaagttatcaaggccttggaggaggctctgtatgtcctcaggggactgacaacatcctccagattccagccataaaccaataactaggctggacccttcccactacataatagggctcagcccaggcagccagctttgggctgagctaacaggaccaatggattaaactggcatttcagtccaaggaagctcgaagcaggtttaggaccaggtccccttgagaggtcagaggggcctctgtgggtgctgggtactccagaggtgccactggtggaagggtcagcggagccccagcaggaagggtgggccagccaggccattcttagtccctgggttggggaggcagggagctagggcagggaccaaatgaacagaaagtctcagcccaggatggggcttcttcaacagggcccctgccctcctgaagcctcagtccttcaccttgccaggtgccgtttctcttccgtgaaggccactgcccaggtccccagtgcgccccctagtggccatagcctggttaaagttccccagtgcctccttgtgcatagaccttcttctcccacccccttctgcccctgggtccccggccatccagcggggctgccagagaaccccagacctgcccttacagtagtgtagcgccccctccctctttcggctggtgtagaatagccagtagtgtagtgcggtgtgcttttacgtgatggcgggtgggcagcgggcggcgggctccgcgcagccgtctgtccttgatctgcccgcggcggcccgtgttgtgttttgtgctgtgtccacgcgctaaggcgaccccctcccccgtactgacttctcctataagcgcttctcttcgcatagtcacgtagctcccaccccaccctcttcctgtgtctcacgcaagttttatactctaatatttatatggctttttttcttcgacaaaaaaataataaaacgtttcttctgaaaagctg

SEQ ID NO: 172207 - DNA, 2849 bp, Homo sapiens
  Payload ID: 13861
  Gene Symbol: PCDHGC3
  Gene Name: protocadherin gamma subfamily C, 3
  Uniprot ID: Q9UN70
  ENST ID: ENST00000611950
  CDS Start-End: 171-2762
ctgcgccccgggatgaggcagagactgaacagccggcgagcaaatcaacggcatccagaaagccatgtcggactcggcgcccagcgcccaagcgctaacccgctgaaagtttctcagcgaaatctcagggacgatctggaccccgctgagaggaactgcttttgagtgagatggtcccagaggcctggaggagcggactggtaagcaccgggagggtagtgggagttttgcttctgcttggtgccttgaacaaggcttccacggtcattcactatgagatcccggaggaaagagagaagggtttcgctgtgggcaacgtggtcgcgaaccttggtttggatctcggtagcctctcagcccgcaggttccgggtggtgtctggagctagccgaagattctttgaggtgaaccgggagaccggagagatgtttgtgaacgaccgtctggatcgagaggagctgtgtgggacactgccctcttgcactgtaactctggagttggtagtggagaacccgctggagctgttcagcgtggaagtggtgatccaggacatcaacgacaacaatcctgctttccctacccaggaaatgaaattggagattagcgaggccgtggctccggggacgcgctttccgctcgagagcgcgcacgatcccgatgtgggaagcaactctttacaaacctatgagctgagccgaaatgaatactttgcgcttcgcgtgcagacgcgggaggacagcaccaagtacgcggagctggtgttggagcgcgccctggaccgagaacgggagcctagtctccagttagtgctgacggcgttggacggagggaccccagctctctccgccagcctgcctattcacatcaaggtgctggacgcgaatgacaatgcgcctgtcttcaaccagtccttgtaccgggcgcgcgtcctggaggatgcaccctccggcacgcgcgtggtacaagtccttgcaacggatctggatgaaggccccaacggtgaaattatttactccttcggcagccacaaccgcgccggcgtgcggcaactattcgccttagaccttgtaaccgggatgctgacaatcaagggtcggctggacttcgaggacaccaaactccatgagatttacatccaggccaaagacaagggcgccaatcccgaaggagcacattgcaaagtgttggtggaggttgtggatgtgaatgacaacgccccggagatcacagtcacctccgtgtacagcccagtacccgaggatgcccctctggggactgtcatcgctttgctcagtgtgactgacctggatgctggcgagaacgggctggtgacctgcgaagttccaccgggtctccctttcagccttacttcttccctcaagaattacttcactttgaaaaccagtgcagacctggatcgggagactgtgccagaatacaacctcagcatcaccgcccgagacgccggaaccccttccctctcagcccttacaatagtgcgtgttcaagtgtccgacatcaatgacaaccctccacaatcttctcaatcttcctacgacgtttacattgaagaaaacaacctccccggggctccaatactaaacctaagtgtctgggaccccgacgccccgcagaatgctcggctttctttctttctcttggagcaaggagctgaaaccgggctagtgggtcgctatttcacaataaatcgtgacaatggcatagtgtcatccttagtgcccctagactatgaggatcggcgggaatttgaattaacagctcatatcagcgatgggggcaccccggtcctagccaccaacatcagcgtgaacatatttgtcactgatcgcaatgacaatgccccccaggtcctatatcctcggccaggtgggagctcggtggagatgctgcctcgaggtacctcagctggccacctagtgtcacgggtggtaggctgggacgcggatgcagggcacaatgcctggctctcctacagtctcttgggatcccctaaccagagcctttttgccatagggctgcacactggtcaaatcagtactgcccgtccagtccaagacacagattcacccaggcagactctcacggtcttgatcaaagacaatggggagccttcgctctccaccactgctaccctcactgtgtcagtaaccgaggactctcctgaagcccgagccgagttcccctctggctctgccccccgggagcagaaaaaaaatctcaccttttatctacttctttctctaatcctggtttctgtggggtttgtggtcacagtgttcggagtaatcatattcaaagtttacaagtggaagcagtctagagacctataccgagccccggtgagctcactgtaccgaacaccagggccctccttgcacgcggacgccgtgcggggaggcctgatgtcgccgcacctttaccatcaggtgtatctcaccacggactcccgccgcagcgacccgctgctgaagaaacctggtgcagccagtccactggccagccgccagaacacgctgcggagctgtgatccggtgttctataggcaggtgttgggtgcagagagcgcccctcccggacaggtaaggtttagcaagtcatgcttgaccctgttagtgcttttttattcctacatcatattgaggaaggaatggagctgtttttttagtgatgaagatgttttcctggtgatgcattcacactttcaactggcccttcctagatcaaagttagtgcctttgtgagatggtggcctgccagagtgtggtttgtggtcccatttcagggggaagatacttgactcatctgtggacctaattcacatcctcagc

SEQ ID NO: 172208 - DNA, 731 bp, Homo sapiens
  Payload ID: 13861
  Gene Symbol: PCDHGC3
  Gene Name: protocadherin gamma subfamily C, 3
  ENST ID: ENST00000617222
  CDS Start-End: 117-674
ccagaaagccatgtcggactcggcgcccagcgcccaagcgctaacccgctgaaagtttctcagcgaaatctcagggacgatctggaccccgctgagaggaactgcttttgagtgagatggtcccagaggcctggaggagcggactggtgtatctcaccacggactcccgccgcagcgacccgctgctgaagaaacctggtgcagccagtccactggccagccgccagaacacgctgcggagctgtgatccggtgttctataggcaggtgttgggtgcagagagcgcccctcccggacagcaagccccgcccaacacggactggcgtttctctcaggcccagagacccggcaccagcggctcccaaaatggcgatgacaccggcacctggcccaacaaccagtttgacacagagatgctgcaagccatgatcttggcgtccgccagtgaagctgctgatgggagctccaccctgggagggggtgccggcaccatgggattgagcgcccgctacggaccccagttcaccctgcagcacgtgcccgactaccgccagaatgtctacatcccaggcagcaatgccacactgaccaacgcagctggcaagcgggatggcaaggccccagcaggtggcaatggcaacaagaagaagtcgggcaagaaggagaagaagtaacatggaggccaggccaagagccacagggcggcctctccccaaccagcccagcttctc

SEQ ID NO: 172209 - DNA, 2346 bp, Homo sapiens
  Payload ID: 13861
  Gene Symbol: PCDHGC3
  Gene Name: protocadherin gamma subfamily C, 3
  ENST ID: ENST00000617641
  CDS Start-End: 138-542
cggcgagcaaatcaacggcatccagaaagccatgtcggactcggcgcccagcgcccaagcgctaacccgctgaaagtttctcagcgaaatctcagggacgatctggaccccgctgagaggaactgcttttgagtgagatggtcccagaggcctggaggagcggactgcaagccccgcccaacacggactggcgtttctctcaggcccagagacccggcaccagcggctcccaaaatggcgatgacaccggcacctggcccaacaaccagtttgacacagagatgctgcaagccatgatcttggcgtccgccagtgaagctgctgatgggagctccaccctgggagggggtgccggcaccatgggattgagcgcccgctacggaccccagttcaccctgcagcacgtgcccgactaccgccagaatgtctacatcccaggcagcaatgccacactgaccaacgcagctggcaagcgggatggcaaggccccagcaggtggcaatggcaacaagaagaagtcgggcaagaaggagaagaagtaacatggaggccaggccaagagccacagggcggcctctccccaaccagcccagcttctccttacctgcacccaggcctcagagtttcagggctaacccccagaatactggtaggggccaaggccatgctccccttgggaaacagaaacaagtgcccagtcagcacctaccccttcccccccagggggttgaatatgcaaaagcagttccgctgggaacccccatccaatcaactgctgtacccatgggggtagtggggttactgtagacaccaagaaccatttgccacaccccgtttagttacagctgaactcctccatcttccaaatcaatcaggcccatccatcccatgcctccctcctccccaccccactccaacagttcctctttcccgagtaaggtggttggggtgttgaagtaccaagtaacctacaagcctcctagttctgaaaagttggaagggcatcatgacctcttggcctctcctttgattctcaatcttcccccaaagcatggtttggtgccagccccttcacctccttccagagcccaagatcaatgctcaagttttggaggacatgatcaccatccccatggtactgatgcttgctggatttagggagggcattttgctaccaagcctcttcccaacgccctggggaccagtcttctgttttgtttttcattgtttgacgtttccactgcatgccttgacttcccccacctcctcctcaaacaagagactccactgcatgttccaagacagtatggggtggtaagataaggaagggaagtgtgtggatgtggatggtgggggcatggacaaagcttgacacatcaagttatcaaggccttggaggaggctctgtatgtcctcaggggactgacaacatcctccagattccagccataaaccaataactaggctggacccttcccactacataatagggctcagcccaggcagccagctttgggctgagctaacaggaccaatggattaaactggcatttcagtccaaggaagctcgaagcaggtttaggaccaggtccccttgagaggtcagaggggcctctgtgggtgctgggtactccagaggtgccactggtggaagggtcagcggagccccagcaggaagggtgggccagccaggccattcttagtccctgggttggggaggcagggagctagggcagggaccaaatgaacagaaagtctcagcccaggatggggcttcttcaacagggcccctgccctcctgaagcctcagtccttcaccttgccaggtgccgtttctcttccgtgaaggccactgcccaggtccccagtgcgccccctagtggccatagcctggttaaagttccccagtgcctccttgtgcatagaccttcttctcccacccccttctgcccctgggtccccggccatccagcggggctgccagagaaccccagacctgcccttacagtagtgtagcgccccctccctctttcggctggtgtagaatagccagtagtgtagtgcggtgtgcttttacgtgatggcgggtgggcagcgggcggcgggctccgcgcagccgtctgtccttgatctgcccgcggcggcccgtgttgtgttttgtgctgtgtccacgcgctaaggcgaccccctcccccgtactgacttctcctataagcgcttctcttcgcatagtcacgtagctcccaccccaccctcttcctgtgtctcacgcaagttttatactctaatatttatatggctttttttcttcgacaaaaaaataataaaacgtttcttctgaaaagc

SEQ ID NO: 172210 - DNA, 845 bp, Homo sapiens
  Payload ID: 13861
  Gene Symbol: PCDHGC3
  Gene Name: protocadherin gamma subfamily C, 3
  ENST ID: ENST00000621008
  CDS Start-End: 119-845
atccagaaagccatgtcggactcggcgcccagcgcccaagcgctaacccgctgaaagtttctcagcgaaatctcagggacgatctggaccccgctgagaggaactgcttttgagtgagatggtcccagaggcctggaggagcggactggaaatgaaattggagattagcgaggccgtggctccggggacgcgctttccgctcgagagcgcgcacgatcccgatgtgggaagcaactctttacaaacctatgagctgagccgaaatgaatactttgcgcttcgcgtgcagacgcgggaggacagcaccaagtacgcggagctggtgttggagcgcgccctggaccgagaacgggagcctagtctccagttagtgctgacggcgttggacggagggaccccagctctctccgccagcctgcctattcacatcaaggtgctggacgcgaatgacaatgcgcctgtcttcaaccagtccttgtaccgggcgcgcgtcctggaggatgcaccctccggcacgcgcgtggtacaagtccttgcaacggatctggatgaaggccccaacggtgaaattatttactccttcggcagccacaaccgcgccggcgtgcggcaactattcgccttagaccttgtaaccgggatgctgacaatcaagggtcggctggacttcgaggacaccaaactccatgagatttacatccaggccaaagacaagggcgccaatcccgaaggagcacattgcaaagtgttggtggaggttgtggatgtgaatgacaacgccccggagatcacagtcacctccgtgtacagcccagtacccgaggatgcccctctggggactgtca

SEQ ID NO: 172211 - DNA, 4623 bp, Homo sapiens
  Payload ID: 13862
  Gene Symbol: PCDHGC4
  Gene Name: protocadherin gamma subfamily C, 4
  Uniprot ID: Q9Y5F7
  ENST ID: ENST00000306593
  CDS Start-End: 1-2817
atgctccgcaaggtgagaagctggacagaaatctggcggtgggctacccttttgttcctcttttaccacctgggttacgtttgtgggcagatccgctacccggtcccagaggagtcacaggaagggacttttgtagggaatgtcgctcaagatttcctgctggatacggacagtctgtcagctcgcaggctgcaggtcgctggagaggtgaaccaaagacacttccgtgtggatttggacagcggagccctgctcatcaagaacccaatcgaccgagaggcactgtgtgggctcagtgccagctgcatcgtgcccctggagtttgtcaccgaaggtcctttggaaatgtaccgagcagaggtagagatcgtagatgtgaatgatcacgccccccgttttccgcggcagcagctggacttggaaattggggaggcagctcctccaggacagcgtttcccgttggaaaaggctcaggatgcagatgtggggagcaattcgattagcagctataggctgagctccaatgaacactttgcactggatgtgaagaagcgcagcgacggcagcctggtcccagagctgctcctggagaagcctttggatcgagagaagcaatcggactaccgcctggtgctgactgctgtcgatggagggaacccgccgagatctggcaccgcagagctccgggtatccgtgctggacgtaaacgacaacgccccagccttccagcaatccagctacaggattagtgtgttggagagcgcaccagcgggcatggtgctcatccagctcaatgcctcagacccggacctgggtcccagtggtaacgtcaccttttatttcagtggtcatacccctgatcgtgtaagaaacctctttagcctgcaccccactactggaaagcttactcttttggggcccctagactttgagagtgagaattactatgaatttgatgtgcgggctcgcgatgggggttctccagccatggagcaacattgcagccttcgagtggatctgctggacgtaaatgacaatgccccttacatcacagtgacctcagagcttggaaccctccccgagagtgcagaacctggcactgtggtggcacttatcagtgtgcaggatccagactcagggtcaaacggagatgtgagcctccgcattcctgaccacttgccatttgccctcaagtctgccttcaggaaccagttctccctggtgactgctggacccttggatcgagaggccaaatctagctatgacatcatggtcactgcttctgatgctgggaaccctcctctcagtacccacagaactattttcctcaatatttcagatgtgaatgataatccaccctctttctttcagaggtcacatgaggtgtttgttcctgagaacaatcgcccaggggacctgctttgctcccttgcagcctctgacccagactctggcttgaatgcgcttatctcctactcactcctggagcccaggaatcgagatgtatcagcttcctctttcatctctctgaacccccagacaggagctgttcatgctactcgatcctttgactatgagcaaacccagacactgcagtttgaggtgcaggcccgggatcggggcaacccaccccttagcagcactgtaacagttcgtctatttgtgctggacctcaatgacaatgctccagctgtgctccgtcctcgggcccggcctggttccttatgtccccaagcactgcctccatcagttggtgctggccacctaatcacaaaggtgactgctgtggacttggattcaggttacaatgcttgggtttcctatcagctcctggaggccccagatcccagcctgtttgcagtctctcgatatgctggggaggtgcggacggctgttcctatcccagctgacctcccaccacagaagctggtcattgtggtaaaggatagtggtagtccaccactctctacctctgttactctcttagtgtccttagaggaagacactcatccagttgtcccagatcttcgagaatcttcagctccaagggaaggagaatctcgtctaaccctctacttggctgtgtccctagtggcaatttgctttgtctcctttggctcattcgtggcactactctctaagtgtcttcgtggggcagcctgtggagtcacatgctttcctgctggcacctgtgcctgtctcaccagatctcgaaggagggaggggcttcccccttccaatgggatcctccgaatccagctagggtcagatgaccctatcaagtttgttgatgtgggaggccactctcatggctgtacacccttggcttctgcacccactcggagtgatagcttcatgatggtgaagtcacccagtgcacctatggcaggggagcctgttcgcccaagctgcccaccctctgatcttctctatgggctagagcaagccccgcccaacacggactggcgtttctctcaggcccagagacccggcaccagcggctcccaaaatggcgatgacaccggcacctggcccaacaaccagtttgacacagagatgctgcaagccatgatcttggcgtccgccagtgaagctgctgatgggagctccaccctgggagggggtgccggcaccatgggattgagcgcccgctacggaccccagttcaccctgcagcacgtgcccgactaccgccagaatgtctacatcccaggcagcaatgccacactgaccaacgcagctggcaagcgggatggcaaggccccagcaggtggcaatggcaacaagaagaagtcgggcaagaaggagaagaagtaacatggaggccaggccaagagccacagggcggcctctccccaaccagcccagcttctccttacctgcacccaggcctcagagtttcagggctaacccccagaatactggtaggggccaaggccatgctccccttgggaaacagaaacaagtgcccagtcagcacctaccccttcccccccagggggttgaatatgcaaaagcagttccgctgggaacccccatccaatcaactgctgtacccatgggggtagtggggttactgtagacaccaagaaccatttgccacaccccgtttagttacagctgaactcctccatcttccaaatcaatcaggcccatccatcccatgcctccctcctccccaccccactccaacagttcctctttcccgagtaaggtggttggggtgttgaagtaccaagtaacctacaagcctcctagttctgaaaagttggaagggcatcatgacctcttggcctctcctttgattctcaatcttcccccaaagcatggtttggtgccagccccttcacctccttccagagcccaagatcaatgctcaagttttggaggacatgatcaccatccccatggtactgatgcttgctggatttagggagggcattttgctaccaagcctcttcccaacgccctggggaccagtcttctgttttgtttttcattgtttgacgtttccactgcatgccttgacttcccccacctcctcctcaaacaagagactccactgcatgttccaagacagtatggggtggtaagataaggaagggaagtgtgtggatgtggatggtgggggcatggacaaagcttgacacatcaagttatcaaggccttggaggaggctctgtatgtcctcaggggactgacaacatcctccagattccagccataaaccaataactaggctggacccttcccactacataatagggctcagcccaggcagccagctttgggctgagctaacaggaccaatggattaaactggcatttcagtccaaggaagctcgaagcaggtttaggaccaggtccccttgagaggtcagaggggcctctgtgggtgctgggtactccagaggtgccactggtggaagggtcagcggagccccagcaggaagggtgggccagccaggccattcttagtccctgggttggggaggcagggagctagggcagggaccaaatgaacagaaagtctcagcccaggatggggcttcttcaacagggcccctgccctcctgaagcctcagtccttcaccttgccaggtgccgtttctcttccgtgaaggccactgcccaggtccccagtgcgccccctagtggccatagcctggttaaagttccccagtgcctccttgtgcatagaccttcttctcccacccccttctgcccctgggtccccggccatccagcggggctgccagagaaccccagacctgcccttacagtagtgtagcgccccctccctctttcggctggtgtagaatagccagtagtgtagtgcggtgtgcttttacgtgatggcgggtgggcagcgggcggcgggctccgcgcagccgtctgtccttgatctgcccgcggcggcccgtgttgtgttttgtgctgtgtccacgcgctaaggcgaccccctcccccgtactgacttctcctataagcgcttctcttcgcatagtcacgtagctcccaccccaccctcttcctgtgtctcacgcaagttttatactctaatatttatatggctttttttcttcgacaaaaaaataataaaacgtttcttctgaaaagctg

SEQ ID NO: 172212 - DNA, 581 bp, Homo sapiens
  Payload ID: 13862
  Gene Symbol: PCDHGC4
  Gene Name: protocadherin gamma subfamily C, 4
  ENST ID: ENST00000610539
  CDS Start-End: 333-581
agagctggcgcggggaaagggagataggtgtctccagctgctgtggctgtttggggcgggtcggcttcatccgcgtctcaggagcaagtagagaattagcgggcggcagcaatgctccgcaagggaatgtcgctcaagatttcctgctggatacggacagtctgtcagctcgcaggctgcaggtcgctggagaggtgaaccaaagacacttccgtgtggatttggacagcggagccctgctcatcaagaacccaatcgaccgagaggcactgtgtgggctcagtgccagctgcatcgtgcccctggagtttgtcaccgaaggtcctttggaaatgtaccgagcagaggtagagatcgtagatgtgaatgatcacgccccccgttttccgcggcagcagctggacttggaaattggggaggcagctcctccaggacagcgtttcccgttggaaaaggctcaggatgcagatgtggggagcaattcgattagcagctataggctgagctccaatgaacactttgcactggatgtgaagaagcgcagcgacggcagcctggtcccagagctgctcctggagaag

SEQ ID NO: 172213 - DNA, 812 bp, Homo sapiens
  Payload ID: 13862
  Gene Symbol: PCDHGC4
  Gene Name: protocadherin gamma subfamily C, 4
  ENST ID: ENST00000618371
  CDS Start-End: 103-489
gcggggaaagggagataggtgtctccagctgctgtggctgtttggggcgggtcggcttcatccgcgtctcaggagcaagtagagaattagcgggcggcagcaatgctccgcaagcaagccccgcccaacacggactggcgtttctctcaggcccagagacccggcaccagcggctcccaaaatggcgatgacaccggcacctggcccaacaaccagtttgacacagagatgctgcaagccatgatcttggcgtccgccagtgaagctgctgatgggagctccaccctgggagggggtgccggcaccatgggattgagcgcccgctacggaccccagttcaccctgcagcacgtgcccgactaccgccagaatgtctacatcccaggcagcaatgccacactgaccaacgcagctggcaagcgggatggcaaggccccagcaggtggcaatggcaacaagaagaagtcgggcaagaaggagaagaagtaacatggaggccaggccaagagccacagggcggcctctccccaaccagcccagcttctccttacctgcacccaggcctcagagtttcagggctaacccccagaatactggtaggggccaaggccatgctccccttgggaaacagaaacaagtgcccagtcagcacctaccccttcccccccagggggttgaatatgcaaaagcagttccgctgggaacccccatccaatcaactgctgtacccatgggggtagtggggttactgtagacaccaagaaccatttgccacaccccgtttagttacagctgaactcctccatcttcca

SEQ ID NO: 172214 - DNA, 2793 bp, Homo sapiens
  Payload ID: 13862
  Gene Symbol: PCDHGC4
  Gene Name: protocadherin gamma subfamily C, 4
  Uniprot ID: Q9Y5F7
  ENST ID: ENST00000617094
  CDS Start-End: 178-2793
agacaaatctaccccgccaccagcaaaaacggcgcgtaacccttgcggcgccggccgaaccgcgccagagctggcgcggggaaagggagataggtgtctccagctgctgtggctgtttggggcgggtcggcttcatccgcgtctcaggagcaagtagagaattagcgggcggcagcaatgctccgcaaggtgagaagctggacagaaatctggcggtgggctacccttttgttcctcttttaccacctgggttacgtttgtgggcagatccgctacccggtcccagaggagtcacaggaagggacttttgtagggaatgtcgctcaagatttcctgctggatacggacagtctgtcagctcgcaggctgcaggtcgctggagaggtgaaccaaagacacttccgtgtggatttggacagcggagccctgctcatcaagaacccaatcgaccgagaggcactgtgtgggctcagtgccagctgcatcgtgcccctggagtttgtcaccgaaggtcctttggaaatgtaccgagcagaggtagagatcgtagatgtgaatgatcacgccccccgttttccgcggcagcagctggacttggaaattggggaggcagctcctccaggacagcgtttcccgttggaaaaggctcaggatgcagatgtggggagcaattcgattagcagctataggctgagctccaatgaacactttgcactggatgtgaagaagcgcagcgacggcagcctggtcccagagctgctcctggagaagcctttggatcgagagaagcaatcggactaccgcctggtgctgactgctgtcgatggagggaacccgccgagatctggcaccgcagagctccgggtatccgtgctggacgtaaacgacaacgccccagccttccagcaatccagctacaggattagtgtgttggagagcgcaccagcgggcatggtgctcatccagctcaatgcctcagacccggacctgggtcccagtggtaacgtcaccttttatttcagtggtcatacccctgatcgtgtaagaaacctctttagcctgcaccccactactggaaagcttactcttttggggcccctagactttgagagtgagaattactatgaatttgatgtgcgggctcgcgatgggggttctccagccatggagcaacattgcagccttcgagtggatctgctggacgtaaatgacaatgccccttacatcacagtgacctcagagcttggaaccctccccgagagtgcagaacctggcactgtggtggcacttatcagtgtgcaggatccagactcagggtcaaacggagatgtgagcctccgcattcctgaccacttgccatttgccctcaagtctgccttcaggaaccagttctccctggtgactgctggacccttggatcgagaggccaaatctagctatgacatcatggtcactgcttctgatgctgggaaccctcctctcagtacccacagaactattttcctcaatatttcagatgtgaatgataatccaccctctttctttcagaggtcacatgaggtgtttgttcctgagaacaatcgcccaggggacctgctttgctcccttgcagcctctgacccagactctggcttgaatgcgcttatctcctactcactcctggagcccaggaatcgagatgtatcagcttcctctttcatctctctgaacccccagacaggagctgttcatgctactcgatcctttgactatgagcaaacccagacactgcagtttgaggtgcaggcccgggatcggggcaacccaccccttagcagcactgtaacagttcgtctatttgtgctggacctcaatgacaatgctccagctgtgctccgtcctcgggcccggcctggttccttatgtccccaagcactgcctccatcagttggtgctggccacctaatcacaaaggtgactgctgtggacttggattcaggttacaatgcttgggtttcctatcagctcctggaggccccagatcccagcctgtttgcagtctctcgatatgctggggaggtgcggacggctgttcctatcccagctgacctcccaccacagaagctggtcattgtggtaaaggatagtggtagtccaccactctctacctctgttactctcttagtgtccttagaggaagacactcatccagttgtcccagatcttcgagaatcttcagctccaagggaaggagaatctcgtctaaccctctacttggctgtgtccctagtggcaatttgctttgtctcctttggctcattcgtggcactactctctaagtgtcttcgtggggcagcctgtggagtcacatgctttcctgctggcacctgtgcctgtctcaccagatctcgaaggagggaggggcttcccccttccaatgggatcctccgaatccagctagggtcagatgaccctatcaagtttgttgatgtgggaggccactctcatggctgtacacccttggcttctgcacccactcggagtgatagcttcatgatggtgaagtcacccagtgcacctatggcaggggagcctgttcgcccaagctgcccaccctctgatcttctctatgggctagaggtgagacctttgcaggctcaacaaatgcttgagggttattctgatccaggcatatggctaggccatgtcctagagagtactggcctctcagtaagtgcccatagtgatgtcaccatttttgtaagaggtaactatgtggtagacgctgtgctttgtaactgtttcgtgaattaa

SEQ ID NO: 172215 - DNA, 4761 bp, Homo sapiens
  Payload ID: 13863
  Gene Symbol: PCDHGC5
  Gene Name: protocadherin gamma subfamily C, 5
  Uniprot ID: Q9Y5F6
  ENST ID: ENST00000252087
  CDS Start-End: 121-2955
agcagtttttaagaggctggaaggagacataagagacttcagctgctgcattccaagccctgggtctaccttggagacaggacagcacagacttactctccacaaagggacttctgggtcatggggcccaagacactcccacagctcgctgggaaatggcaagtgctgtgcatgttgtccttgtgctgctggggctgggtgtctgggcagcttcgttactcagtggtggaggagtctgagccggggacgctggtggggaatgttgctcaggatctgggcttaaagatgacagatctgttgagccggcggctgcaattgggctctgaggagaatgggcgctatttttccctgagcttgatgagtggtgccctggcagtgaatcaaaagattgaccgagaaagcctatgtggagccagcaccagctgcctgctgccagtgcaggtggtgactgaacaccccctggagctaatccgtgtagaggtagagatcctggatctcaatgacaactctcctagctttgccacccctgagcgagagatgcgcatctcagaatcagcagcatctggggcacgattcccactggacagtgcccaggatccggatgtgggcaccaatactgtgagcttttacactctaagccccaacagccacttctctctgaatgtgaagaccctaaaagatgggaagccattcccagagctggtgctagagcagcagctggatcgtgaagcccaggcaagacatcagctggtgcttactgctgtggatggggggaccccagcccgctcagggaccacccttatctctgtcatcgtgctggacatcaatgataatgctccaaccttccaatcctcagttctacgtgtgggaatcccagagaatgcacccattggtactctgctgctccgcctcaatgccactgatccagacgagggcaccaacggccaactagactattcttttggagaccacacatctgaggcagtgcggaacctctttggcctagaccctagcagtggggcaatccatgtgttgggtcccatagactttgaggagtcacgtttctatgaaattcatgcaagagcccgtgaccagggacagcctgccatggagggccactgtgtgattcaagtggatgtgggggatgtcaatgacaatgccccagaggtgctattggcctctttggccaaccctgtcctagagagcacaccagtgggcacagtagtggggttgtttaatgtgcgagaccgggactcaggtagaaatggtgaagtgagccttgatatctctccggacctgccatttcagattaagccttctgagaaccactactcgctgctaaccagccagcctttggaccgggaggccacatcccactatatcatcgagctgctggccagcgatgctggttcaccttccctacacaaacatctcaccatcaggctcaacatttcagatgtcaatgacaatgcaccccgcttcaaccagcagctttacactgcttacatcctagaaaaccggcctccgggctcccttctttgcactgtggctgcctcagatccagacactggggataatgcccgcctcacctactccattgtaggaaatcaggttcagggagccccagcctcctcctttgtgtatgtcaacccagaggatggacggatctttgcccagcgtacctttgactatgaattgctgcagatgctgcagattgtggtgggggttcgagactccggctctcccccattgcatgccaacacatctctgcatgtgtttgtcctagacgagaatgataatgccccagctgtgctgcacccacggccagactgggaacactcagccccccagcgtctccctcgctctgctcctcctggctccttggtcaccaaggtgacagccgtggatgctgatgcaggccacaatgcgtggctctcctactcactgttgccacagtccacagccccaggactgttcctcgtgtctacacacactggtgaggtgcgcacagcccgggccttactggaggatgactctgacacccagcaggtggtggtcctggtgagggacaatggtgacccttcactctcctccacagccacagtgctgctggttctggaggatgaggaccctgaggaaatgcccaaatccagtgacttcctcatacaccctcctgagcgttcagaccttaccctttacctcattgtggctctagcgaccgtcagtctcttatccctagtcaccttcacctttctgtcagcgaagtgccttcagggaaacgcagacggggacgggggtggagggcagtgctgcaggcgccaggactcaccctccccggacttctataagcagtccagccccaacctgcaggtgagctcggacggcacgctcaagtacatggaggtgacgctgcggcccacagactcgcagagccactgctacaggacgtgcttttcaccggcctcggacggcagtgacttcacttttctaagacccctcagcgttcagcagcccacagctctggcgctggagcctgacgccatccggtcccgctctaatacgctgcgggagcggagccagcaagccccgcccaacacggactggcgtttctctcaggcccagagacccggcaccagcggctcccaaaatggcgatgacaccggcacctggcccaacaaccagtttgacacagagatgctgcaagccatgatcttggcgtccgccagtgaagctgctgatgggagctccaccctgggagggggtgccggcaccatgggattgagcgcccgctacggaccccagttcaccctgcagcacgtgcccgactaccgccagaatgtctacatcccaggcagcaatgccacactgaccaacgcagctggcaagcgggatggcaaggccccagcaggtggcaatggcaacaagaagaagtcgggcaagaaggagaagaagtaacatggaggccaggccaagagccacagggcggcctctccccaaccagcccagcttctccttacctgcacccaggcctcagagtttcagggctaacccccagaatactggtaggggccaaggccatgctccccttgggaaacagaaacaagtgcccagtcagcacctaccccttcccccccagggggttgaatatgcaaaagcagttccgctgggaacccccatccaatcaactgctgtacccatgggggtagtggggttactgtagacaccaagaaccatttgccacaccccgtttagttacagctgaactcctccatcttccaaatcaatcaggcccatccatcccatgcctccctcctccccaccccactccaacagttcctctttcccgagtaaggtggttggggtgttgaagtaccaagtaacctacaagcctcctagttctgaaaagttggaagggcatcatgacctcttggcctctcctttgattctcaatcttcccccaaagcatggtttggtgccagccccttcacctccttccagagcccaagatcaatgctcaagttttggaggacatgatcaccatccccatggtactgatgcttgctggatttagggagggcattttgctaccaagcctcttcccaacgccctggggaccagtcttctgttttgtttttcattgtttgacgtttccactgcatgccttgacttcccccacctcctcctcaaacaagagactccactgcatgttccaagacagtatggggtggtaagataaggaagggaagtgtgtggatgtggatggtgggggcatggacaaagcttgacacatcaagttatcaaggccttggaggaggctctgtatgtcctcaggggactgacaacatcctccagattccagccataaaccaataactaggctggacccttcccactacataatagggctcagcccaggcagccagctttgggctgagctaacaggaccaatggattaaactggcatttcagtccaaggaagctcgaagcaggtttaggaccaggtccccttgagaggtcagaggggcctctgtgggtgctgggtactccagaggtgccactggtggaagggtcagcggagccccagcaggaagggtgggccagccaggccattcttagtccctgggttggggaggcagggagctagggcagggaccaaatgaacagaaagtctcagcccaggatggggcttcttcaacagggcccctgccctcctgaagcctcagtccttcaccttgccaggtgccgtttctcttccgtgaaggccactgcccaggtccccagtgcgccccctagtggccatagcctggttaaagttccccagtgcctccttgtgcatagaccttcttctcccacccccttctgcccctgggtccccggccatccagcggggctgccagagaaccccagacctgcccttacagtagtgtagcgccccctccctctttcggctggtgtagaatagccagtagtgtagtgcggtgtgcttttacgtgatggcgggtgggcagcgggcggcgggctccgcgcagccgtctgtccttgatctgcccgcggcggcccgtgttgtgttttgtgctgtgtccacgcgctaaggcgaccccctcccccgtactgacttctcctataagcgcttctcttcgcatagtcacgtagctcccaccccaccctcttcctgtgtctcacgcaagttttatactctaatatttatatggctttttttcttcgacaaaaaaataataaaacgtttcttctgaaaagctg

SEQ ID NO: 172216 - DNA, 2763 bp, Homo sapiens
  Payload ID: 13863
  Gene Symbol: PCDHGC5
  Gene Name: protocadherin gamma subfamily C, 5
  Uniprot ID: Q9Y5F6
  ENST ID: ENST00000610789
  CDS Start-End: 75-2711
tgcattccaagccctgggtctaccttggagacaggacagcacagacttactctccacaaagggacttctgggtcatggggcccaagacactcccacagctcgctgggaaatggcaagtgctgtgcatgttgtccttgtgctgctggggctgggtgtctgggcagcttcgttactcagtggtggaggagtctgagccggggacgctggtggggaatgttgctcaggatctgggcttaaagatgacagatctgttgagccggcggctgcaattgggctctgaggagaatgggcgctatttttccctgagcttgatgagtggtgccctggcagtgaatcaaaagattgaccgagaaagcctatgtggagccagcaccagctgcctgctgccagtgcaggtggtgactgaacaccccctggagctaatccgtgtagaggtagagatcctggatctcaatgacaactctcctagctttgccacccctgagcgagagatgcgcatctcagaatcagcagcatctggggcacgattcccactggacagtgcccaggatccggatgtgggcaccaatactgtgagcttttacactctaagccccaacagccacttctctctgaatgtgaagaccctaaaagatgggaagccattcccagagctggtgctagagcagcagctggatcgtgaagcccaggcaagacatcagctggtgcttactgctgtggatggggggaccccagcccgctcagggaccacccttatctctgtcatcgtgctggacatcaatgataatgctccaaccttccaatcctcagttctacgtgtgggaatcccagagaatgcacccattggtactctgctgctccgcctcaatgccactgatccagacgagggcaccaacggccaactagactattcttttggagaccacacatctgaggcagtgcggaacctctttggcctagaccctagcagtggggcaatccatgtgttgggtcccatagactttgaggagtcacgtttctatgaaattcatgcaagagcccgtgaccagggacagcctgccatggagggccactgtgtgattcaagtggatgtgggggatgtcaatgacaatgccccagaggtgctattggcctctttggccaaccctgtcctagagagcacaccagtgggcacagtagtggggttgtttaatgtgcgagaccgggactcaggtagaaatggtgaagtgagccttgatatctctccggacctgccatttcagattaagccttctgagaaccactactcgctgctaaccagccagcctttggaccgggaggccacatcccactatatcatcgagctgctggccagcgatgctggttcaccttccctacacaaacatctcaccatcaggctcaacatttcagatgtcaatgacaatgcaccccgcttcaaccagcagctttacactgcttacatcctagaaaaccggcctccgggctcccttctttgcactgtggctgcctcagatccagacactggggataatgcccgcctcacctactccattgtaggaaatcaggttcagggagccccagcctcctcctttgtgtatgtcaacccagaggatggacggatctttgcccagcgtacctttgactatgaattgctgcagatgctgcagattgtggtgggggttcgagactccggctctcccccattgcatgccaacacatctctgcatgtgtttgtcctagacgagaatgataatgccccagctgtgctgcacccacggccagactgggaacactcagccccccagcgtctccctcgctctgctcctcctggctccttggtcaccaaggtgacagccgtggatgctgatgcaggccacaatgcgtggctctcctactcactgttgccacagtccacagccccaggactgttcctcgtgtctacacacactggtgaggtgcgcacagcccgggccttactggaggatgactctgacacccagcaggtggtggtcctggtgagggacaatggtgacccttcactctcctccacagccacagtgctgctggttctggaggatgaggaccctgaggaaatgcccaaatccagtgacttcctcatacaccctcctgagcgttcagaccttaccctttacctcattgtggctctagcgaccgtcagtctcttatccctagtcaccttcacctttctgtcagcgaagtgccttcagggaaacgcagacggggacgggggtggagggcagtgctgcaggcgccaggactcaccctccccggacttctataagcagtccagccccaacctgcaggtgagctcggacggcacgctcaagtacatggaggtgacgctgcggcccacagactcgcagagccactgctacaggacgtgcttttcaccggcctcggacggcagtgacttcacttttctaagacccctcagcgttcagcagcccacagctctggcgctggagcctgacgccatccggtcccgctctaatacgctgcgggagcggagccaggtgaggggctcggcgccgccccgggcgacccctgggggcggcactggagaagccgcccgtcctcataagggattgaacttgcatccactcctctccggccggcttggtcgctggctgcgctccacccgattctcgggatcattggaccgtttgcgcgaaaccagagtggccgattaagggatggggctccgagcaccgggggtggtggcgactgtgggcgaggggaggt

SEQ ID NO: 172217 - DNA, 6347 bp, Homo sapiens
  Payload ID: 13864
  Gene Symbol:
  Gene Name: Protocadherin-20  [Source:UniProtKB/Swiss-Prot
  Acc:Q8N6Y1]
  Uniprot ID: Q8N6Y1
  ENST ID: ENST00000409186
  CDS Start-End: 2107-4962
ataaaatattgcatattgacagcaatatcccagtggctgatttattgataatatctttgaccatttgaattttttttcctattatatataaggaaatacaaactaggtaacaggaagaaatgagaaaaggtagagagagacaatagtgaagactggtggacattggactacaaaagattactgcaggattcttctatgatgctgattacagctttatcttatcaagctttggcattgaagaccatgtgaattcatctccaaccctgggagtgaaataagaactttcttttttgcttctgaaattttaagctctatacggaaacactttttacttaatctgcatgacatcagagaaagggaacaatttgaccaaagaaagaagaaaaagtggattagcagatctcatggactgagagtctccagatggtaggaggtccattcagcagaaatacaaatgagaatacgatgtttctaatgtatttaatttggagaaaaacattttcacattttttcaataagcaaagttaatcacattacattttacctttggtaaaagaatattaattaaattgattatgctcacactagagaacaatataacatatcatagtcaaataacgtttatgtttatattcattattacaagcattaaaaagaaataaatagtgttggcagatattacttaagcaggcagagtctcctatatctggaaatttatcatttatactgctagagttaaggatattttaatagtatttaattaactaaaatttaagagattactgctttcagccatttaaaaattattaattgaacgttgactacctgcttggtctgtgtttaccattatccattaagagcttgttatttaattggggaaatccaagtcaagatacagtaaatacgcaagaaacttatcaaatatttgaataaaaataatggcacccatattttatggtgtatttatagtattgttcctgaaaaaataagaaaaactattaatatccccctccaaaaacacatggaagaaatttcccatttttaaaaattattaatattctcatctaataaatgctatttggaactatcatattggaaataaataaaatacctttaatccaataatgatatcattgaagaaatgagtaccctcatatagttacagtgctattataaataactaaaatttctggaggtatttgttttacatataccagaaagtcttaaaattttacattccagttaaaacatatattcaatatttagtaattcatgctaaattatcataaatatttccaaagatgtcgataaaataagcctcactgaaaatatatttatataaaatattgaacaagtaaaatgttcatatccacattacaaactgatatgaggaaattctattctgtccaaaaatgatacagaatacgtaaagacatgcaaaatgattataacataataaaacataaattagatgatttttaaaatctctaagttcagtaaaaatccagagaaatcaaactgaatgtggataaaggcaccaaaaagtggaatgaataaagtcacgtacatcggactgtgaagaaaaatcatgttttggaaaagctgtccacacaatacaagaatttttaatcgaagaaaaattcactggcaaagaagccactactgcctctaaaataagaccacaaggcaaacacccagagacatttgagcctccaactaggaaactagcagaagctctaccactgcccacagcaaagattcaaaattgggcaacctgtggacttggcatctgactggtgcggcaaggaaggaggctggtaggtaagcgctactgtgcccaaccccgagctgcctcttcgcagtcttcaggagcaagtcccccattccagctcctctggcagagtatggagttacctgcgtccggggcaggaaaccatgaatgtgcccttctgccctcttgcctttctgccactctttgagttcccgtccttaattgaagagccagtgactattggctgaagttcccccagcgatttgcatgaaccgagagggagtgtcttctgccgccctcccttcaagagcgctctgactgcagcctcccagggaatgcgcggccgagggaatgcgcgcagctcacaggccctgggagtgagctggtgcccggcgacctggcacccgcgcctggatatggggcgtctacatcgtcccaggagcagcaccagctacaggaacctgccgcatctgtttctgtttttcctcttcgtgggacccttcagctgcctcgggagttacagccgggccaccgagcttctgtacagcctaaacgagggactacccgcgggggtgctcatcggcagcctggccgaggacctgcggctgctgcccaggtctgcagggaggccggacccgcagtcgcagctgccagagcgcaccggtgctgagtggaacccccctctctccttcagcctggcctcccggggactgagtggccagtacgtgaccctagacaaccgctctggggagctgcacacttcagctcaggagatcgacagggaggccctgtgtgttgaagggggtggagggactgcgtggagcggcagcgtttccatctcctcctctccttctgactcttgtcttttgctgctggatgtgcttgtcctgcctcaggaatacttcaggtttgtgaaggtgaagatcgccatcagagacatcaatgacaacgccccgcagttccctgtttcccagatctcggtgtgggtcccggaaaatgcacctgtaaacacccgactggccatagagcatcctgctgtggacccagatgtaggcattaatggggtacagacctatcgcttactggactaccatggtatgttcaccctggacgtggaggagaatgagaatggggagcgcaccccctacctaattgtcatgggtgctttggacagggaaacccaggaccagtatgtgagcatcatcatagctgaggatggtgggtctccaccacttttgggcagtgccactctcaccattggcatcagtgacattaatgacaattgccctctcttcacagactcacaaatcaatgtcactgtgtatgggaatgctacagtgggcaccccaattgcagctgtccaggctgtggataaagacttggggaccaatgctcaaattacttattcttacagtcagaaagttccacaagcatctaaggatttatttcacctggatgaaaacactggagtcattaaacttttcagtaagattggaggaagtgttctggagtcccacaagctcaccatccttgctaatggaccaggctgcatccctgctgtaatcactgctcttgtgtccattattaaagttattttcagaccccctgaaattgtccctcgttacatagcaaacgagatagatggtgtggtttatctgaaagaactggaacccgttaacactcccattgcgtttttcaccataagagatccagaaggtaaatacaaggttaactgctacctggatggtgaagggccgtttaggttatcaccttacaaaccatacaataatgaatatttactagagaccacaaaacctatggactatgagctacagcagttctatgaagtagctgtggtggcttggaactctgagggatttcatgtcaaaagggtcattaaagtgcaacttttagatgacaatgataatgctccaattttccttcaacccttaatagaactaaccatcgaagagaacaactcacccaatgcctttttgactaagctgtatgctacagatgccgacagcgaggagagaggccaagtttcatattttctgggacctgatgctccatcatatttttccttagacagtgtcacaggaattctgacagtttctactcagctggaccgagaagagaaagaaaagtacagatacactgtcagagctgttgactgtgggaagccacccagagaatcagtagccactgtggccctcacagtgttggataaaaatgacaacagtcctcggtttatcaacaaggacttcagcttttttgtgcctgaaaactttccaggctatggtgagattggagtaattagtgtaacagatgctgacgctggacgaaatggatgggtcgccctctctgtggtgaaccagagtgatatttttgtcatagatacaggaaagggtatgctgagggctaaagtctctttggacagagagcagcaaagctcctatactttgtgggttgaagctgttgatgggggtgagcctgccctctcctctacagcaaaaatcacaattctccttctagatatcaatgacaaccctcctcttgttttgtttcctcagtctaatatgtcttatctgttagtactgccttctactctgccaggctccccggttacagaagtctatgctgtcgacaaagacacaggcatgaatgctgtcatagcttacagcatcatagggagaagaggtcctaggcctgagtccttcaggattgaccctaaaactggcaacattactttggaagaggcattgctgcagacagattatgggctccatcgcttactggtgaaagtgagtgatcatggttatcccgagcctctccactccacagtcatggtgaacctatttgtcaatgacactgtcagtaatgagagttacattgagagtcttttaagaaaagaaccagagattaatatagaggagaaagaaccacaaatctcaatagaaccgactcataggaaggtagaatctgtgtcttgtatgcccaccttagtagctctgtctgtaataagcttgggttccatcacactggtcacagggatgggcatatacatctgtttaaggaaaggggaaaagcatcccagggaagatgaaaatttggaagtacagattccactgaaaggaaaaattgacttgcatatgcgagagagaaagccaatggatatttctaatatttgatatttcatggtggaataacacagagaaatgttttaactgactttggatcttcatcacctaaaaaagagtgtgttgatggcagttccaatgaaggacaactaatttataacttgttctatattgtaaatagctgtttacaggtttttaaatttaaattcagaggttataaaatgtgtacagcatttttaagtgaaaattagtactaacagctataggacttgtatttaaaaaaaaaaaaaaagcttggacatggtttgcagctttcatacaccaagcagatgattgataaaacctgggagtaaggtaagaaaaatggaacaaatttttatctaaaaattcctgtcaccacaagagggcatcagctgctcctttgcaggaaactggggtattgtacttggcagttgtacatgaaattaatgaaagagtatattttaaatatattgtttttaacattaaacaaatatgaaattaaagtaaattaaatttcaccctatttaaacatatgataaaaaaagaaatgcacttgtaaacagaatgtttattacctcataagtgcatatatagtgtgaaagagaaggcattaaaaagaagtgcaattcctttttagcaaggataaaatcattgccttgtgttacagattcagcctgctgaagagtattccactttctgtgtactcgaattgctttctgtttgctttaccactgcacttgttattattacaagggaaatagatttatacatacatatatatattcttcattacaggaaatgtaactagatattgtgcccaagaaaaacagccagaagcaaagaaatgcttcaatctttagttgcttcataggcattcatgacattttagtgctttcacaacttgttggtcgtactttatacttgggttatatattagacttttataggcttgaaatcatccatcacataagaaaatagaaatcatattaaaagtgaattcttctagaggcttgtgtacactactggttgttttagttgggccttttatatgaaagttatactgtacttatctttttgttgttgtttaggtttgttgactaccatttctggcttcctttctttggttttggattaaatccaacagtttatttgtaagccctgcagcagatttctttgataatttagcttttactgaatctcttgcaatgaagaaagctatttcatcagtgatttatcactttcaattcattgtgtgagctggaaatattattttatatgagagctatagcaaaataatctgtataaacaaggaatgtgttagcttaaactggatcattttactttttggcatcatgcatctgtactgtaccaaaagtgtttatatgtctgcaaattaaaggtatatattttcataa

SEQ ID NO: 172218 - DNA, 6845 bp, Homo sapiens
  Payload ID: 13865
  Gene Symbol: PCDH15
  Gene Name: protocadherin-related 15
  Uniprot ID: Q96QU1
  ENST ID: ENST00000320301
  CDS Start-End: 396-6263
caacgtgctgagctaatagcgacagatagagggcagacagattcctgctagcagcttagtgttagttgcttgtggtaactaaggcaggtggcatacatctcagaacgtggagaatgatggtatgctttctgagttaacatgttgaactgttttgcttttctaaaaattttcctagtaacattttcttgatgatatgagagtggatatcaatgcctcacagaaacaagaggtggaacatgtgaatgaatcgtcttggaactagattatgagcactggttctttttaaagggatgtgcaagaggcagccttggcaagaaaacttgctgcataatcttacatggactaaagatgaaactttaaaccgcaaatcagctttgagtgaactttgacagaagatgtttcgacagttttatctctggacatgtttagcttcagggatcatcctgggctctctctttgaaatctgcttgggccagtatgatgatgattgcaaactagctaggggaggaccaccagctaccatagttgctattgatgaagaaagtcggaatggtacaattctggtggacaacatgctgatcaaagggactgctggaggaccagaccccaccatagaactttctttaaaggataatgtggattactgggtgttgatggatcctgttaagcaaatgcttttcctgaacagcaccggaagagttctggatagagatccaccgatgaacatacactccattgtggtgcaggtccagtgcatcaacaaaaaagtgggcactattatctaccatgaagtgcgaatagtggtgagagacaggaatgacaactcacccactttcaagcatgaaagctactatgccacagtgaatgagctcactccagttggtaccacaatattcacaggattttcaggagacaatggagctacagatatagatgatggaccaaatggacagatagagtatgttattcagtataatccagatgatccgacatccaatgacacctttgaaattcccctaatgttgactggaaatatagtgttaaggaagaggctcaactatgaagataagactcgctactttgtcataatccaagctaatgaccgtgcccaaaatctgaatgagaggcgaaccaccaccaccactctcacagtggatgttctggatggagatgacttgggtccaatgtttcttccttgtgtccttgtgccaaacactcgtgattgccgtccactcacttatcaagctgccatacctgagttgagaactccggaagaactgaaccccattattgttacgccaccaatccaagccattgatcaggaccggaatattcaaccgccatcagataggccaggaatcctctattccatccttgttgggactcctgaggattacccacgatttttccatatgcatcctaggacagcagaacttagtctcctggagccagtaaacagagactttcaccagaaatttgatttggttattaaggctgaacaagacaatggtcatcctcttcctgcctttgccggtctacacattgaaatactggatgaaaacaatcaaagtccatattttacaatgcccagttatcaaggctatatcctggaatctgccccagtgggagcaaccatttcggacagtctcaatttgacttcacctttaagaatagtagctctggacaaggacatagaagatacaaaagacccagagcttcacctttttctgaatgactacacctcagtcttcaccgtcacacagactggtattactcgctacctcaccttacttcaaccagtggacagggaagaacagcaaacttacaccttttcgataacagcatttgatggtgtacaagaaagtgagccagtcatcgtcaatattcaagtgatggatgcaaatgataacacgccaaccttccctgaaatatcctatgatgtgtatgtttatacagacatgagacctggggacagtgtcatacagctcactgcagtcgacgcagacgaagggtcaaatggggagatcacatatgaaatccttgttggggctcagggagacttcatcatcaataaaacaacagggcttatcaccatcgctccaggggtggaaatgatagtcgggcggacttacgcactcacggtccaagcagcggataatgctcctcctgcagagcgaaggaactccatctgcactgtgtatattgaagtgcttccaccaaataatcaaagccctcctcgcttcccacagctgatgtatagccttgaaattagtgaagccatgagggttggtgctgttttattaaatctacaggcaactgatcgagagggagactcaataacatatgccattgagaatggagatcctcagagagtttttaatctttcagaaaccacggggattctaaccttagggaaagcactggacagggaaagcactgatcgctacattctgatcatcacagcttcagatggcaggccagatgggacctcaactgccacagtaaacatagtggtgacagatgtcaatgacaatgctccagtgtttgatccttatctgccaagaaatttatctgtggtggaagaagaagccaatgcctttgtgggtcaagtaaaagcaacagaccctgatgctggaataaatggtcaagtgcactacagtttgggtaactttaataatctttttcgtatcacatccaatgggagcatttacacagcagtgaagcttaacagagaagtcagggactactatgaacttgttgttgtggcaacagatggagcagtacaccctcgtcattcaactctaaccttggccatcaaggttttggacattgatgataacagtcctgtgttcaccaattcaacatacactgtccttgttgaagagaatttgccagctgggactaccatccttcaaatagaggccaaagatgtcgaccttggagcaaatgtgtcttaccggataagaagcccagaagtgaagcacttttttgcactacatccatttacaggagaactatcgcttttaaggagtttagattatgaggcatttccagaccaagaagcaagtatcacttttctggtagaggcctttgatatttatggaacaatgccacctggtattgctactgtcacagtgattgtaaaggatatgaatgattatcctcctgtctttagtaaacgaatatacaaagggatggtggctccggatgcagtcaagggtacacctatcacaacagtttatgctgaagatgcagaccctcctggattacctgcaagtcgtgtgaggtatagagtagatgatgtacagtttccttaccctgccagtatttttgaagtggaagaagattctggaagagtaataacacgagtcaatcttaatgaagaacctacaacaatttttaagttggtggtggttgcttttgatgatggggagcctgtgatgtccagcagtgccacagtgaagattcttgtcttacatcctggtgagatcccacgcttcacacaggaggaatatagacctcctccagtaagtgaacttgccaccaaagggaccatggttggtgtaatttctgctgctgccattaatcaaagtattgtgtactccattgtttcaggaaatgaagaagatacatttggaattaataacatcacaggtgttatctatgtgaatggacctctggattatgagaccaggacaagctatgtacttcgagtccaagctgattccctggaagtggtccttgccaatctccgagttccttcaaaaagcaatacagctaaagtatacattgagattcaggatgaaaataatcatcccccagtgtttcagaaaaaattctacatcggaggtgtatctgaagatgcaagaatgtttacttctgtactcagagtgaaggctactgataaagatactggcaattatagtgtcatggcctacagactcataataccaccaattaaagagggaaaagaaggatttgtagtggaaacatatacagggcttatcaaaactgctatgctcttccataatatgaggagatcctacttcaagtttcaagttattgcaactgacgactatgggaagggactgagcggcaaagccgatgtactcgtctccgtggtcaatcagctggatatgcaagtcattgtttccaatgtgcctcctactctagtggaaaaaaagatagaagatcttacagagatcttggatcgctatgttcaggaacaaattcctggtgccaaggtcgtagtggagtccattggagctcgccggcatggagatgccttttccctagaagattacaccaaatgtgacttgactgtctatgcaattgacccccaaaccaacagagccatcgatagaaatgagctttttaaatttttggatggcaaactacttgatatcaataaagactttcagccgtattatggggaaggaggacgcattctggagatccggactccagaggcagtgaccagcattaaaaagagaggagaaagtctaggatacacagaaggggccttgttggctctggccttcatcatcatcctctgctgcattcctgccatcttggtggttttggtcagctacagacagtttaaagtacgtcaagctgagtgtacaaagactgcacgaattcaggccgcattacccgcggctaaaccagcagtgccggctcctgcaccagtggcagcgcccccgccgccgccgccgcctccgccaggtgcgcatctctatgaagaacttggagacagctcaattcttttccttctctaccattttcaacaaagcaggggaaataactcagtctcagaagacaggaaacatcaacaagttgtgatgcccttttcttccaatactattgaggctcacaagtcagctcatgtagacggatcacttaagagcaacaaactgaagtctgcaagaaaattcacatttctatctgatgaggatgacttaagtgcccataatcccctttataaggaaaacataagtcaagtatcaacaaattcagacatttcacagagaacagattttgtagacccattttcacccaaaatacaagccaagagtaagtctctgaggggcccaagagaaaagattcagaggctgtggagtcagtcagtcagcttacccaggaggctgatgaggaaagttccaaatagaccagagatcatagatctgcagcagtggcaaggcaccaggcagaaagctgaaaatgaaaacactggaatctgtacaaacaaaagaggtagcagcaatccattgcttacaactgaagaggcaaatttgacagagaaagaggaaataaggcaaggtgaaacactgatgatagaaggaacagaacagttgaaatctctctcttcagactcttcattttgctttcccaggcctcacttctcattctccactttgccaactgtttcaagaactgtggaactcaaatcagaacctaatgtcatcagttctcctgctgagtgttccttggaactttctccttcaaggccttgtgttttacattcttcactctctaggagagagacacctatttgtatgttacctattgaaaccgaaagaaatatttttgaaaattttgcccatccaccaaacatctctccttctgcctgtccccttccccctcctcctcctatttctcctccttctcctcctcctgctcctgctcctcttgctcctcctcctgacatttctcctttttctcttttttgtcctcctccctctcctccttctatccctcttcctcttcctcctcctacattttttccactttccgtttcaacgtctggtcccccaacaccacctcttctacctccatttccaactcctcttcctccaccacctccttctattccttgccctccacctccttcagcttcatttctgtccacagagtgtgtctgtataacaggtgttaaatgcacgaccaacttgatgcctgccgagaaaattaagtcctctatgacacagctatcaacaacgacagtgtgtaaaacagaccctcagagagaaccaaaaggcatcctcagacacgttaaaaacttagcagaacttgaaaaatcagtagctaacatgtacagtcaaatagaaaaaaactatctacgcacaaatgtttcagaacttcaaactatgtgcccttcagaagtaacaaatatggaaatcacatctgaacaaaacaaggggagtttgaacaatattgtcgagggaactgaaaaacaatctcacagtcaatctacttcactgtaatgttgcttttcttattttagtcgggcaaacctcttgttgatcatagtcttcaagttgaacatcaaatttgaacgtcaaagaagactctattattttaccccaaattcaatgaaatgcagttttttttctcgtttttaatttaaaaagatattaacctcatcactactaactcactcatataatagatttaccttactttttaaaaactacaaagtagcataatttgttctacatttatttgaaaagtaagtaattttaatctcttttttagtgggaatatgtgggcatgaaaattagatacccaacttaaaccaaaggcatgtctatcatgtggatgcagtaacatttacatttagtttttgatcgtagttttatatgaatgttccaagaaaaaagcagactgttacaaataagttaaaactgatatgattgataggttctgttttttcttgaagcctatgtatttggtaagaagaaatactaccgaagtaaaatataatgtacctagattgtaggagatgacagacataaggtatttcaaaataaatctcaggtgctataacatgtagtcatctgttttct

SEQ ID NO: 172219 - DNA, 7017 bp, Homo sapiens
  Payload ID: 13865
  Gene Symbol: PCDH15
  Gene Name: protocadherin-related 15
  ENST ID: ENST00000361849
  CDS Start-End: 396-6269
caacgtgctgagctaatagcgacagatagagggcagacagattcctgctagcagcttagtgttagttgcttgtggtaactaaggcaggtggcatacatctcagaacgtggagaatgatggtatgctttctgagttaacatgttgaactgttttgcttttctaaaaattttcctagtaacattttcttgatgatatgagagtggatatcaatgcctcacagaaacaagaggtggaacatgtgaatgaatcgtcttggaactagattatgagcactggttctttttaaagggatgtgcaagaggcagccttggcaagaaaacttgctgcataatcttacatggactaaagatgaaactttaaaccgcaaatcagctttgagtgaactttgacagaagatgtttcgacagttttatctctggacatgtttagcttcagggatcatcctgggctctctctttgaaatctgcttgggccagtatgatgatgattgcaaactagctaggggaggaccaccagctaccatagttgctattgatgaagaaagtcggaatggtacaattctggtggacaacatgctgatcaaagggactgctggaggaccagaccccaccatagaactttctttaaaggataatgtggattactgggtgttgatggatcctgttaagcaaatgcttttcctgaacagcaccggaagagttctggatagagatccaccgatgaacatacactccattgtggtgcaggtccagtgcatcaacaaaaaagtgggcactattatctaccatgaagtgcgaatagtggtgagagacaggaatgacaactcacccactttcaagcatgaaagctactatgccacagtgaatgagctcactccagttggtaccacaatattcacaggattttcaggagacaatggagctacagatatagatgatggaccaaatggacagatagagtatgttattcagtataatccagatgatccgacatccaatgacacctttgaaattcccctaatgttgactggaaatatagtgttaaggaagaggctcaactatgaagataagactcgctactttgtcataatccaagctaatgaccgtgcccaaaatctgaatgagaggcgaaccaccaccaccactctcacagtggatgttctggatggagatgacttgggtccaatgtttcttccttgtgtccttgtgccaaacactcgtgattgccgtccactcacttatcaagctgccatacctgagttgagaactccggaagaactgaaccccattattgttacgccaccaatccaagccattgatcaggaccggaatattcaaccgccatcagataggccaggaatcctctattccatccttgttgggactcctgaggattacccacgatttttccatatgcatcctaggacagcagaacttagtctcctggagccagtaaacagagactttcaccagaaatttgatttggttattaaggctgaacaagacaatggtcatcctcttcctgcctttgccggtctacacattgaaatactggatgaaaacaatcaaagtccatattttacaatgcccagttatcaaggctatatcctggaatctgccccagtgggagcaaccatttcggacagtctcaatttgacttcacctttaagaatagtagctctggacaaggacatagaagatacaaaagacccagagcttcacctttttctgaatgactacacctcagtcttcaccgtcacacagactggtattactcgctacctcaccttacttcaaccagtggacagggaagaacagcaaacttacaccttttcgataacagcatttgatggtgtacaagaaagtgagccagtcatcgtcaatattcaagtgatggatgcaaatgataacacgccaaccttccctgaaatatcctatgatgtgtatgtttatacagacatgagacctggggacagtgtcatacagctcactgcagtcgacgcagacgaagggtcaaatggggagatcacatatgaaatccttgttggggctcagggagacttcatcatcaataaaacaacagggcttatcaccatcgctccaggggtggaaatgatagtcgggcggacttacgcactcacggtccaagcagcggataatgctcctcctgcagagcgaaggaactccatctgcactgtgtatattgaagtgcttccaccaaataatcaaagccctcctcgcttcccacagctgatgtatagccttgaaattagtgaagccatgagggttggtgctgttttattaaatctacaggcaactgatcgagagggagactcaataacatatgccattgagaatggagatcctcagagagtttttaatctttcagaaaccacggggattctaaccttagggaaagcactggacagggaaagcactgatcgctacattctgatcatcacagcttcagatggcaggccagatgggacctcaactgccacagtaaacatagtggtgacagatgtcaatgacaatgctccagtgtttgatccttatctgccaagaaatttatctgtggtggaagaagaagccaatgcctttgtgggtcaagtaaaagcaacagaccctgatgctggaataaatggtcaagtgcactacagtttgggtaactttaataatctttttcgtatcacatccaatgggagcatttacacagcagtgaagcttaacagagaagtcagggactactatgaacttgttgttgtggcaacagatggagcagtacaccctcgtcattcaactctaaccttggccatcaaggttttggacattgatgataacagtcctgtgttcaccaattcaacatacactgtccttgttgaagagaatttgccagctgggactaccatccttcaaatagaggccaaagatgtcgaccttggagcaaatgtgtcttaccggataagaagcccagaagtgaagcacttttttgcactacatccatttacaggagaactatcgcttttaaggagtttagattatgaggcatttccagaccaagaagcaagtatcacttttctggtagaggcctttgatatttatggaacaatgccacctggtattgctactgtcacagtgattgtaaaggatatgaatgattatcctcctgtctttagtaaacgaatatacaaagggatggtggctccggatgcagtcaagggtacacctatcacaacagtttatgctgaagatgcagaccctcctggattacctgcaagtcgtgtgaggtatagagtagatgatgtacagtttccttaccctgccagtatttttgaagtggaagaagattctggaagagtaataacacgagtcaatcttaatgaagaacctacaacaatttttaagttggtggtggttgcttttgatgatggggagcctgtgatgtccagcagtgccacagtgaagattcttgtcttacatcctggtgagatcccacgcttcacacaggaggaatatagacctcctccagtaagtgaacttgccaccaaagggaccatggttggtgtaatttctgctgctgccattaatcaaagtattgtgtactccattgtttcaggaaatgaagaagatacatttggaattaataacatcacaggtgttatctatgtgaatggacctctggattatgagaccaggacaagctatgtacttcgagtccaagctgattccctggaagtggtccttgccaatctccgagttccttcaaaaagcaatacagctaaagtatacattgagattcaggatgaaaataatcatcccccagtgtttcagaaaaaattctacatcggaggtgtatctgaagatgcaagaatgtttacttctgtactcagagtgaaggctactgataaagatactggcaattatagtgtcatggcctacagactcataataccaccaattaaagagggaaaagaaggatttgtagtggaaacatatacagggcttatcaaaactgctatgctcttccataatatgaggagatcctacttcaagtttcaagttattgcaactgacgactatgggaagggactgagcggcaaagccgatgtactcgtctccgtggtcaatcagctggatatgcaagtcattgtttccaatgtgcctcctactctagtggaaaaaaagatagaagatcttacagagatcttggatcgctatgttcaggaacaaattcctggtgccaaggtcgtagtggagtccattggagctcgccggcatggagatgccttttccctagaagattacaccaaatgtgacttgactgtctatgcaattgacccccaaaccaacagagccatcgatagaaatgagctttttaaatttttggatggcaaactacttgatatcaataaagactttcagccgtattatggggaaggaggacgcattctggagatccggactccagaggcagtgaccagcattaaaaagagaggagaaagtctaggatacacagaaggggccttgttggctctggccttcatcatcatcctctgctgcattcctgccatcttggtggttttggtcagctacagacagtttaaagtacgtcaagctgagtgtacaaagactgcacgaattcaggccgcattacccgcggctaaaccagcagtgccggctcctgcaccagtggcagcgcccccgccgccgccgccgcctccgccaggtgcgcatctctatgaagaacttggagacagctcaatgcataatcttttccttctctaccattttcaacaaagcaggggaaataactcagtctcagaagacaggaaacatcaacaagttgtgatgcccttttcttccaatactattgaggctcacaagtcagctcatgtagacggatcacttaagagcaacaaactgaagtctgcaagaaaattcacatttctatctgatgaggatgacttaagtgcccataatcccctttataaggaaaacataagtcaagtatcaacaaattcagacatttcacagagaacagattttgtagacccattttcacccaaaatacaagccaagagtaagtctctgaggggcccaagagaaaagattcagaggctgtggagtcagtcagtcagcttacccaggaggctgatgaggaaagttccaaatagaccagagatcatagatctgcagcagtggcaaggcaccaggcagaaagctgaaaatgaaaacactggaatctgtacaaacaaaagaggtagcagcaatccattgcttacaactgaagaggcaaatttgacagagaaagaggaaataaggcaaggtgaaacactgatgatagaaggaacagaacagttgaaatctctctcttcagactcttcattttgctttcccaggcctcacttctcattctccactttgccaactgtttcaagaactgtggaactcaaatcagaacctaatgtcatcagttctcctgctgagtgttccttggaactttctccttcaaggccttgtgttttacattcttcactctctaggagagagacacctatttgtatgttacctattgaaaccgaaagaaatatttttgaaaattttgcccatccaccaaacatctctccttctgcctgtccccttccccctcctcctcctatttctcctccttctcctcctcctgctcctgctcctcttgctcctcctcctgacatttctcctttttctcttttttgtcctcctccctctcctccttctatccctcttcctcttcctcctcctacattttttccactttccgtttcaacgtctggtcccccaacaccacctcttctacctccatttccaactcctcttcctccaccacctccttctattccttgccctccacctccttcagcttcatttctgtccacagagtgtgtctgtataacaggtgttaaatgcacgaccaacttgatgcctgccgagaaaattaagtcctctatgacacagctatcaacaacgacagtgtgtaaaacagaccctcagagagaaccaaaaggcatcctcagacacgttaaaaacttagcagaacttgaaaaatcagtagctaacatgtacagtcaaatagaaaaaaactatctacgcacaaatgtttcagaacttcaaactatgtgcccttcagaagtaacaaatatggaaatcacatctgaacaaaacaaggggagtttgaacaatattgtcgagggaactgaaaaacaatctcacagtcaatctacttcactgtaatgttgcttttcttattttagtcgggcaaacctcttgttgatcatagtcttcaagttgaacatcaaatttgaacgtcaaagaagactctattattttaccccaaattcaatgaaatgcagttttttttctcgtttttaatttaaaaagatattaacctcatcactactaactcactcatataatagatttaccttactttttaaaaactacaaagtagcataatttgttctacatttatttgaaaagtaagtaattttaatctcttttttagtgggaatatgtgggcatgaaaattagatacccaacttaaaccaaaggcatgtctatcatgtggatgcagtaacatttacatttagtttttgatcgtagttttatatgaatgttccaagaaaaaagcagactgttacaaataagttaaaactgatatgattgataggttctgttttttcttgaagcctatgtatttggtaagaagaaatactaccgaagtaaaatataatgtacctagattgtaggagatgacagacataaggtatttcaaaataaatctcaggtgctataacatgtagtcatctgttttctgataagaacatcttttactctgacttgcttttatcttagtagtatgcttatggatttagtagtatgcttatggatttgataaatcttatactttttcagttgctgtcttattctctttatttctcattgtgctttcccttcccttctttataatgaaaataaatct

SEQ ID NO: 172220 - DNA, 4230 bp, Homo sapiens
  Payload ID: 13865
  Gene Symbol: PCDH15
  Gene Name: protocadherin-related 15
  Uniprot ID: Q96QU1
  ENST ID: ENST00000373955
  CDS Start-End: 293-3178
aacgtggagaatgatggtatgctttctgagttaacatgttgaactgttttgcttttctaaaaattttcctagtaacattttcttgatgatatgagagtggatatcaatgcctcacagaaacaagaggtggaacatgtgaatgaatcgtcttggaactagattatgagcactggttctttttaaagggatgtgcaagaggcagccttggcaagaaaacttgctgcataatcttacatggactaaagatgaaactttaaaccgcaaatcagctttgagtgaactttgacagaagatgtttcgacagttttatctctggacatgtttagcttcagggatcatcctgggctctctctttgaaatctgcttgggccagtatgatgatgattgcaaactagctaggggaggaccaccagctaccatagttgctattgatgaagaaagtcggaatggtacaattctggtggacaacatgctgatcaaagggactgctggaggaccagaccccaccatagaactttctttaaaggataatgtggattactgggtgttgatggatcctgttaagcaaatgcttttcctgaacagcaccggaagagttctggatagagatccaccgatgaacatacactccattgtggtgcaggtccagtgcatcaacaaaaaagtgggcactattatctaccatgaagtgcgaatagtggtgagagacaggaatgacaactcacccactttcaagcatgaaagctactatgccacagtgaatgagctcactccagttggtaccacaatattcacaggattttcaggagacaatggagctacagatatagatgatggaccaaatggacagatagagtatgttattcagtataatccagatgatccgacatccaatgacacctttgaaattcccctaatgttgactggaaatatagtgttaaggaagaggctcaactatgaagataagactcgctactttgtcataatccaagctaatgaccgtgcccaaaatctgaatgagaggcgaaccaccaccaccactctcacagtggatgttctggatggagatgacttgggtccaatgtttcttccttgtgtccttgtgccaaacactcgtgattgccgtccactcacttatcaagctgccatacctgagttgagaactccggaagaactgaaccccattattgttacgccaccaatccaagccattgatcaggaccggaatattcaaccgccatcagataggccaggaatcctctattccatccttgttgggactcctgaggattacccacgatttttccatatgcatcctaggacagcagaacttagtctcctggagccagtaaacagagactttcaccagaaatttgatttggttattaaggctgaacaagacaatggtcatcctcttcctgcctttgccggtctacacattgaaatactggatgaaaacaatcaaagtccatattttacaatgcccagttatcaaggctatatcctggaatctgccccagtgggagcaaccatttcggacagtctcaatttgacttcacctttaagaatagtagctctggacaaggacatagaagatacaaaagacccagagcttcacctttttctgaatgactacacctcagtcttcaccgtcacacagactggtattactcgctacctcaccttacttcaaccagtggacagggaagaacagcaaacttacaccttttcgataacagcatttgatggtgtacaagaaagtgagccagtcatcgtcaatattcaagtgatggatgcaaatgataacacgccaaccttccctgaaatatcctatgatgtgtatgtttatacagacatgagacctggggacagtgtcatacagctcactgcagtcgacgcagacgaagggtcaaatggggagatcacatatgaaatccttgttggggctcagggagacttcatcatcaataaaacaacagggcttatcaccatcgctccaggggtggaaatgatagtcgggcggacttacgcactcacggtccaagcagcggataatgctcctcctgcagagcgaaggaactccatctgcactgtgtatattgaagtgcttccaccaaataatcaaagccctcctcgcttcccacagctgatgtatagccttgaaattagtgaagccatgagggttggtgctgttttattaaatctacaggcaactgatcgagagggagactcaataacatatgccattgagaatggagatcctcagagagtttttaatctttcagaaaccacggggattctaaccttagggaaagcactggacagggaaagcactgatcgctacattctgatcatcacagcttcagatggcaggccagatgggacctcaactgccacagtaaacatagtggtgacagatgtcaatgacaatgctccagtgtttgatccttatctgccaagaaatttatctgtggtggaagaagaagccaatgcctttgtgggtcaagtaaaagcaacagaccctgatgctggaataaatggtcaagtgcactacagtttgggtaactttaataatctttttcgtatcacatccaatgggagcatttacacagcagtgaagcttaacagagaagtcagggactactatgaacttgttgttgtggcaacagatggagcagtacaccctcgtcattcaactctaaccttggccatcaaggttttggacattgatgataacagtcctgtgttcaccaattcaacatacactgtccttgttgaagagaatttgccagctgggactaccatccttcaaatagaggccaaagatgtcgaccttggagcaaatgtgtcttaccggataagaagcccagaagtgaagcacttttttgcactacatccatttacaggagaactatcgcttttaaggagtttagattatgaggcatttccagaccaagaagcaagtatcacttttctggtagaggcctttgatatttatggaacaatgccacctggtattgctactgtcacagtgattgtaaaggatatgaatgattatcctcctgtctttagtaaacgaatatacaaagggatggtggctccggatgcagtcaagggtacacctatcacaacagtttatgctgaagatgcagaccctcctgtaagtagaaggcattgattaatattctgaactgtactgagaaaaatccttaacactcataaatgaccgaatcacaagacagcaaaagtagtctctgtaaatttcaccctatttattcatacattttatgttcttttacttatttcatccacaggtacagagcatatttcagatgactattattgaacctagacaaagaatatgctttttgtttttctagaatgcacaatgtactaattactaatttatctaacaatgataaatatatatgaattgtctccatttgtaagcttcacttaatctggatatgttttaaatttatgtattttccactgtatgcatatatgactattttgttagcaaactccaaatcaacatatcacatgaaacttatattgaatgtgtttattttggtaaattaaaaagcttaagattgcttacagaaaatagttaacattcttttatcatatagaactttacttttttgagatatcccaaattatctttcaaggcaaggttttaattaaaatattattatagtgagagtgataaaataccatgtataattaatagtatacatataaaaaagctttctataaataccttgttttataaatattaattattatcctgatgatttaaatttttctctgagtgggctcacactgtaagttggtggctgataaattttagaaaaatacaaataaaagttaaatgaactattttagaagagtaagaaaataaaatcctgaatcttataagtgatttagaagttctgttttctattgctaatataaatagtatttcttttaatgcttgtatttaattaaaagtgaatggccatcataacatttttcagcttcgatttggacaagtcttataaactctattgtgactatatggaatcaaaatgtattaatgttaatatgaaagtggtgggctttaattcagaagctccttttcttaagtgtgttaaaatgtctttgaaactgctttattgtgctttgggatatatgataggcaaaaatttcatagacttgaacccatcaataaagatagtgaatgtgaaa

SEQ ID NO: 172221 - DNA, 6931 bp, Homo sapiens
  Payload ID: 13865
  Gene Symbol: PCDH15
  Gene Name: protocadherin-related 15
  ENST ID: ENST00000373956
  CDS Start-End: 396-2360
caacgtgctgagctaatagcgacagatagagggcagacagattcctgctagcagcttagtgttagttgcttgtggtaactaaggcaggtggcatacatctcagaacgtggagaatgatggtatgctttctgagttaacatgttgaactgttttgcttttctaaaaattttcctagtaacattttcttgatgatatgagagtggatatcaatgcctcacagaaacaagaggtggaacatgtgaatgaatcgtcttggaactagattatgagcactggttctttttaaagggatgtgcaagaggcagccttggcaagaaaacttgctgcataatcttacatggactaaagatgaaactttaaaccgcaaatcagctttgagtgaactttgacagaagatgtttcgacagttttatctctggacatgtttagcttcagggatcatcctgggctctctctttgaaatctgcttgggccagtatgatgatgattgcaaactagctaggggaggaccaccagctaccatagttgctattgatgaagaaagtcggaatggtacaattctggtggacaacatgctgatcaaagggactgctggaggaccagaccccaccatagaactttctttaaaggataatgtggattactgggtgttgatggatcctgttaagcaaatgcttttcctgaacagcaccggaagagttctggatagagatccaccgatgaacatacactccattgtggtgcaggtccagtgcatcaacaaaaaagtgggcactattatctaccatgaagtgcgaatagtggtgagagacaggaatgacaactcacccactttcaagcatgaaagctactatgccacagtgaatgagctcactccagttggtaccacaatattcacaggattttcaggagacaatggagctacagatatagatgatggaccaaatggacagatagagtatgttattcagtataatccagatgatccgacatccaatgacacctttgaaattcccctaatgttgactggaaatatagtgttaaggaagaggctcaactatgaagataagactcgctactttgtcataatccaagctaatgaccgtgcccaaaatctgaatgagaggcgaaccaccaccaccactctcacagtggatgttctggatggagatgacttgggtccaatgtttcttccttgtgtccttgtgccaaacactcgtgattgccgtccactcacttatcaagctgccatacctgagttgagaactccggaagaactgaaccccattattgttacgccaccaatccaagccattgatcaggaccggaatattcaaccgccatcagataggccaggaatcctctattccatccttgttgggactcctgaggattacccacgatttttccatatgcatcctaggacagcagaacttagtctcctggagccagtaaacagagactttcaccagaaatttgatttggttattaaggctgaacaagacaatggtcatcctcttcctgcctttgccggtctacacattgaaatactggatgaaaacaatcaaagtccatattttacaatgcccagttatcaaggctatatcctggaatctgccccagtgggagcaaccatttcggacagtctcaatttgacttcacctttaagaatagtagctctggacaaggacatagaagatacaaaagacccagagcttcacctttttctgaatgactacacctcagtcttcaccgtcacacagactggtattactcgctacctcaccttacttcaaccagtggacagggaagaacagcaaacttacaccttttcgataacagcatttgatggtgtacaagaaagtgagccagtcatcgtcaatattcaagtgatggatgcaaatgataacacgccaaccttccctgaaatatcctatgatgtgtatgtttatacagacatgagacctggggacagtgtcatacagctcactgcagtcgacgcagacgaagggtcaaatggggagatcacatatgaaatccttgttggggctcagggagacttcatcatcaataaaacaacagggcttatcaccatcgctccaggggtggaaatgatagtcgggcggacttacgcactcacggtccaagcagcggataatgctcctcctgcagagcgaaggaactccatctgcactgtgtatattgaagtgcttccaccaaataatcaaagccctcctcgcttcccacagctgatgtatagccttgaaattagtgaagccatgagggttggtgctgttttattaaatctacagcacggggattctaaccttagggaaagcactggacagggaaagcactgatcgctacattctgatcatcacagcttcagatggcaggccagatgggacctcaactgccacagtaaacatagtggtgacagatgtcaatgacaatgctccagtgtttgatccttatctgccaagaaatttatctgtggtggaagaagaagccaatgcctttgtgggtcaagtaaaagcaacagaccctgatgctggaataaatggtcaagtgcactacagtttgggtaactttaataatctttttcgtatcacatccaatgggagcatttacacagcagtgaagcttaacagagaagtcagggactactatgaacttgttgttgtggcaacagatggagcagtacaccctcgtcattcaactctaaccttggccatcaaggttttggacattgatgataacagtcctgtgttcaccaattcaacatacactgtccttgttgaagagaatttgccagctgggactaccatccttcaaatagaggccaaagatgtcgaccttggagcaaatgtgtcttaccggataagaagcccagaagtgaagcacttttttgcactacatccatttacaggagaactatcgcttttaaggagtttagattatgaggcatttccagaccaagaagcaagtatcacttttctggtagaggcctttgatatttatggaacaatgccacctggtattgctactgtcacagtgattgtaaaggatatgaatgattatcctcctgtctttagtaaacgaatatacaaagggatggtggctccggatgcagtcaagggtacacctatcacaacagtttatgctgaagatgcagaccctcctggattacctgcaagtcgtgtgaggtatagagtagatgatgtacagtttccttaccctgccagtatttttgaagtggaagaagattctggaagagtaataacacgagtcaatcttaatgaagaacctacaacaatttttaagttggtggtggttgcttttgatgatggggagcctgtgatgtccagcagtgccacagtgaagattcttgtcttacatcctggtgagatcccacgcttcacacaggaggaatatagacctcctccagtaagtgaacttgccaccaaagggaccatggttggtgtaatttctgctgctgccattaatcaaagtattgtgtactccattgtttcaggaaatgaagaagatacatttggaattaataacatcacaggtgttatctatgtgaatggacctctggattatgagaccaggacaagctatgtacttcgagtccaagctgattccctggaagtggtccttgccaatctccgagttccttcaaaaagcaatacagctaaagtatacattgagattcaggatgaaaataatcatcccccagtgtttcagaaaaaattctacatcggaggtgtatctgaagatgcaagaatgtttacttctgtactcagagtgaaggctactgataaagatactggcaattatagtgtcatggcctacagactcataataccaccaattaaagagggaaaagaaggatttgtagtggaaacatatacagggcttatcaaaactgctatgctcttccataatatgaggagatcctacttcaagtttcaagttattgcaactgacgactatgggaagggactgagcggcaaagccgatgtactcgtctccgtggtcaatcagctggatatgcaagtcattgtttccaatgtgcctcctactctagtggaaaaaaagatagaagatcttacagagatcttggatcgctatgttcaggaacaaattcctggtgccaaggtcgtagtggagtccattggagctcgccggcatggagatgccttttccctagaagattacaccaaatgtgacttgactgtctatgcaattgacccccaaaccaacagagccatcgatagaaatgagctttttaaatttttggatggcaaactacttgatatcaataaagactttcagccgtattatggggaaggaggacgcattctggagatccggactccagaggcagtgaccagcattaaaaagagaggagaaagtctaggatacacagaaggggccttgttggctctggccttcatcatcatcctctgctgcattcctgccatcttggtggttttggtcagctacagacagtttaaagtacgtcaagctgagtgtacaaagactgcacgaattcaggccgcattacccgcggctaaaccagcagtgccggctcctgcaccagtggcagcgcccccgccgccgccgccgcctccgccaggtgcgcatctctatgaagaacttggagacagctcaattcttttccttctctaccattttcaacaaagcaggggaaataactcagtctcagaagacaggaaacatcaacaagttgtgatgcccttttcttccaatactattgaggctcacaagtcagctcatgtagacggatcacttaagagcaacaaactgaagtctgcaagaaaattcacatttctatctgatgaggatgacttaagtgcccataatcccctttataaggaaaacataagtcaagtatcaacaaattcagacatttcacagagaacagattttgtagacccattttcacccaaaatacaagccaagagtaagtctctgaggggcccaagagaaaagattcagaggctgtggagtcagtcagtcagcttacccaggaggctgatgaggaaagttccaaatagaccagagatcatagatctgcagcagtggcaaggcaccaggcagaaagctgaaaatgaaaacactggaatctgtacaaacaaaagaggtagcagcaatccattgcttacaactgaagaggcaaatttgacagagaaagaggaaataaggcaaggtgaaacactgatgatagaaggaacagaacagttgaaatctctctcttcagactcttcattttgctttcccaggcctcacttctcattctccactttgccaactgtttcaagaactgtggaactcaaatcagaacctaatgtcatcagttctcctgctgagtgttccttggaactttctccttcaaggccttgtgttttacattcttcactctctaggagagagacacctatttgtatgttacctattgaaaccgaaagaaatatttttgaaaattttgcccatccaccaaacatctctccttctgcctgtccccttccccctcctcctcctatttctcctccttctcctcctcctgctcctgctcctcttgctcctcctcctgacatttctcctttttctcttttttgtcctcctccctctcctccttctatccctcttcctcttcctcctcctacattttttccactttccgtttcaacgtctggtcccccaacaccacctcttctacctccatttccaactcctcttcctccaccacctccttctattccttgccctccacctccttcagcttcatttctgtccacagagtgtgtctgtataacaggtgttaaatgcacgaccaacttgatgcctgccgagaaaattaagtcctctatgacacagctatcaacaacgacagtgtgtaaaacagaccctcagagagaaccaaaaggcatcctcagacacgttaaaaacttagcagaacttgaaaaatcagtagctaacatgtacagtcaaatagaaaaaaactatctacgcacaaatgtttcagaacttcaaactatgtgcccttcagaagtaacaaatatggaaatcacatctgaacaaaacaaggggagtttgaacaatattgtcgagggaactgaaaaacaatctcacagtcaatctacttcactgtaatgttgcttttcttattttagtcgggcaaacctcttgttgatcatagtcttcaagttgaacatcaaatttgaacgtcaaagaagactctattattttaccccaaattcaatgaaatgcagttttttttctcgtttttaatttaaaaagatattaacctcatcactactaactcactcatataatagatttaccttactttttaaaaactacaaagtagcataatttgttctacatttatttgaaaagtaagtaattttaatctcttttttagtgggaatatgtgggcatgaaaattagatacccaacttaaaccaaaggcatgtctatcatgtggatgcagtaacatttacatttagtttttgatcgtagttttatatgaatgttccaagaaaaaagcagactgttacaaataagttaaaactgatatgattgataggttctgttttttcttgaagcctatgtatttggtaagaagaaatactaccgaagtaaaatataatgtacctagattgtaggagatgacagacataaggtatttcaaaataaatctcaggtgctataacatgtagtcatctgttttctgataagaacatcttttactctgacttgcttttatcttagtagtatgcttatggatttagtagtatgcttatggatttgataaatcttatactttttcagttgctgtcttattctctttatttctcattgtgctttcccttcccttctttataatgaaaataaatct

SEQ ID NO: 172222 - DNA, 7032 bp, Homo sapiens
  Payload ID: 13865
  Gene Symbol: PCDH15
  Gene Name: protocadherin-related 15
  ENST ID: ENST00000373957
  CDS Start-End: 396-6284
caacgtgctgagctaatagcgacagatagagggcagacagattcctgctagcagcttagtgttagttgcttgtggtaactaaggcaggtggcatacatctcagaacgtggagaatgatggtatgctttctgagttaacatgttgaactgttttgcttttctaaaaattttcctagtaacattttcttgatgatatgagagtggatatcaatgcctcacagaaacaagaggtggaacatgtgaatgaatcgtcttggaactagattatgagcactggttctttttaaagggatgtgcaagaggcagccttggcaagaaaacttgctgcataatcttacatggactaaagatgaaactttaaaccgcaaatcagctttgagtgaactttgacagaagatgtttcgacagttttatctctggacatgtttagcttcagggatcatcctgggctctctctttgaaatctgcttgggccagtatgatgatgactggcaatatgaggattgcaaactagctaggggaggaccaccagctaccatagttgctattgatgaagaaagtcggaatggtacaattctggtggacaacatgctgatcaaagggactgctggaggaccagaccccaccatagaactttctttaaaggataatgtggattactgggtgttgatggatcctgttaagcaaatgcttttcctgaacagcaccggaagagttctggatagagatccaccgatgaacatacactccattgtggtgcaggtccagtgcatcaacaaaaaagtgggcactattatctaccatgaagtgcgaatagtggtgagagacaggaatgacaactcacccactttcaagcatgaaagctactatgccacagtgaatgagctcactccagttggtaccacaatattcacaggattttcaggagacaatggagctacagatatagatgatggaccaaatggacagatagagtatgttattcagtataatccagatgatccgacatccaatgacacctttgaaattcccctaatgttgactggaaatatagtgttaaggaagaggctcaactatgaagataagactcgctactttgtcataatccaagctaatgaccgtgcccaaaatctgaatgagaggcgaaccaccaccaccactctcacagtggatgttctggatggagatgacttgggtccaatgtttcttccttgtgtccttgtgccaaacactcgtgattgccgtccactcacttatcaagctgccatacctgagttgagaactccggaagaactgaaccccattattgttacgccaccaatccaagccattgatcaggaccggaatattcaaccgccatcagataggccaggaatcctctattccatccttgttgggactcctgaggattacccacgatttttccatatgcatcctaggacagcagaacttagtctcctggagccagtaaacagagactttcaccagaaatttgatttggttattaaggctgaacaagacaatggtcatcctcttcctgcctttgccggtctacacattgaaatactggatgaaaacaatcaaagtccatattttacaatgcccagttatcaaggctatatcctggaatctgccccagtgggagcaaccatttcggacagtctcaatttgacttcacctttaagaatagtagctctggacaaggacatagaagatacaaaagacccagagcttcacctttttctgaatgactacacctcagtcttcaccgtcacacagactggtattactcgctacctcaccttacttcaaccagtggacagggaagaacagcaaacttacaccttttcgataacagcatttgatggtgtacaagaaagtgagccagtcatcgtcaatattcaagtgatggatgcaaatgataacacgccaaccttccctgaaatatcctatgatgtgtatgtttatacagacatgagacctggggacagtgtcatacagctcactgcagtcgacgcagacgaagggtcaaatggggagatcacatatgaaatccttgttggggctcagggagacttcatcatcaataaaacaacagggcttatcaccatcgctccaggggtggaaatgatagtcgggcggacttacgcactcacggtccaagcagcggataatgctcctcctgcagagcgaaggaactccatctgcactgtgtatattgaagtgcttccaccaaataatcaaagccctcctcgcttcccacagctgatgtatagccttgaaattagtgaagccatgagggttggtgctgttttattaaatctacaggcaactgatcgagagggagactcaataacatatgccattgagaatggagatcctcagagagtttttaatctttcagaaaccacggggattctaaccttagggaaagcactggacagggaaagcactgatcgctacattctgatcatcacagcttcagatggcaggccagatgggacctcaactgccacagtaaacatagtggtgacagatgtcaatgacaatgctccagtgtttgatccttatctgccaagaaatttatctgtggtggaagaagaagccaatgcctttgtgggtcaagtaaaagcaacagaccctgatgctggaataaatggtcaagtgcactacagtttgggtaactttaataatctttttcgtatcacatccaatgggagcatttacacagcagtgaagcttaacagagaagtcagggactactatgaacttgttgttgtggcaacagatggagcagtacaccctcgtcattcaactctaaccttggccatcaaggttttggacattgatgataacagtcctgtgttcaccaattcaacatacactgtccttgttgaagagaatttgccagctgggactaccatccttcaaatagaggccaaagatgtcgaccttggagcaaatgtgtcttaccggataagaagcccagaagtgaagcacttttttgcactacatccatttacaggagaactatcgcttttaaggagtttagattatgaggcatttccagaccaagaagcaagtatcacttttctggtagaggcctttgatatttatggaacaatgccacctggtattgctactgtcacagtgattgtaaaggatatgaatgattatcctcctgtctttagtaaacgaatatacaaagggatggtggctccggatgcagtcaagggtacacctatcacaacagtttatgctgaagatgcagaccctcctggattacctgcaagtcgtgtgaggtatagagtagatgatgtacagtttccttaccctgccagtatttttgaagtggaagaagattctggaagagtaataacacgagtcaatcttaatgaagaacctacaacaatttttaagttggtggtggttgcttttgatgatggggagcctgtgatgtccagcagtgccacagtgaagattcttgtcttacatcctggtgagatcccacgcttcacacaggaggaatatagacctcctccagtaagtgaacttgccaccaaagggaccatggttggtgtaatttctgctgctgccattaatcaaagtattgtgtactccattgtttcaggaaatgaagaagatacatttggaattaataacatcacaggtgttatctatgtgaatggacctctggattatgagaccaggacaagctatgtacttcgagtccaagctgattccctggaagtggtccttgccaatctccgagttccttcaaaaagcaatacagctaaagtatacattgagattcaggatgaaaataatcatcccccagtgtttcagaaaaaattctacatcggaggtgtatctgaagatgcaagaatgtttacttctgtactcagagtgaaggctactgataaagatactggcaattatagtgtcatggcctacagactcataataccaccaattaaagagggaaaagaaggatttgtagtggaaacatatacagggcttatcaaaactgctatgctcttccataatatgaggagatcctacttcaagtttcaagttattgcaactgacgactatgggaagggactgagcggcaaagccgatgtactcgtctccgtggtcaatcagctggatatgcaagtcattgtttccaatgtgcctcctactctagtggaaaaaaagatagaagatcttacagagatcttggatcgctatgttcaggaacaaattcctggtgccaaggtcgtagtggagtccattggagctcgccggcatggagatgccttttccctagaagattacaccaaatgtgacttgactgtctatgcaattgacccccaaaccaacagagccatcgatagaaatgagctttttaaatttttggatggcaaactacttgatatcaataaagactttcagccgtattatggggaaggaggacgcattctggagatccggactccagaggcagtgaccagcattaaaaagagaggagaaagtctaggatacacagaaggggccttgttggctctggccttcatcatcatcctctgctgcattcctgccatcttggtggttttggtcagctacagacagtttaaagtacgtcaagctgagtgtacaaagactgcacgaattcaggccgcattacccgcggctaaaccagcagtgccggctcctgcaccagtggcagcgcccccgccgccgccgccgcctccgccaggtgcgcatctctatgaagaacttggagacagctcaatgcataatcttttccttctctaccattttcaacaaagcaggggaaataactcagtctcagaagacaggaaacatcaacaagttgtgatgcccttttcttccaatactattgaggctcacaagtcagctcatgtagacggatcacttaagagcaacaaactgaagtctgcaagaaaattcacatttctatctgatgaggatgacttaagtgcccataatcccctttataaggaaaacataagtcaagtatcaacaaattcagacatttcacagagaacagattttgtagacccattttcacccaaaatacaagccaagagtaagtctctgaggggcccaagagaaaagattcagaggctgtggagtcagtcagtcagcttacccaggaggctgatgaggaaagttccaaatagaccagagatcatagatctgcagcagtggcaaggcaccaggcagaaagctgaaaatgaaaacactggaatctgtacaaacaaaagaggtagcagcaatccattgcttacaactgaagaggcaaatttgacagagaaagaggaaataaggcaaggtgaaacactgatgatagaaggaacagaacagttgaaatctctctcttcagactcttcattttgctttcccaggcctcacttctcattctccactttgccaactgtttcaagaactgtggaactcaaatcagaacctaatgtcatcagttctcctgctgagtgttccttggaactttctccttcaaggccttgtgttttacattcttcactctctaggagagagacacctatttgtatgttacctattgaaaccgaaagaaatatttttgaaaattttgcccatccaccaaacatctctccttctgcctgtccccttccccctcctcctcctatttctcctccttctcctcctcctgctcctgctcctcttgctcctcctcctgacatttctcctttttctcttttttgtcctcctccctctcctccttctatccctcttcctcttcctcctcctacattttttccactttccgtttcaacgtctggtcccccaacaccacctcttctacctccatttccaactcctcttcctccaccacctccttctattccttgccctccacctccttcagcttcatttctgtccacagagtgtgtctgtataacaggtgttaaatgcacgaccaacttgatgcctgccgagaaaattaagtcctctatgacacagctatcaacaacgacagtgtgtaaaacagaccctcagagagaaccaaaaggcatcctcagacacgttaaaaacttagcagaacttgaaaaatcagtagctaacatgtacagtcaaatagaaaaaaactatctacgcacaaatgtttcagaacttcaaactatgtgcccttcagaagtaacaaatatggaaatcacatctgaacaaaacaaggggagtttgaacaatattgtcgagggaactgaaaaacaatctcacagtcaatctacttcactgtaatgttgcttttcttattttagtcgggcaaacctcttgttgatcatagtcttcaagttgaacatcaaatttgaacgtcaaagaagactctattattttaccccaaattcaatgaaatgcagttttttttctcgtttttaatttaaaaagatattaacctcatcactactaactcactcatataatagatttaccttactttttaaaaactacaaagtagcataatttgttctacatttatttgaaaagtaagtaattttaatctcttttttagtgggaatatgtgggcatgaaaattagatacccaacttaaaccaaaggcatgtctatcatgtggatgcagtaacatttacatttagtttttgatcgtagttttatatgaatgttccaagaaaaaagcagactgttacaaataagttaaaactgatatgattgataggttctgttttttcttgaagcctatgtatttggtaagaagaaatactaccgaagtaaaatataatgtacctagattgtaggagatgacagacataaggtatttcaaaataaatctcaggtgctataacatgtagtcatctgttttctgataagaacatcttttactctgacttgcttttatcttagtagtatgcttatggatttagtagtatgcttatggatttgataaatcttatactttttcagttgctgtcttattctctttatttctcattgtgctttcccttcccttctttataatgaaaataaatct

SEQ ID NO: 172223 - DNA, 9237 bp, Homo sapiens
  Payload ID: 13865
  Gene Symbol: PCDH15
  Gene Name: protocadherin-related 15
  ENST ID: ENST00000373965
  CDS Start-End: 396-5429
caacgtgctgagctaatagcgacagatagagggcagacagattcctgctagcagcttagtgttagttgcttgtggtaactaaggcaggtggcatacatctcagaacgtggagaatgatggtatgctttctgagttaacatgttgaactgttttgcttttctaaaaattttcctagtaacattttcttgatgatatgagagtggatatcaatgcctcacagaaacaagaggtggaacatgtgaatgaatcgtcttggaactagattatgagcactggttctttttaaagggatgtgcaagaggcagccttggcaagaaaacttgctgcataatcttacatggactaaagatgaaactttaaaccgcaaatcagctttgagtgaactttgacagaagatgtttcgacagttttatctctggacatgtttagcttcagggatcatcctgggctctctctttgaaatctgcttgggccagtatgatgatgattgcaaactagctaggggaggaccaccagctaccatagttgctattgatgaagaaagtcggaatggtacaattctggtggacaacatgctgatcaaagggactgctggaggaccagaccccaccatagaactttctttaaaggataatgtggattactgggtgttgatggatcctgttaagcaaatgcttttcctgaacagcaccggaagagttctggatagagatccaccgatgaacatacactccattgtggtgcaggtccagtgcatcaacaaaaaagtgggcactattatctaccatgaagtgcgaatagtggtgagagacaggaatgacaactcacccactttcaagcatgaaagctactatgccacagtgaatgagctcactccagttggtaccacaatattcacaggattttcaggagacaatggagctacagatatagatgatggaccaaatggacagatagagtatgttattcagtataatccagatgatccgacatccaatgacacctttgaaattcccctaatgttgactggaaatatagtgttaaggaagaggctcaactatgaagataagactcgctactttgtcataatccaagctaatgaccgtgcccaaaatctgaatgagaggcgaaccaccaccaccactctcacagtggatgttctggatggagatgacttgggtccaatgtttcttccttgtgtccttgtgccaaacactcgtgattgccgtccactcacttatcaagctgccatacctgagttgagaactccggaagaactgaaccccattattgttacgccaccaatccaagccattgatcaggaccggaatattcaaccgccatcagataggccaggaatcctctattccatccttgttgggactcctgaggattacccacgatttttccatatgcatcctaggacagcagaacttagtctcctggagccagtaaacagagactttcaccagaaatttgatttggttattaaggctgaacaagacaatggtcatcctcttcctgcctttgccggtctacacattgaaatactggatgaaaacaatcaaagtccatattttacaatgcccagttatcaaggctatatcctggaatctgccccagtgggagcaaccatttcggacagtctcaatttgacttcacctttaagaatagtagctctggacaaggacatagaagatacaaaagacccagagcttcacctttttctgaatgactacacctcagtcttcaccgtcacacagactggtattactcgctacctcaccttacttcaaccagtggacagggaagaacagcaaacttacaccttttcgataacagcatttgatggtgtacaagaaagtgagccagtcatcgtcaatattcaagtgatggatgcaaatgataacacgccaaccttccctgaaatatcctatgatgtgtatgtttatacagacatgagacctggggacagtgtcatacagctcactgcagtcgacgcagacgaagggtcaaatggggagatcacatatgaaatccttgttggggctcagggagacttcatcatcaataaaacaacagggcttatcaccatcgctccaggggtggaaatgatagtcgggcggacttacgcactcacggtccaagcagcggataatgctcctcctgcagagcgaaggaactccatctgcactgtgtatattgaagtgcttccaccaaataatcaaagccctcctcgcttcccacagctgatgtatagccttgaaattagtgaagccatgagggttggtgctgttttattaaatctacaggcaactgatcgagagggagactcaataacatatgccattgagaatggagatcctcagagagtttttaatctttcagaaaccacggggattctaaccttagggaaagcactggacagggaaagcactgatcgctacattctgatcatcacagcttcagatggcaggccagatgggacctcaactgccacagtaaacatagtggtgacagatgtcaatgacaatgctccagtgtttgatccttatctgccaagaaatttatctgtggtggaagaagaagccaatgcctttgtgggtcaagtaaaagcaacagaccctgatgctggaataaatggtcaagtgcactacagtttgggtaactttaataatctttttcgtatcacatccaatgggagcatttacacagcagtgaagcttaacagagaagtcagggactactatgaacttgttgttgtggcaacagatggagcagtacaccctcgtcattcaactctaaccttggccatcaaggttttggacattgatgataacagtcctgtgttcaccaattcaacatacactgtccttgttgaagagaatttgccagctgggactaccatccttcaaatagaggccaaagatgtcgaccttggagcaaatgtgtcttaccggataagaagcccagaagtgaagcacttttttgcactacatccatttacaggagaactatcgcttttaaggagtttagattatgaggcatttccagaccaagaagcaagtatcacttttctggtagaggcctttgatatttatggaacaatgccacctggtattgctactgtcacagtgattgtaaaggatatgaatgattatcctcctgtctttagtaaacgaatatacaaagggatggtggctccggatgcagtcaagggtacacctatcacaacagtttatgctgaagatgcagaccctcctggattacctgcaagtcgtgtgaggtatagagtagatgatgtacagtttccttaccctgccagtatttttgaagtggaagaagattctggaagagtaataacacgagtcaatcttaatgaagaacctacaacaatttttaagttggtggtggttgcttttgatgatggggagcctgtgatgtccagcagtgccacagtgaagattcttgtcttacatcctggtgagatcccacgcttcacacaggaggaatatagacctcctccagtaagtgaacttgccaccaaagggaccatggttggtgtaatttctgctgctgccattaatcaaagtattgtgtactccattgtttcaggaaatgaagaagatacatttggaattaataacatcacaggtgttatctatgtgaatggacctctggattatgagaccaggacaagctatgtacttcgagtccaagctgattccctggaagtggtccttgccaatctccgagttccttcaaaaagcaatacagctaaagtatacattgagattcaggatgaaaataatcatcccccagtgtttcagaaaaaattctacatcggaggtgtatctgaagatgcaagaatgtttacttctgtactcagagtgaaggctactgataaagatactggcaattatagtgtcatggcctacagactcataataccaccaattaaagagggaaaagaaggatttgtagtggaaacatatacagggcttatcaaaactgctatgctcttccataatatgaggagatcctacttcaagtttcaagttattgcaactgacgactatgggaagggactgagcggcaaagccgatgtactcgtctccgtggtcaatcagctggatatgcaagtcattgtttccaatgtgcctcctactctagtggaaaaaaagatagaagatcttacagagatcttggatcgctatgttcaggaacaaattcctggtgccaaggtcgtagtggagtccattggagctcgccggcatggagatgccttttccctagaagattacaccaaatgtgacttgactgtctatgcaattgacccccaaaccaacagagccatcgatagaaatgagctttttaaatttttggatggcaaactacttgatatcaataaagactttcagccgtattatggggaaggaggacgcattctggagatccggactccagaggcagtgaccagcattaaaaagagaggagaaagtctaggatacacagaaggggccttgttggctctggccttcatcatcatcctctgctgcattcctgccatcttggtggttttggtcagctacagacagtttaaagtacgtcaagctgagtgtacaaagactgcacgaattcaggccgcattacccgcggctaaaccagcagtgccggctcctgcaccagtggcagcgcccccgccgccgccgccgcctccgccaggtgcgcatctctatgaagaacttggagacagctcaatgcataagtatgaaatgcctcaatatgggagtcgccgtcgattgttaccaccagctggacaggaggaatatggtgaggtggttggtgaagctgaggaagaatatgaggaggaagagtgggcaagaaaaagaatgatcaagttagttgttgatcgagagtatgaaaccagctcaactggagaagacagtgctcctgaatgtcagagaaaccgtcttcaccatcctagtatccacagtaatatcaacggcaatatatatattgcacagaatggttctgtggtgagaacccgccgtgcctgcctcacggacaacttaaaagttgcttcccctgttcgactgggagggccctttaagaaactagacaagttggcagtgacacatgaggagaatgtacctctgaacacattatcaaaggggccattttctactgaaaaaatgaatgcaagaccaactctggttacatttgccccttgccctgtggggactgacaatacagcggtgaagccactaaggaacaggctgaaaagcacagttgaacaggagtccatgattgacagtaagaacatcaaggaggctttggaatttcatagtgaccacacacagtctgatgatgaagagctttggatgggcccctggaacaacctccatataccaatgacaaaactgtgaccaattttttaaaagatattttaattaatttttacttacatttttaataaactgtgctttttattgtcactgagaaaacaatgtatggaatttatatcatgcacacaagctaaaactttgaacaatatgctttaaaattttaagagacagatttgcactcacattgttatcaattaatcgtttttcccagaaaatccttttggacatactttcactaaataacctatcgtttaaacatttagctgttttgttgggtcttgaatttttgttcattttaataaacaagaaataattactaaataatcatttatattttattgattaacatagattatgctttatttctagctccacaaaacatttttagtacatgtaattttattttccatagccaaaagggcaaaaaagaagtaagaggatatttacaggcaatgagtttatacagctgctgtctatactgccctaatttttaaaatgaaagctagaattgcaaagtaaagtaaatgagggaatcacctgtaaataattaattattttaaatcatgagcttgttttctttctttattgtcctgtataaaggttttcacattttaccataaatacatttatatcttgaccctttaggaaaccacttgaagtcgtatgtctttttatcaatattatttacaatattctcttgtcccttcatctcatatcaaatatggtagatactttagtttagtttaatcacttgaggttaaataattgtttggagcaacatggaaatctcacccttagcaaaagcttttagggaagtgagaaaggttcgagtaagcagtaatgcatctagaacgacaatttcataatggaagacatggtgaggttagggaagtctcacattaatgtcactagactttaatagtttgtaaacccagcatatcagagtaaaggaatttggcagggttgaaatgtatataatatataaagcttataaaggctatgaattcataacttcaaatgttgtgtttaacttcttccattttcaggttatttatagaatattttaatgcacatatttatgtgcctaaaatccagaaccaggaaatcattgcctgggcattttttaaaatcaaagaacatggtcttgattttttaccattgaacaaagcacagtgtttcatcataagtagaaatgaaaacagaatatcctttaaaaaacttgccttgtgtgttgcttattttccagatgatgtaaaaagaatgaaacaatatagattaagagaattcagaattctattgaatattacttagtatgatatagatgtagctcacttcaaattttgcacagtattgaccaagttcaggttttaatgaaatttcctcatgcatgcttaatatatggttgaaggactgaataatgcactattatttattcccctcttacatgtttcgcgtcttaaaaattgtttattattatgctatttcctcatttccaaagtgaatgaattgtactgacataaacttgccgacttgtaagagtagtatgtttttacttcagatttccaagaaaatatttgagatcaaatacagtaacatctcatctaccttattttattgagaattaatgcattccatacccttgccaaaaaaacaaaacaaaacaaacaaacaaaaaaaaacctagtggcattagctagattagaaacgtagaatcatgaccacacctcctggcctgccaaacaagcatccacattttcaaaagatcctaaggtggtttatatgcacattaaattttggaagcaatgaagtccggggcttattccttcaggcaccaaagcaatggtttttagtataggatactttgtataggaattagattaagcatatatttccctactaattcaatcagaggtcatcgaatataatttaatattatcttgatacccccagatcatctcagtcagcatcccttgatattctctctatatacagcttcatggctgcgtttttgtcctttgatttctggctgtgacatttaacttattctgttgttgtgcctttctcacatttttttctttcagtttatagcttctagtatcctgatgggaaagtttgtgttttttgtttgttttcttaatgttgaaaaatcatgaagcttaagatgggaattaggtacacggattcaaccaaatgttttgcgactcttagacgctttctttggttaccagtagatttggaaatatgatgttggcagaagtctagtggcctgacatatgagatgtcactgtattttaaactacattttttatgagaaaatatgcaaaattttacaagccacttagcagacacatttcagtaatttaaacttgatcatttcagtaaaaacaatcatgaggtcaatcatctgttacttaatggagatagtataaagagaagcagaatttacacagagcaaccaaaccaaatatttggtcagtatatttttgggtaacgtagagcagcaaaattattactaactaaataaatctggatcaattaaatagttactttcatagaactttcactagtctataaatccctgactcaggattaaaactgtggaacccagaggaaatacccaggtatgtttaatcttaagaatacttcatataaataacgtttcaatgtaaatatttataaagaaattggttgttatttttcctaggaaggtgtaggaaggttttcttgttgttctcaatcagcactagcttcaatcaggcagaagaaacagcaggtcttggctaatcgaggtgagaacagaatgatgtaatgactaatattgcaacccgttgattttagaaggtcttgtgggcattaagggaaagcagaggaagaatgagaaaatatggtcagagtgacataggacatttgtgacttaatgaccatcgaatcacaggtgttaatctccctctctcaatttgtctttctcattaattacagactctgagagttgtcatagaattgcaaccgtaggttggccaaaaccatctttttaaaatacagaagaaagtttgccttgaattttatatgtgatatgtcattcatgttattttaccacattgttcacagggatgttaaagactattatttacttaagtggttgttccaaaggtgattcagtagttaccattaaaatattatttaaaaacatttttatatcatagagccagaagtaattgaatattgactctcgagggaagacattttctgtcttttatttcatgagctttgatttttctctttctctgcttcaccttctgcactttataccttaagtgggatttatataccacttgaatttaattagcaaaataggcaaaaagtgctaataatctattctcagggcagatgcctattggtgcctgcaaattacacagcgataaggctgaaggataggttcaaaataatgttgaggacttacacattttatagatagtttctttctattcccaaatggtatgtgaaatttttgttctattttttttattggttttcaatagttaattttgatctttatcataagaagctttagttatagactggtatttttttcattgcaatctactttaaatttatggtcagttaagcacatgtatggaagattcgaacattgtctatagtttgaaaaatctatcaacaccttcactgctttcccaatttctttatccaaatacctgttcttccttaacaaatattatgttactgtataagaatctgaattagaagttttaagttaaaatgcattgttattcactacacaatgtttcaaaaataaattttcatttgaaaa

SEQ ID NO: 172224 - DNA, 7002 bp, Homo sapiens
  Payload ID: 13865
  Gene Symbol: PCDH15
  Gene Name: protocadherin-related 15
  ENST ID: ENST00000395430
  CDS Start-End: 396-6254
caacgtgctgagctaatagcgacagatagagggcagacagattcctgctagcagcttagtgttagttgcttgtggtaactaaggcaggtggcatacatctcagaacgtggagaatgatggtatgctttctgagttaacatgttgaactgttttgcttttctaaaaattttcctagtaacattttcttgatgatatgagagtggatatcaatgcctcacagaaacaagaggtggaacatgtgaatgaatcgtcttggaactagattatgagcactggttctttttaaagggatgtgcaagaggcagccttggcaagaaaacttgctgcataatcttacatggactaaagatgaaactttaaaccgcaaatcagctttgagtgaactttgacagaagatgtttcgacagttttatctctggacatgtttagcttcagggatcatcctgggctctctctttgaaatctgcttgggccagtatgatgatgattgcaaactagctaggggaggaccaccagctaccatagttgctattgatgaagaaagtcggaatggtacaattctggtggacaacatgctgatcaaagggactgctggaggaccagaccccaccatagaactttctttaaaggataatgtggattactgggtgttgatggatcctgttaagcaaatgcttttcctgaacagcaccggaagagttctggatagagatccaccgatgaacatacactccattgtggtgcaggtccagtgcatcaacaaaaaagtgggcactattatctaccatgaagtgcgaatagtggtgagagacaggaatgacaactcacccactttcaagcatgaaagctactatgccacagtgaatgagctcactccagttggtaccacaatattcacaggattttcaggagacaatggagctacagatatagatgatggaccaaatggacagatagagtatgttattcagtataatccagatgatccgacatccaatgacacctttgaaattcccctaatgttgactggaaatatagtgttaaggaagaggctcaactatgaagataagactcgctactttgtcataatccaagctaatgaccgtgcccaaaatctgaatgagaggcgaaccaccaccaccactctcacagtggatgttctggatggagatgacttgggtccaatgtttcttccttgtgtccttgtgccaaacactcgtgattgccgtccactcacttatcaagctgccatacctgagttgagaactccggaagaactgaaccccattattgttacgccaccaatccaagccattgatcaggaccggaatattcaaccgccatcagataggccaggaatcctctattccatccttgttgggactcctgaggattacccacgatttttccatatgcatcctaggacagcagaacttagtctcctggagccagtaaacagagactttcaccagaaatttgatttggttattaaggctgaacaagacaatggtcatcctcttcctgcctttgccggtctacacattgaaatactggatgaaaacaatcaaagtccatattttacaatgcccagttatcaaggctatatcctggaatctgccccagtgggagcaaccatttcggacagtctcaatttgacttcacctttaagaatagtagctctggacaaggacatagaagatacaaaagacccagagcttcacctttttctgaatgactacacctcagtcttcaccgtcacacagactggtattactcgctacctcaccttacttcaaccagtggacagggaagaacagcaaacttacaccttttcgataacagcatttgatggtgtacaagaaagtgagccagtcatcgtcaatattcaagtgatggatgcaaatgataacacgccaaccttccctgaaatatcctatgatgtgtatgtttatacagacatgagacctggggacagtgtcatacagctcactgcagtcgacgcagacgaagggtcaaatggggagatcacatatgaaatccttgttggggctcagggagacttcatcatcaataaaacaacagggcttatcaccatcgctccaggggtggaaatgatagtcgggcggacttacgcactcacggtccaagcagcggataatgctcctcctgcagagcgaaggaactccatctgcactgtgtatattgaagtgcttccaccaaataatcaaagccctcctcgcttcccacagctgatgtatagccttgaaattagtgaagccatgagggttggtgctgttttattaaatctacaggcaactgatcgagagggagactcaataacatatgccattgagaatggagatcctcagagagtttttaatctttcagaaaccacggggattctaaccttagggaaagcactggacagggaaagcactgatcgctacattctgatcatcacagcttcagatggcaggccagatgggacctcaactgccacagtaaacatagtggtgacagatgtcaatgacaatgctccagtgtttgatccttatctgccaagaaatttatctgtggtggaagaagaagccaatgcctttgtgggtcaagtaaaagcaacagaccctgatgctggaataaatggtcaagtgcactacagtttgggtaactttaataatctttttcgtatcacatccaatgggagcatttacacagcagtgaagcttaacagagaagtcagggactactatgaacttgttgttgtggcaacagatggagcagtacaccctcgtcattcaactctaaccttggccatcaaggttttggacattgatgataacagtcctgtgttcaccaattcaacatacactgtccttgttgaagagaatttgccagctgggactaccatccttcaaatagaggccaaagatgtcgaccttggagcaaatgtgtcttaccggataagaagcccagaagtgaagcacttttttgcactacatccatttacaggagaactatcgcttttaaggagtttagattatgaggcatttccagaccaagaagcaagtatcacttttctggtagaggcctttgatatttatggaacaatgccacctggtattgctactgtcacagtgattgtaaaggatatgaatgattatcctcctgtctttagtaaacgaatatacaaagggatggtggctccggatgcagtcaagggtacacctatcacaacagtttatgctgaagatgcagaccctcctggattacctgcaagtcgtgtgaggtatagagtagatgatgtacagtttccttaccctgccagtatttttgaagtggaagaagattctggaagagtaataacacgagtcaatcttaatgaagaacctacaacaatttttaagttggtggtggttgcttttgatgatggggagcctgtgatgtccagcagtgccacagtgaagattcttgtcttacatcctggtgagatcccacgcttcacacaggaggaatatagacctcctccagtaagtgaacttgccaccaaagggaccatggttggtgtaatttctgctgctgccattaatcaaagtattgtgtactccattgtttcaggaaatgaagaagatacatttggaattaataacatcacaggtgttatctatgtgaatggacctctggattatgagaccaggacaagctatgtacttcgagtccaagctgattccctggaagtggtccttgccaatctccgagttccttcaaaaagcaatacagctaaagtatacattgagattcaggatgaaaataatcatcccccagtgtttcagaaaaaattctacatcggaggtgtatctgaagatgcaagaatgtttacttctgtactcagagtgaaggctactgataaagatactggcaattatagtgtcatggcctacagactcataataccaccaattaaagagggaaaagaaggatttgtagtggaaacatatacagggcttatcaaaactgctatgctcttccataatatgaggagatcctacttcaagtttcaagttattgcaactgacgactatgggaagggactgagcggcaaagccgatgtactcgtctccgtggtcaatcagctggatatgcaagtcattgtttccaatgtgcctcctactctagtggaaaaaaagatagaagatcttacagagatcttggatcgctatgttcaggaacaaattcctggtgccaaggtcgtagtggagtccattggagctcgccggcatggagatgccttttccctagaagattacaccaaatgtgacttgactgtctatgcaattgacccccaaaccaacagagccatcgatagaaatgagctttttaaatttttggatggcaaactacttgatatcaataaagactttcagccgtattatggggaaggaggacgcattctggagatccggactccagaggcagtgaccagcattaaaaagagaggagaaagtctaggatacacagaaggggccttgttggctctggccttcatcatcatcctctgctgcattcctgccatcttggtggttttggtcagctacagacaacgtcaagctgagtgtacaaagactgcacgaattcaggccgcattacccgcggctaaaccagcagtgccggctcctgcaccagtggcagcgcccccgccgccgccgccgcctccgccaggtgcgcatctctatgaagaacttggagacagctcaattcttttccttctctaccattttcaacaaagcaggggaaataactcagtctcagaagacaggaaacatcaacaagttgtgatgcccttttcttccaatactattgaggctcacaagtcagctcatgtagacggatcacttaagagcaacaaactgaagtctgcaagaaaattcacatttctatctgatgaggatgacttaagtgcccataatcccctttataaggaaaacataagtcaagtatcaacaaattcagacatttcacagagaacagattttgtagacccattttcacccaaaatacaagccaagagtaagtctctgaggggcccaagagaaaagattcagaggctgtggagtcagtcagtcagcttacccaggaggctgatgaggaaagttccaaatagaccagagatcatagatctgcagcagtggcaaggcaccaggcagaaagctgaaaatgaaaacactggaatctgtacaaacaaaagaggtagcagcaatccattgcttacaactgaagaggcaaatttgacagagaaagaggaaataaggcaaggtgaaacactgatgatagaaggaacagaacagttgaaatctctctcttcagactcttcattttgctttcccaggcctcacttctcattctccactttgccaactgtttcaagaactgtggaactcaaatcagaacctaatgtcatcagttctcctgctgagtgttccttggaactttctccttcaaggccttgtgttttacattcttcactctctaggagagagacacctatttgtatgttacctattgaaaccgaaagaaatatttttgaaaattttgcccatccaccaaacatctctccttctgcctgtccccttccccctcctcctcctatttctcctccttctcctcctcctgctcctgctcctcttgctcctcctcctgacatttctcctttttctcttttttgtcctcctccctctcctccttctatccctcttcctcttcctcctcctacattttttccactttccgtttcaacgtctggtcccccaacaccacctcttctacctccatttccaactcctcttcctccaccacctccttctattccttgccctccacctccttcagcttcatttctgtccacagagtgtgtctgtataacaggtgttaaatgcacgaccaacttgatgcctgccgagaaaattaagtcctctatgacacagctatcaacaacgacagtgtgtaaaacagaccctcagagagaaccaaaaggcatcctcagacacgttaaaaacttagcagaacttgaaaaatcagtagctaacatgtacagtcaaatagaaaaaaactatctacgcacaaatgtttcagaacttcaaactatgtgcccttcagaagtaacaaatatggaaatcacatctgaacaaaacaaggggagtttgaacaatattgtcgagggaactgaaaaacaatctcacagtcaatctacttcactgtaatgttgcttttcttattttagtcgggcaaacctcttgttgatcatagtcttcaagttgaacatcaaatttgaacgtcaaagaagactctattattttaccccaaattcaatgaaatgcagttttttttctcgtttttaatttaaaaagatattaacctcatcactactaactcactcatataatagatttaccttactttttaaaaactacaaagtagcataatttgttctacatttatttgaaaagtaagtaattttaatctcttttttagtgggaatatgtgggcatgaaaattagatacccaacttaaaccaaaggcatgtctatcatgtggatgcagtaacatttacatttagtttttgatcgtagttttatatgaatgttccaagaaaaaagcagactgttacaaataagttaaaactgatatgattgataggttctgttttttcttgaagcctatgtatttggtaagaagaaatactaccgaagtaaaatataatgtacctagattgtaggagatgacagacataaggtatttcaaaataaatctcaggtgctataacatgtagtcatctgttttctgataagaacatcttttactctgacttgcttttatcttagtagtatgcttatggatttagtagtatgcttatggatttgataaatcttatactttttcagttgctgtcttattctctttatttctcattgtgctttcccttcccttctttataatgaaaataaatct

SEQ ID NO: 172225 - DNA, 6901 bp, Homo sapiens
  Payload ID: 13865
  Gene Symbol: PCDH15
  Gene Name: protocadherin-related 15
  ENST ID: ENST00000395432
  CDS Start-End: 396-6143
caacgtgctgagctaatagcgacagatagagggcagacagattcctgctagcagcttagtgttagttgcttgtggtaactaaggcaggtggcatacatctcagaacgtggagaatgatggtatgctttctgagttaacatgttgaactgttttgcttttctaaaaattttcctagtaacattttcttgatgatatgagagtggatatcaatgcctcacagaaacaagaggtggaacatgtgaatgaatcgtcttggaactagattatgagcactggttctttttaaagggatgtgcaagaggcagccttggcaagaaaacttgctgcataatcttacatggactaaagatgaaactttaaaccgcaaatcagctttgagtgaactttgacagaagatgtttcgacagttttatctctggacatgtttagcttcagggatcatcctgggctctctctttgaaatctgcttgggccagtatgatgatgattgcaaactagctaggggaggaccaccagctaccatagttgctattgatgaagaaagtcggaatggtacaattctggtggacaacatgctgatcaaagggactgctggaggaccagaccccaccatagaactttctttaaaggataatgtggattactgggtgttgatggatcctgttaagcaaatgcttttcctgaacagcaccggaagagttctggatagagatccaccgatgaacatacactccattgtggtgcaggtccagtgcatcaacaaaaaagtgggcactattatctaccatgaagtgcgaatagtggtgagagacaggaatgacaactcacccactttcaagcatgaaagctactatgccacagtgaatgagctcactccagttggtaccacaatattcacaggattttcaggagacaatggagctacagatatagatgatggaccaaatggacagatagagtatgttattcagtataatccagatgatccggaccgtgcccaaaatctgaatgagaggcgaaccaccaccaccactctcacagtggatgttctggatggagatgacttgggtccaatgtttcttccttgtgtccttgtgccaaacactcgtgattgccgtccactcacttatcaagctgccatacctgagttgagaactccggaagaactgaaccccattattgttacgccaccaatccaagccattgatcaggaccggaatattcaaccgccatcagataggccaggaatcctctattccatccttgttgggactcctgaggattacccacgatttttccatatgcatcctaggacagcagaacttagtctcctggagccagtaaacagagactttcaccagaaatttgatttggttattaaggctgaacaagacaatggtcatcctcttcctgcctttgccggtctacacattgaaatactggatgaaaacaatcaaagtccatattttacaatgcccagttatcaaggctatatcctggaatctgccccagtgggagcaaccatttcggacagtctcaatttgacttcacctttaagaatagtagctctggacaaggacatagaagatacaaaagacccagagcttcacctttttctgaatgactacacctcagtcttcaccgtcacacagactggtattactcgctacctcaccttacttcaaccagtggacagggaagaacagcaaacttacaccttttcgataacagcatttgatggtgtacaagaaagtgagccagtcatcgtcaatattcaagtgatggatgcaaatgataacacgccaaccttccctgaaatatcctatgatgtgtatgtttatacagacatgagacctggggacagtgtcatacagctcactgcagtcgacgcagacgaagggtcaaatggggagatcacatatgaaatccttgttggggctcagggagacttcatcatcaataaaacaacagggcttatcaccatcgctccaggggtggaaatgatagtcgggcggacttacgcactcacggtccaagcagcggataatgctcctcctgcagagcgaaggaactccatctgcactgtgtatattgaagtgcttccaccaaataatcaaagccctcctcgcttcccacagctgatgtatagccttgaaattagtgaagccatgagggttggtgctgttttattaaatctacaggcaactgatcgagagggagactcaataacatatgccattgagaatggagatcctcagagagtttttaatctttcagaaaccacggggattctaaccttagggaaagcactggacagggaaagcactgatcgctacattctgatcatcacagcttcagatggcaggccagatgggacctcaactgccacagtaaacatagtggtgacagatgtcaatgacaatgctccagtgtttgatccttatctgccaagaaatttatctgtggtggaagaagaagccaatgcctttgtgggtcaagtaaaagcaacagaccctgatgctggaataaatggtcaagtgcactacagtttgggtaactttaataatctttttcgtatcacatccaatgggagcatttacacagcagtgaagcttaacagagaagtcagggactactatgaacttgttgttgtggcaacagatggagcagtacaccctcgtcattcaactctaaccttggccatcaaggttttggacattgatgataacagtcctgtgttcaccaattcaacatacactgtccttgttgaagagaatttgccagctgggactaccatccttcaaatagaggccaaagatgtcgaccttggagcaaatgtgtcttaccggataagaagcccagaagtgaagcacttttttgcactacatccatttacaggagaactatcgcttttaaggagtttagattatgaggcatttccagaccaagaagcaagtatcacttttctggtagaggcctttgatatttatggaacaatgccacctggtattgctactgtcacagtgattgtaaaggatatgaatgattatcctcctgtctttagtaaacgaatatacaaagggatggtggctccggatgcagtcaagggtacacctatcacaacagtttatgctgaagatgcagaccctcctggattacctgcaagtcgtgtgaggtatagagtagatgatgtacagtttccttaccctgccagtatttttgaagtggaagaagattctggaagagtaataacacgagtcaatcttaatgaagaacctacaacaatttttaagttggtggtggttgcttttgatgatggggagcctgtgatgtccagcagtgccacagtgaagattcttgtcttacatcctggtgagatcccacgcttcacacaggaggaatatagacctcctccagtaagtgaacttgccaccaaagggaccatggttggtgtaatttctgctgctgccattaatcaaagtattgtgtactccattgtttcaggaaatgaagaagatacatttggaattaataacatcacaggtgttatctatgtgaatggacctctggattatgagaccaggacaagctatgtacttcgagtccaagctgattccctggaagtggtccttgccaatctccgagttccttcaaaaagcaatacagctaaagtatacattgagattcaggatgaaaataatcatcccccagtgtttcagaaaaaattctacatcggaggtgtatctgaagatgcaagaatgtttacttctgtactcagagtgaaggctactgataaagatactggcaattatagtgtcatggcctacagactcataataccaccaattaaagagggaaaagaaggatttgtagtggaaacatatacagggcttatcaaaactgctatgctcttccataatatgaggagatcctacttcaagtttcaagttattgcaactgacgactatgggaagggactgagcggcaaagccgatgtactcgtctccgtggtcaatcagctggatatgcaagtcattgtttccaatgtgcctcctactctagtggaaaaaaagatagaagatcttacagagatcttggatcgctatgttcaggaacaaattcctggtgccaaggtcgtagtggagtccattggagctcgccggcatggagatgccttttccctagaagattacaccaaatgtgacttgactgtctatgcaattgacccccaaaccaacagagccatcgatagaaatgagctttttaaatttttggatggcaaactacttgatatcaataaagactttcagccgtattatggggaaggaggacgcattctggagatccggactccagaggcagtgaccagcattaaaaagagaggagaaagtctaggatacacagaaggggccttgttggctctggccttcatcatcatcctctgctgcattcctgccatcttggtggttttggtcagctacagacaacgtcaagctgagtgtacaaagactgcacgaattcaggccgcattacccgcggctaaaccagcagtgccggctcctgcaccagtggcagcgcccccgccgccgccgccgcctccgccaggtgcgcatctctatgaagaacttggagacagctcaattcttttccttctctaccattttcaacaaagcaggggaaataactcagtctcagaagacaggaaacatcaacaagttgtgatgcccttttcttccaatactattgaggctcacaagtcagctcatgtagacggatcacttaagagcaacaaactgaagtctgcaagaaaattcacatttctatctgatgaggatgacttaagtgcccataatcccctttataaggaaaacataagtcaagtatcaacaaattcagacatttcacagagaacagattttgtagacccattttcacccaaaatacaagccaagagtaagtctctgaggggcccaagagaaaagattcagaggctgtggagtcagtcagtcagcttacccaggaggctgatgaggaaagttccaaatagaccagagatcatagatctgcagcagtggcaaggcaccaggcagaaagctgaaaatgaaaacactggaatctgtacaaacaaaagaggtagcagcaatccattgcttacaactgaagaggcaaatttgacagagaaagaggaaataaggcaaggtgaaacactgatgatagaaggaacagaacagttgaaatctctctcttcagactcttcattttgctttcccaggcctcacttctcattctccactttgccaactgtttcaagaactgtggaactcaaatcagaacctaatgtcatcagttctcctgctgagtgttccttggaactttctccttcaaggccttgtgttttacattcttcactctctaggagagagacacctatttgtatgttacctattgaaaccgaaagaaatatttttgaaaattttgcccatccaccaaacatctctccttctgcctgtccccttccccctcctcctcctatttctcctccttctcctcctcctgctcctgctcctcttgctcctcctcctgacatttctcctttttctcttttttgtcctcctccctctcctccttctatccctcttcctcttcctcctcctacattttttccactttccgtttcaacgtctggtcccccaacaccacctcttctacctccatttccaactcctcttcctccaccacctccttctattccttgccctccacctccttcagcttcatttctgtccacagagtgtgtctgtataacaggtgttaaatgcacgaccaacttgatgcctgccgagaaaattaagtcctctatgacacagctatcaacaacgacagtgtgtaaaacagaccctcagagagaaccaaaaggcatcctcagacacgttaaaaacttagcagaacttgaaaaatcagtagctaacatgtacagtcaaatagaaaaaaactatctacgcacaaatgtttcagaacttcaaactatgtgcccttcagaagtaacaaatatggaaatcacatctgaacaaaacaaggggagtttgaacaatattgtcgagggaactgaaaaacaatctcacagtcaatctacttcactgtaatgttgcttttcttattttagtcgggcaaacctcttgttgatcatagtcttcaagttgaacatcaaatttgaacgtcaaagaagactctattattttaccccaaattcaatgaaatgcagttttttttctcgtttttaatttaaaaagatattaacctcatcactactaactcactcatataatagatttaccttactttttaaaaactacaaagtagcataatttgttctacatttatttgaaaagtaagtaattttaatctcttttttagtgggaatatgtgggcatgaaaattagatacccaacttaaaccaaaggcatgtctatcatgtggatgcagtaacatttacatttagtttttgatcgtagttttatatgaatgttccaagaaaaaagcagactgttacaaataagttaaaactgatatgattgataggttctgttttttcttgaagcctatgtatttggtaagaagaaatactaccgaagtaaaatataatgtacctagattgtaggagatgacagacataaggtatttcaaaataaatctcaggtgctataacatgtagtcatctgttttctgataagaacatcttttactctgacttgcttttatcttagtagtatgcttatggatttagtagtatgcttatggatttgataaatcttatactttttcagttgctgtcttattctctttatttctcattgtgctttcccttcccttctttataatgaaaataaatcttgagtcgttg

SEQ ID NO: 172226 - DNA, 6942 bp, Homo sapiens
  Payload ID: 13865
  Gene Symbol: PCDH15
  Gene Name: protocadherin-related 15
  ENST ID: ENST00000395433
  CDS Start-End: 396-6194
caacgtgctgagctaatagcgacagatagagggcagacagattcctgctagcagcttagtgttagttgcttgtggtaactaaggcaggtggcatacatctcagaacgtggagaatgatggtatgctttctgagttaacatgttgaactgttttgcttttctaaaaattttcctagtaacattttcttgatgatatgagagtggatatcaatgcctcacagaaacaagaggtggaacatgtgaatgaatcgtcttggaactagattatgagcactggttctttttaaagggatgtgcaagaggcagccttggcaagaaaacttgctgcataatcttacatggactaaagatgaaactttaaaccgcaaatcagctttgagtgaactttgacagaagatgtttcgacagttttatctctggacatgtttagcttcagggatcatcctgggctctctctttgaaatctgcttgggccagtatgatgatggtacaattctggtggacaacatgctgatcaaagggactgctggaggaccagaccccaccatagaactttctttaaaggataatgtggattactgggtgttgatggatcctgttaagcaaatgcttttcctgaacagcaccggaagagttctggatagagatccaccgatgaacatacactccattgtggtgcaggtccagtgcatcaacaaaaaagtgggcactattatctaccatgaagtgcgaatagtggtgagagacaggaatgacaactcacccactttcaagcatgaaagctactatgccacagtgaatgagctcactccagttggtaccacaatattcacaggattttcaggagacaatggagctacagatatagatgatggaccaaatggacagatagagtatgttattcagtataatccagatgatccgacatccaatgacacctttgaaattcccctaatgttgactggaaatatagtgttaaggaagaggctcaactatgaagataagactcgctactttgtcataatccaagctaatgaccgtgcccaaaatctgaatgagaggcgaaccaccaccaccactctcacagtggatgttctggatggagatgacttgggtccaatgtttcttccttgtgtccttgtgccaaacactcgtgattgccgtccactcacttatcaagctgccatacctgagttgagaactccggaagaactgaaccccattattgttacgccaccaatccaagccattgatcaggaccggaatattcaaccgccatcagataggccaggaatcctctattccatccttgttgggactcctgaggattacccacgatttttccatatgcatcctaggacagcagaacttagtctcctggagccagtaaacagagactttcaccagaaatttgatttggttattaaggctgaacaagacaatggtcatcctcttcctgcctttgccggtctacacattgaaatactggatgaaaacaatcaaagtccatattttacaatgcccagttatcaaggctatatcctggaatctgccccagtgggagcaaccatttcggacagtctcaatttgacttcacctttaagaatagtagctctggacaaggacatagaagatacaaaagacccagagcttcacctttttctgaatgactacacctcagtcttcaccgtcacacagactggtattactcgctacctcaccttacttcaaccagtggacagggaagaacagcaaacttacaccttttcgataacagcatttgatggtgtacaagaaagtgagccagtcatcgtcaatattcaagtgatggatgcaaatgataacacgccaaccttccctgaaatatcctatgatgtgtatgtttatacagacatgagacctggggacagtgtcatacagctcactgcagtcgacgcagacgaagggtcaaatggggagatcacatatgaaatccttgttggggctcagggagacttcatcatcaataaaacaacagggcttatcaccatcgctccaggggtggaaatgatagtcgggcggacttacgcactcacggtccaagcagcggataatgctcctcctgcagagcgaaggaactccatctgcactgtgtatattgaagtgcttccaccaaataatcaaagccctcctcgcttcccacagctgatgtatagccttgaaattagtgaagccatgagggttggtgctgttttattaaatctacaggcaactgatcgagagggagactcaataacatatgccattgagaatggagatcctcagagagtttttaatctttcagaaaccacggggattctaaccttagggaaagcactggacagggaaagcactgatcgctacattctgatcatcacagcttcagatggcaggccagatgggacctcaactgccacagtaaacatagtggtgacagatgtcaatgacaatgctccagtgtttgatccttatctgccaagaaatttatctgtggtggaagaagaagccaatgcctttgtgggtcaagtaaaagcaacagaccctgatgctggaataaatggtcaagtgcactacagtttgggtaactttaataatctttttcgtatcacatccaatgggagcatttacacagcagtgaagcttaacagagaagtcagggactactatgaacttgttgttgtggcaacagatggagcagtacaccctcgtcattcaactctaaccttggccatcaaggttttggacattgatgataacagtcctgtgttcaccaattcaacatacactgtccttgttgaagagaatttgccagctgggactaccatccttcaaatagaggccaaagatgtcgaccttggagcaaatgtgtcttaccggataagaagcccagaagtgaagcacttttttgcactacatccatttacaggagaactatcgcttttaaggagtttagattatgaggcatttccagaccaagaagcaagtatcacttttctggtagaggcctttgatatttatggaacaatgccacctggtattgctactgtcacagtgattgtaaaggatatgaatgattatcctcctgtctttagtaaacgaatatacaaagggatggtggctccggatgcagtcaagggtacacctatcacaacagtttatgctgaagatgcagaccctcctggattacctgcaagtcgtgtgaggtatagagtagatgatgtacagtttccttaccctgccagtatttttgaagtggaagaagattctggaagagtaataacacgagtcaatcttaatgaagaacctacaacaatttttaagttggtggtggttgcttttgatgatggggagcctgtgatgtccagcagtgccacagtgaagattcttgtcttacatcctggtgagatcccacgcttcacacaggaggaatatagacctcctccagtaagtgaacttgccaccaaagggaccatggttggtgtaatttctgctgctgccattaatcaaagtattgtgtactccattgtttcaggaaatgaagaagatacatttggaattaataacatcacaggtgttatctatgtgaatggacctctggattatgagaccaggacaagctatgtacttcgagtccaagctgattccctggaagtggtccttgccaatctccgagttccttcaaaaagcaatacagctaaagtatacattgagattcaggatgaaaataatcatcccccagtgtttcagaaaaaattctacatcggaggtgtatctgaagatgcaagaatgtttacttctgtactcagagtgaaggctactgataaagatactggcaattatagtgtcatggcctacagactcataataccaccaattaaagagggaaaagaaggatttgtagtggaaacatatacagggcttatcaaaactgctatgctcttccataatatgaggagatcctacttcaagtttcaagttattgcaactgacgactatgggaagggactgagcggcaaagccgatgtactcgtctccgtggtcaatcagctggatatgcaagtcattgtttccaatgtgcctcctactctagtggaaaaaaagatagaagatcttacagagatcttggatcgctatgttcaggaacaaattcctggtgccaaggtcgtagtggagtccattggagctcgccggcatggagatgccttttccctagaagattacaccaaatgtgacttgactgtctatgcaattgacccccaaaccaacagagccatcgatagaaatgagctttttaaatttttggatggcaaactacttgatatcaataaagactttcagccgtattatggggaaggaggacgcattctggagatccggactccagaggcagtgaccagcattaaaaagagaggagaaagtctaggatacacagaaggggccttgttggctctggccttcatcatcatcctctgctgcattcctgccatcttggtggttttggtcagctacagacaacgtcaagctgagtgtacaaagactgcacgaattcaggccgcattacccgcggctaaaccagcagtgccggctcctgcaccagtggcagcgcccccgccgccgccgccgcctccgccaggtgcgcatctctatgaagaacttggagacagctcaatgcataatcttttccttctctaccattttcaacaaagcaggggaaataactcagtctcagaagacaggaaacatcaacaagttgtgatgcccttttcttccaatactattgaggctcacaagtcagctcatgtagacggatcacttaagagcaacaaactgaagtctgcaagaaaattcacatttctatctgatgaggatgacttaagtgcccataatcccctttataaggaaaacataagtcaagtatcaacaaattcagacatttcacagagaacagattttgtagacccattttcacccaaaatacaagccaagagtaagtctctgaggggcccaagagaaaagattcagaggctgtggagtcagtcagtcagcttacccaggaggctgatgaggaaagttccaaatagaccagagatcatagatctgcagcagtggcaaggcaccaggcagaaagctgaaaatgaaaacactggaatctgtacaaacaaaagaggtagcagcaatccattgcttacaactgaagaggcaaatttgacagagaaagaggaaataaggcaaggtgaaacactgatgatagaaggaacagaacagttgaaatctctctcttcagactcttcattttgctttcccaggcctcacttctcattctccactttgccaactgtttcaagaactgtggaactcaaatcagaacctaatgtcatcagttctcctgctgagtgttccttggaactttctccttcaaggccttgtgttttacattcttcactctctaggagagagacacctatttgtatgttacctattgaaaccgaaagaaatatttttgaaaattttgcccatccaccaaacatctctccttctgcctgtccccttccccctcctcctcctatttctcctccttctcctcctcctgctcctgctcctcttgctcctcctcctgacatttctcctttttctcttttttgtcctcctccctctcctccttctatccctcttcctcttcctcctcctacattttttccactttccgtttcaacgtctggtcccccaacaccacctcttctacctccatttccaactcctcttcctccaccacctccttctattccttgccctccacctccttcagcttcatttctgtccacagagtgtgtctgtataacaggtgttaaatgcacgaccaacttgatgcctgccgagaaaattaagtcctctatgacacagctatcaacaacgacagtgtgtaaaacagaccctcagagagaaccaaaaggcatcctcagacacgttaaaaacttagcagaacttgaaaaatcagtagctaacatgtacagtcaaatagaaaaaaactatctacgcacaaatgtttcagaacttcaaactatgtgcccttcagaagtaacaaatatggaaatcacatctgaacaaaacaaggggagtttgaacaatattgtcgagggaactgaaaaacaatctcacagtcaatctacttcactgtaatgttgcttttcttattttagtcgggcaaacctcttgttgatcatagtcttcaagttgaacatcaaatttgaacgtcaaagaagactctattattttaccccaaattcaatgaaatgcagttttttttctcgtttttaatttaaaaagatattaacctcatcactactaactcactcatataatagatttaccttactttttaaaaactacaaagtagcataatttgttctacatttatttgaaaagtaagtaattttaatctcttttttagtgggaatatgtgggcatgaaaattagatacccaacttaaaccaaaggcatgtctatcatgtggatgcagtaacatttacatttagtttttgatcgtagttttatatgaatgttccaagaaaaaagcagactgttacaaataagttaaaactgatatgattgataggttctgttttttcttgaagcctatgtatttggtaagaagaaatactaccgaagtaaaatataatgtacctagattgtaggagatgacagacataaggtatttcaaaataaatctcaggtgctataacatgtagtcatctgttttctgataagaacatcttttactctgacttgcttttatcttagtagtatgcttatggatttagtagtatgcttatggatttgataaatcttatactttttcagttgctgtcttattctctttatttctcattgtgctttcccttcccttctttataatgaaaataaatct

SEQ ID NO: 172227 - DNA, 5806 bp, Homo sapiens
  Payload ID: 13865
  Gene Symbol: PCDH15
  Gene Name: protocadherin-related 15
  ENST ID: ENST00000395438
  CDS Start-End: 396-5018
caacgtgctgagctaatagcgacagatagagggcagacagattcctgctagcagcttagtgttagttgcttgtggtaactaaggcaggtggcatacatctcagaacgtggagaatgatggtatgctttctgagttaacatgttgaactgttttgcttttctaaaaattttcctagtaacattttcttgatgatatgagagtggatatcaatgcctcacagaaacaagaggtggaacatgtgaatgaatcgtcttggaactagattatgagcactggttctttttaaagggatgtgcaagaggcagccttggcaagaaaacttgctgcataatcttacatggactaaagatgaaactttaaaccgcaaatcagctttgagtgaactttgacagaagatgtttcgacagttttatctctggacatgtttagcttcagggatcatcctgggctctctctttgaaatctgcttgggccagtatgatgatgattgcaaactagctaggggaggaccaccagctaccatagttgctattgatgaagaaagtcggaatggtacaattctggtggacaacatgctgatcaaagggactgctggaggaccagaccccaccatagaactttctttaaaggataatgtggattactgggtgttgatggatcctgttaagcaaatgcttttcctgaacagcaccggaagagttctggatagagatccaccgatgaacatacactccattgtggtgcaggtccagtgcatcaacaaaaaagtgggcactattatctaccatgaagtgcgaatagtggtgagagacaggaatgacaactcacccactttcaagcatgaaagctactatgccacagtgaatgagctcactccagttggtaccacaatattcacaggattttcaggagacaatggagctacagatatagatgatggaccaaatggacagatagagtatgttattcagtataatccagatgatccgacatccaatgacacctttgaaattcccctaatgttgactggaaatatagtgttaaggaagaggctcaactatgaagataagactcgctactttgtcataatccaagctaatgaccgtgcccaaaatctgaatgagaggcgaaccaccaccaccactctcacagtggatgttctggatggagatgacttgggtccaatgtttcttccttgtgtccttgtgccaaacactcgtgattgccgtccactcacttatcaagctgccatacctgagttgagaactccggaagaactgaaccccattattgttacgccaccaatccaagccattgatcaggaccggaatattcaaccgccatcagataggccaggaatcctctattccatccttgttgggactcctgaggattacccacgatttttccatatgcatcctaggacagcagaacttagtctcctggagccagtaaacagagactttcaccagaaatttgatttggttattaaggctgaacaagacaatggtcatcctcttcctgcctttgccggtctacacattgaaatactggatgaaaacaatcaaagtccatattttacaatgcccagttatcaaggctatatcctggaatctgccccagtgggagcaaccatttcggacagtctcaatttgacttcacctttaagaatagtagctctggacaaggacatagaagatacaaaagacccagagcttcacctttttctgaatgactacacctcagtcttcaccgtcacacagactggtattactcgctacctcaccttacttcaaccagtggacagggaagaacagcaaacttacaccttttcgataacagcatttgatggtgtacaagaaagtgagccagtcatcgtcaatattcaagtgatggatgcaaatgataacacgccaaccttccctgaaatatcctatgatgtgtatgtttatacagacatgagacctggggacagtgtcatacagctcactgcagtcgacgcagacgaagggtcaaatggggagatcacatatgaaatccttgttggggctcagggagacttcatcatcaataaaacaacagggcttatcaccatcgctccaggggtggaaatgatagtcgggcggacttacgcactcacggtccaagcagcggataatgctcctcctgcagagcgaaggaactccatctgcactgtgtatattgaagtgcttccaccaaataatcaaagccctcctcgcttcccacagctgatgtatagccttgaaattagtgaagccatgagggttggtgctgttttattaaatctacaggcaactgatcgagagggagactcaataacatatgccattgagaatggagatcctcagagagtttttaatctttcagaaaccacggggattctaaccttagggaaagcactggacagggaaagcactgatcgctacattctgatcatcacagcttcagatggcaggccagatgggacctcaactgccacagtaaacatagtggtgacagatgtcaatgacaatgctccagtgtttgatccttatctgccaagaaatttatctgtggtggaagaagaagccaatgcctttgtgggtcaagtaaaagcaacagaccctgatgctggaataaatggtcaagtgcactacagtttgggtaactttaataatctttttcgtatcacatccaatgggagcatttacacagcagtgaagcttaacagagaagtcagggactactatgaacttgttgttgtggcaacagatggagcagtacaccctcgtcattcaactctaaccttggccatcaaggttttggacattgatgataacagtcctgtgttcaccaattcaacatacactgtccttgttgaagagaatttgccagctgggactaccatccttcaaatagaggccaaagatgtcgaccttggagcaaatgtgtcttaccggataagaagcccagaagtgaagcacttttttgcactacatccatttacaggagaactatcgcttttaaggagtttagattatgaggcatttccagaccaagaagcaagtatcacttttctggtagaggcctttgatatttatggaacaatgccacctggtattgctactgtcacagtgattgtaaaggatatgaatgattatcctcctgtctttagtaaacgaatatacaaagggatggtggctccggatgcagtcaagggtacacctatcacaacagtttatgctgaagatgcagaccctcctggattacctgcaagtcgtgtgaggtatagagtagatgatgtacagtttccttaccctgccagtatttttgaagtggaagaagattctggaagagtaataacacgagtcaatcttaatgaagaacctacaacaatttttaagttggtggtggttgcttttgatgatggggagcctgtgatgtccagcagtgccacagtgaagattcttgtcttacatcctggtgagatcccacgcttcacacaggaggaatatagacctcctccagtaagtgaacttgccaccaaagggaccatggttggtgtaatttctgctgctgccattaatcaaagtattgtgtactccattgtttcaggaaatgaagaagatacatttggaattaataacatcacaggtgttatctatgtgaatggacctctggattatgagaccaggacaagctatgtacttcgagtccaagctgattccctggaagtggtccttgccaatctccgagttccttcaaaaagcaatacagctaaagtatacattgagattcaggatgaaaataatcatcccccagtgtttcagaaaaaattctacatcggaggtgtatctgaagatgcaagaatgtttacttctgtactcagagtgaaggctactgataaagatactggcaattatagtgtcatggcctacagactcataataccaccaattaaagagggaaaagaaggatttgtagtggaaacatatacagggcttatcaaaactgctatgctcttccataatatgaggagatcctacttcaagtttcaagttattgcaactgacgactatgggaagggactgagcggcaaagccgatgtactcgtctccgtggtcaatcagctggatatgcaagtcattgtttccaatgtgcctcctactctagtggaaaaaaagatagaagatcttacagagatcttggatcgctatgttcaggaacaaattcctggtgccaaggtcgtagtggagtccattggagctcgccggcatggagatgccttttccctagaagattacaccaaatgtgacttgactgtctatgcaattgacccccaaaccaacagagccatcgatagaaatgagctttttaaatttttggatggcaaactacttgatatcaataaagactttcagccgtattatggggaaggaggacgcattctggagatccggactccagaggcagtgaccagcattaaaaagagaggagaaagtctaggatacacagaaggggccttgttggctctggccttcatcatcatcctctgctgcattcctgccatcttggtggttttggtcagctacagacaggtattcaagggacgtcaagctgagtgtacaaagactgcacgaattcaggccgcattacccgcggctaaaccagcagtgccggctcctgcaccagtggcagcgcccccgccgccgccgccgcctccgccaggtgcgcatctctatgaagaacttggagacagctcaatgaataggaattatccatggagtctggaattgatcctggccaggaatatggacaagattattacagttatgagcatgggtatgaaatgcctcaatatgggagtcgccgtcgattgttaccaccagctggacaggaggaatatggtgaggtggttggtgaagctgaggaagaatatgaggaggaagaggaagagccaaagaaaattaaaaaaccaaaggttgaaattagagagcctagtgaggaggaagaagtagttgtaactatcgaaaaaccaccagcagctgagcctacatacacaacatggaagagagccagaatattccccatgatttttaagaaagttagaggattagctgataaaagaggaatcgttgaccttgagggtgaagagtggcagagacgccttgaggaagaagataaagattatttgaaactcactctggaccaagaggaagcaacagaaagcactgtagaatcagaggaggaatcctccagcgactatactgaatacagtgaagaagagtctgagttcagtgagtctgagactacagaagaggaatctgagtcagagacaccctctgaggaggaggagagttccacccctgaatcagaagaatcggaatccacagagtcagaaggagaaaaagcaaggaaaaacattgtgcttgcaagaagaaggcccatggttgaggaggtcaaggaagtcaagggtaggaaagaggagccacaagaagaacaaaaagaacctaagatggaagaagaagaacactcagaagaagaagaaagtggaccagcccctgtggaagaaagtacagaccctgaagctcaagatatccctgaagagggcagtgcagaatcagcttcggtggaaggaggtgtggaaagtgaggaggaatcagaatcaggtagtagtagcagtagtagcgaaagtcagtctggaggtccatggggctatcaggtaccagcgtatgacagaagcaagaatgcaaaccaaaagaagtcgccaggagcaaactctgaaggttacaacacagcactttga

SEQ ID NO: 172228 - DNA, 3177 bp, Homo sapiens
  Payload ID: 13865
  Gene Symbol: PCDH15
  Gene Name: protocadherin-related 15
  ENST ID: ENST00000395440
  CDS Start-End: 396-2555
caacgtgctgagctaatagcgacagatagagggcagacagattcctgctagcagcttagtgttagttgcttgtggtaactaaggcaggtggcatacatctcagaacgtggagaatgatggtatgctttctgagttaacatgttgaactgttttgcttttctaaaaattttcctagtaacattttcttgatgatatgagagtggatatcaatgcctcacagaaacaagaggtggaacatgtgaatgaatcgtcttggaactagattatgagcactggttctttttaaagggatgtgcaagaggcagccttggcaagaaaacttgctgcataatcttacatggactaaagatgaaactttaaaccgcaaatcagctttgagtgaactttgacagaagatgtttcgacagttttatctctggacatgtttagcttcagggatcatcctgggctctctctttgaaatctgcttgggccagtatgatgatgattgcaaactagctaggggaggaccaccagctaccatagttgctattgatgaagaaagtcggaatggtacaattctggtggacaacatgctgatcaaagggactgctggaggaccagaccccaccatagaactttctttaaaggataatgtggattactgggtgttgatggatcctgttaagcaaatgcttttcctgaacagcaccggaagagttctggatagagatccaccgatgaacatacactccattgtggtgcaggtccagtgcatcaacaaaaaagtgggcactattatctaccatgaagtgcgaatagtggtgagagacaggaatgacaactcacccactttcaagcatgaaagctactatgccacagtgaatgagctcactccagttggtaccacaatattcacaggattttcaggagacaatggagctacagatatagatgatggaccaaatggacagatagagtatgttattcagtataatccagatgatccgacatccaatgacacctttgaaattcccctaatgttgactggaaatatagtgttaaggaagaggctcaactatgaagataagactcgctactttgtcataatccaagctaatgaccgtgcccaaaatctgaatgagaggcgaaccaccaccaccactctcacagtggatgttctggatggagatgacttgggtccaatgtttcttccttgtgtccttgtgccaaacactcgtgattgccgtccactcacttatcaagctgccatacctgagttgagaactccggaagaactgaaccccattattgttacgccaccaatccaagccattgatcaggaccggaatattcaaccgccatcagataggccaggaatcctctattccatccttgttgggactcctgaggattacccacgatttttccatatgcatcctaggacagcagaacttagtctcctggagccagtaaacagagactttcaccagaaatttgatttggttattaaggctgaacaagacaatggtcatcctcttcctgcctttgccggtctacacattgaaatactggatgaaaacaatcaaagtccatattttacaatgcccagttatcaaggctatatcctggaatctgccccagtgggagcaaccatttcggacagtctcaatttgacttcacctttaagaatagtagctctggacaaggacatagaagatgaagagccaaagaaaattaaaaaaccaaaggttgaaattagagagcctagtgaggaggaagaagtagttgtaactatcgaaaaaccaccagcagctgagcctacatacacaacatggaagagagccagaatattccccatgatttttaagaaagttagaggattagctgataaaagaggaatcgttgaccttgagggtgaagagtggcagagacgccttgaggaagaagataaagattatttgaaactcactctggaccaagaggaagcaacagaaagcactgtagaatcagaggaggaatcctccagcgactatactgaatacagtgaagaagagtctgagttcagtgagtctgagactacagaagaggaatctgagtcagagacaccctctgaggaggaggagagttccacccctgaatcagaagaatcggaatccacagagtcagaaggagaaaaagcaaggaaaaacattgtgcttgcaagaagaaggcccatggttgaggaggtcaaggaagtcaagggtaggaaagaggagccacaagaagaacaaaaagaacctaagatggaagaagaagaacactcagaagaagaagaaagtggaccagcccctgtggaagaaagtacagaccctgaagctcaagatatccctgaagagggcagtgcagaatcagcttcggtggaaggaggtgtggaaagtgaggaggaatcagaatcaggtagtagtagcagtagtagcgaaagtcagtctggaggtccatggggctatcaggtaccagcgtatgacagaagcaagaatgcaaaccaaaagaagtcgccaggagcaaactctgaaggttacaacacagcactttgaaagagatcacagtaggtggaagttttgctgtgatgagtgctctcgtgtgcagtgccttctgtgtgttctccaaagtgacacttgaaagggaggaaattgatcaagattttgatatgacttatgatcagaagcatgccagaaaagtgaatatatatgttgtccaaatccatttgtatattagactgtattagagtaaaactgactaatccttcctatattagtaaatcagaacacatgcaatcagctaatcaatatttaatatttactggtaggatttttgttaatgcaatgtggcattatgtattatcagtgacactctgtctattggaatggatggcatatatatatatatatatatatacacacacacactatatatgtttttatatcatctttcaaaataaatactaagacaagcttcaacaaattatatctttaacagtcgtctacttttgcatatatgtacgtttcaactggcaaaggtattataaaaactatcatgaacatgttcaaataagtaagtttgtatctgcaacttcaagtattaggaattcaatgaaataacatttttcaattaattaaaagttattacagcttattttctgttattattagctacagt

SEQ ID NO: 172229 - DNA, 2970 bp, Homo sapiens
  Payload ID: 13865
  Gene Symbol: PCDH15
  Gene Name: protocadherin-related 15
  ENST ID: ENST00000395442
  CDS Start-End: 396-2348
caacgtgctgagctaatagcgacagatagagggcagacagattcctgctagcagcttagtgttagttgcttgtggtaactaaggcaggtggcatacatctcagaacgtggagaatgatggtatgctttctgagttaacatgttgaactgttttgcttttctaaaaattttcctagtaacattttcttgatgatatgagagtggatatcaatgcctcacagaaacaagaggtggaacatgtgaatgaatcgtcttggaactagattatgagcactggttctttttaaagggatgtgcaagaggcagccttggcaagaaaacttgctgcataatcttacatggactaaagatgaaactttaaaccgcaaatcagctttgagtgaactttgacagaagatgtttcgacagttttatctctggacatgtttagcttcagggatcatcctgggctctctctttgaaatctgcttgggccagtatgatgatgattgcaaactagctaggggaggaccaccagctaccatagttgctattgatgaagaaagtcggaatggtacaattctggtggacaacatgctgatcaaagggactgctggaggaccagaccccaccatagaactttctttaaaggataatgtggattactgggtgttgatggatcctgttaagcaaatgcttttcctgaacagcaccggaagagttctggatagagatccaccgatgaacatacactccattgtggtgcaggtccagtgcatcaacaaaaaagtgggcactattatctaccatgaagtgcgaatagtggtgagagacaggaatgacaactcacccactttcaagcatgaaagctactatgccacagtgaatgagctcactccagttggtaccacaatattcacaggattttcaggagacaatggagctacagatatagatgatggaccaaatggacagatagagtatgttattcagtataatccagatgatccgacatccaatgacacctttgaaattcccctaatgttgactggaaatatagtgttaaggaagaggctcaactatgaagataagactcgctactttgtcataatccaagctaatgaccgtgcccaaaatctgaatgagaggcgaaccaccaccaccactctcacagtggatgttctggatggagatgacttgggtccaatgtttcttccttgtgtccttgtgccaaacactcgtgattgccgtccactcacttatcaagctgccatacctgagttgagaactccggaagaactgaaccccattattgttacgccaccaatccaagccattgatcaggaccggaatattcaaccgccatcagataggccaggaatcctctattccatccttgttgggactcctgaggattacccacgatttttccatatgcatcctaggacagcagaacttagtctcctggagccagtaaacagagactttcaccagaaatttgatttggttattaaggaagagccaaagaaaattaaaaaaccaaaggttgaaattagagagcctagtgaggaggaagaagtagttgtaactatcgaaaaaccaccagcagctgagcctacatacacaacatggaagagagccagaatattccccatgatttttaagaaagttagaggattagctgataaaagaggaatcgttgaccttgagggtgaagagtggcagagacgccttgaggaagaagataaagattatttgaaactcactctggaccaagaggaagcaacagaaagcactgtagaatcagaggaggaatcctccagcgactatactgaatacagtgaagaagagtctgagttcagtgagtctgagactacagaagaggaatctgagtcagagacaccctctgaggaggaggagagttccacccctgaatcagaagaatcggaatccacagagtcagaaggagaaaaagcaaggaaaaacattgtgcttgcaagaagaaggcccatggttgaggaggtcaaggaagtcaagggtaggaaagaggagccacaagaagaacaaaaagaacctaagatggaagaagaagaacactcagaagaagaagaaagtggaccagcccctgtggaagaaagtacagaccctgaagctcaagatatccctgaagagggcagtgcagaatcagcttcggtggaaggaggtgtggaaagtgaggaggaatcagaatcaggtagtagtagcagtagtagcgaaagtcagtctggaggtccatggggctatcaggtaccagcgtatgacagaagcaagaatgcaaaccaaaagaagtcgccaggagcaaactctgaaggttacaacacagcactttgaaagagatcacagtaggtggaagttttgctgtgatgagtgctctcgtgtgcagtgccttctgtgtgttctccaaagtgacacttgaaagggaggaaattgatcaagattttgatatgacttatgatcagaagcatgccagaaaagtgaatatatatgttgtccaaatccatttgtatattagactgtattagagtaaaactgactaatccttcctatattagtaaatcagaacacatgcaatcagctaatcaatatttaatatttactggtaggatttttgttaatgcaatgtggcattatgtattatcagtgacactctgtctattggaatggatggcatatatatatatatatatatatacacacacacactatatatgtttttatatcatctttcaaaataaatactaagacaagcttcaacaaattatatctttaacagtcgtctacttttgcatatatgtacgtttcaactggcaaaggtattataaaaactatcatgaacatgttcaaataagtaagtttgtatctgcaacttcaagtattaggaattcaatgaaataacatttttcaattaattaaaagttattacagcttattttctgttattattagctacagt

SEQ ID NO: 172230 - DNA, 5917 bp, Homo sapiens
  Payload ID: 13865
  Gene Symbol: PCDH15
  Gene Name: protocadherin-related 15
  Uniprot ID: Q96QU1
  ENST ID: ENST00000395445
  CDS Start-End: 396-5747
caacgtgctgagctaatagcgacagatagagggcagacagattcctgctagcagcttagtgttagttgcttgtggtaactaaggcaggtggcatacatctcagaacgtggagaatgatggtatgctttctgagttaacatgttgaactgttttgcttttctaaaaattttcctagtaacattttcttgatgatatgagagtggatatcaatgcctcacagaaacaagaggtggaacatgtgaatgaatcgtcttggaactagattatgagcactggttctttttaaagggatgtgcaagaggcagccttggcaagaaaacttgctgcataatcttacatggactaaagatgaaactttaaaccgcaaatcagctttgagtgaactttgacagaagatgtttcgacagttttatctctggacatgtttagcttcagggatcatcctgggctctctctttgaaatctgcttgggccagtatgatgatgattgcaaactagctaggggaggaccaccagctaccatagttgctattgatgaagaaagtcggaatggtacaattctggtggacaacatgctgatcaaagggactgctggaggaccagaccccaccatagaactttctttaaaggataatgtggattactgggtgttgatggatcctgttaagcaaatgcttttcctgaacagcaccggaagagttctggatagagatccaccgatgaacatacactccattgtggtgcaggtccagtgcatcaacaaaaaagtgggcactattatctaccatgaagtgcgaatagtggtgagagacaggaatgacaactcacccactttcaagcatgaaagctactatgccacagtgaatgagctcactccagttggtaccacaatattcacaggattttcaggagacaatggagctacagatatagatgatggaccaaatggacagatagagtatgttattcagtataatccagatgatccgacatccaatgacacctttgaaattcccctaatgttgactggaaatatagtgttaaggaagaggctcaactatgaagataagactcgctactttgtcataatccaagctaatgaccgtgcccaaaatctgaatgagaggcgaaccaccaccaccactctcacagtggatgttctggatggagatgacttgggtccaatgtttcttccttgtgtccttgtgccaaacactcgtgattgccgtccactcacttatcaagctgccatacctgagttgagaactccggaagaactgaaccccattattgttacgccaccaatccaagccattgatcaggaccggaatattcaaccgccatcagataggccaggaatcctctattccatccttgttgggactcctgaggattacccacgatttttccatatgcatcctaggacagcagaacttagtctcctggagccagtaaacagagactttcaccagaaatttgatttggttattaaggctgaacaagacaatggtcatcctcttcctgcctttgccggtctacacattgaaatactggatgaaaacaatcaaagtccatattttacaatgcccagttatcaaggctatatcctggaatctgccccagtgggagcaaccatttcggacagtctcaatttgacttcacctttaagaatagtagctctggacaaggacatagaagatgttccacccagtggagttcctacaaaagacccagagcttcacctttttctgaatgactacacctcagtcttcaccgtcacacagactggtattactcgctacctcaccttacttcaaccagtggacagggaagaacagcaaacttacaccttttcgataacagcatttgatggtgtacaagaaagtgagccagtcatcgtcaatattcaagtgatggatgcaaatgataacacgccaaccttccctgaaatatcctatgatgtgtatgtttatacagacatgagacctggggacagtgtcatacagctcactgcagtcgacgcagacgaagggtcaaatggggagatcacatatgaaatccttgttggggctcagggagacttcatcatcaataaaacaacagggcttatcaccatcgctccaggggtggaaatgatagtcgggcggacttacgcactcacggtccaagcagcggataatgctcctcctgcagagcgaaggaactccatctgcactgtgtatattgaagtgcttccaccaaataatcaaagccctcctcgcttcccacagctgatgtatagccttgaaattagtgaagccatgagggttggtgctgttttattaaatctacaggcaactgatcgagagggagactcaataacatatgccattgagaatggagatcctcagagagtttttaatctttcagaaaccacggggattctaaccttagggaaagcactggacagggaaagcactgatcgctacattctgatcatcacagcttcagatggcaggccagatgggacctcaactgccacagtaaacatagtggtgacagatgtcaatgacaatgctccagtgtttgatccttatctgccaagaaatttatctgtggtggaagaagaagccaatgcctttgtgggtcaagtaaaagcaacagaccctgatgctggaataaatggtcaagtgcactacagtttgggtaactttaataatctttttcgtatcacatccaatgggagcatttacacagcagtgaagcttaacagagaagtcagggactactatgaacttgttgttgtggcaacagatggagcagtacaccctcgtcattcaactctaaccttggccatcaaggttttggacattgatgataacagtcctgtgttcaccaattcaacatacactgtccttgttgaagagaatttgccagctgggactaccatccttcaaatagaggccaaagatgtcgaccttggagcaaatgtgtcttaccggataagaagcccagaagtgaagcacttttttgcactacatccatttacaggagaactatcgcttttaaggagtttagattatgaggcatttccagaccaagaagcaagtatcacttttctggtagaggcctttgatatttatggaacaatgccacctggtattgctactgtcacagtgattgtaaaggatatgaatgattatcctcctgtctttagtaaacgaatatacaaagggatggtggctccggatgcagtcaagggtacacctatcacaacagtttatgctgaagatgcagaccctcctggattacctgcaagtcgtgtgaggtatagagtagatgatgtacagtttccttaccctgccagtatttttgaagtggaagaagattctggaagagtaataacacgagtcaatcttaatgaagaacctacaacaatttttaagttggtggtggttgcttttgatgatggggagcctgtgatgtccagcagtgccacagtgaagattcttgtcttacatcctggtgagatcccacgcttcacacaggaggaatatagacctcctccagtaagtgaacttgccaccaaagggaccatggttggtgtaatttctgctgctgccattaatcaaagtattgtgtactccattgtttcaggaaatgaagaagatacatttggaattaataacatcacaggtgttatctatgtgaatggacctctggattatgagaccaggacaagctatgtacttcgagtccaagctgattccctggaagtggtccttgccaatctccgagttccttcaaaaagcaatacagctaaagtatacattgagattcaggatgaaaataatcatcccccagtgtttcagaaaaaattctacatcggaggtgtatctgaagatgcaagaatgtttacttctgtactcagagtgaaggctactgataaagatactggcaattatagtgtcatggcctacagactcataataccaccaattaaagagggaaaagaaggatttgtagtggaaacatatacagggcttatcaaaactgctatgctcttccataatatgaggagatcctacttcaagtttcaagttattgcaactgacgactatgggaagggactgagcggcaaagccgatgtactcgtctccgtggtcaatcagctggatatgcaagtcattgtttccaatgtgcctcctactctagtggaaaaaaagatagaagatcttacagagatcttggatcgctatgttcaggaacaaattcctggtgccaaggtcgtagtggagtccattggagctcgccggcatggagatgccttttccctagaagattacaccaaatgtgacttgactgtctatgcaattgacccccaaaccaacagagccatcgatagaaatgagctttttaaatttttggatggcaaactacttgatatcaataaagactttcagccgtattatggggaaggaggacgcattctggagatccggactccagaggcagtgaccagcattaaaaagagaggagaaagtctaggatacacagaaggggccttgttggctctggccttcatcatcatcctctgctgcattcctgccatcttggtggttttggtcagctacagacagtttaaagtacgtcaagctgagtgtacaaagactgcacgaattcaggccgcattacccgcggctaaaccagcagtgccggctcctgcaccagtggcagcgcccccgccgccgccgccgcctccgccaggtgcgcatctctatgaagaacttggagacagctcaatgtatgaaatgcctcaatatgggagtcgccgtcgattgttaccaccagctggacaggaggaatatggtgaggtggttggtgaagctgaggaagaatatgaggaggaagaggaagagccaaagaaaattaaaaaaccaaaggttgaaattagagagcctagtgaggaggaagaagtagttgtaactatcgaaaaaccaccagcagctgagcctacatacacaacatggaagagagccagaatattccccatgatttttaagaaagttagaggattagctgataaaagaggaatcgttgaccttgagggtgaagagtggcagagacgccttgaggaagaagataaagattatttgaaactcactctggaccaagaggaagcaacagaaagcactgtagaatcagaggaggaatcctccagcgactatactgaatacagtgaagaagagtctgagttcagtgagtctgagactacagaagaggaatctgagtcagagacaccctctgaggaggaggagagttccacccctgaatcagaagaatcggaatccacagagtcagaaggagaaaaagcaaggaaaaacattgtgcttgcaagaagaaggcccatggttgaggaggtcaaggaagtcaagggtaggaaagaggagccacaagaagaacaaaaagaacctaagatggaagaagaagaacactcagaagaagaagaaagtggaccagcccctgtggaagaaagtacagaccctgaagctcaagatatccctgaagagggcagtgcagaatcagcttcggtggaaggaggtgtggaaagtgaggaggaatcagaatcaggtagtagtagcagtagtagcgaaagtcagtctggaggtccatggggctatcaggtaccagcgtatgacagaagcaagaatgcaaaccaaaagaagtcgccaggagcaaactctgaaggttacaacacagcactttgaaagagatcacagtaggtggaagttttgctgtgatgagtgctctcgtgtgcagtgccttctgtgtgttctccaaagtgacacttgaaagggaggaaattgatcaagattttgatatgacttatgatcagaagcatgccagaaaagtgaatatatatgttgtccaaatccat

SEQ ID NO: 172231 - DNA, 3948 bp, Homo sapiens
  Payload ID: 13865
  Gene Symbol: PCDH15
  Gene Name: protocadherin-related 15
  ENST ID: ENST00000395446
  CDS Start-End: 396-3341
caacgtgctgagctaatagcgacagatagagggcagacagattcctgctagcagcttagtgttagttgcttgtggtaactaaggcaggtggcatacatctcagaacgtggagaatgatggtatgctttctgagttaacatgttgaactgttttgcttttctaaaaattttcctagtaacattttcttgatgatatgagagtggatatcaatgcctcacagaaacaagaggtggaacatgtgaatgaatcgtcttggaactagattatgagcactggttctttttaaagggatgtgcaagaggcagccttggcaagaaaacttgctgcataatcttacatggactaaagatgaaactttaaaccgcaaatcagctttgagtgaactttgacagaagatgtttcgacagttttatctctggacatgtttagcttcagggatcatcctgggctctctctttgaaatctgcttgggccagtatgatgatgattgcaaactagctaggggaggaccaccagctaccatagttgctattgatgaagaaagtcggaatggtacaattctggtggacaacatgctgatcaaagggactgctggaggaccagaccccaccatagaactttctttaaaggataatgtggattactgggtgttgatggatcctgttaagcaaatgcttttcctgaacagcaccggaagagttctggatagagatccaccgatgaacatacactccattgtggtgcaggtccagtgcatcaacaaaaaagtgggcactattatctaccatgaagtgcgaatagtggtgagagacaggaatgacaactcacccactttcaagcatgaaagctactatgccacagtgaatgagctcactccagttggtaccacaatattcacaggattttcaggagacaatggagctacagatatagatgatggaccaaatggacagatagagtatgttattcagtataatccagatgatccgacatccaatgacacctttgaaattcccctaatgttgactggaaatatagtgttaaggaagaggctcaactatgaagataagactcgctactttgtcataatccaagctaatgaccgtgcccaaaatctgaatgagaggcgaaccaccaccaccactctcacagtggatgttctggatggagatgacttgggtccaatgtttcttccttgtgtccttgtgccaaacactcgtgattgccgtccactcacttatcaagctgccatacctgagttgagaactccggaagaactgaaccccattattgttacgccaccaatccaagccattgatcaggaccggaatattcaaccgccatcagataggccaggaatcctctattccatccttgttgggactcctgaggattacccacgatttttccatatgcatcctaggacagcagaacttagtctcctggagccagtaaacagagactttcaccagaaatttgatttggttattaaggctgaacaagacaatggtcatcctcttcctgcctttgccggtctacacattgaaatactggatgaaaacaatcaaagtccatattttacaatgcccagttatcaaggctatatcctggaatctgccccagtgggagcaaccatttcggacagtctcaatttgacttcacctttaagaatagtagctctggacaaggacatagaagatacaaaagacccagagcttcacctttttctgaatgactacacctcagtcttcaccgtcacacagactggtattactcgctacctcaccttacttcaaccagtggacagggaagaacagcaaacttacaccttttcgataacagcatttgatggtgtacaagaaagtgagccagtcatcgtcaatattcaagtgatggatgcaaatgataacacgccaaccttccctgaaatatcctatgatgtgtatgtttatacagacatgagacctggggacagtgtcatacagctcactgcagtcgacgcagacgaagggtcaaatggggagatcacatatgaaatccttgttggggctcagggagacttcatcatcaataaaacaacagggcttatcaccatcgctccaggggtggaaatgatagtcgggcggacttacgcactcacggtccaagcagcggataatgctcctcctgcagagcgaaggaactccatctgcactgtgtatattgaagtgcttccaccaaataatcaaagccctcctcgcttcccacagctgatgtatagccttgaaattagtgaagccatgagggttggtgctgttttattaaatctacaggcaactgatcgagagggagactcaataacatatgccattgagaatggagatcctcagagagtttttaatctttcagaaaccacggggattctaaccttagggaaagcactggacagggaaagcactgatcgctacattctgatcatcacagcttcagatggcaggccagatggggaagagccaaagaaaattaaaaaaccaaaggttgaaattagagagcctagtgaggaggaagaagtagttgtaactatcgaaaaaccaccagcagctgagcctacatacacaacatggaagagagccagaatattccccatgatttttaagaaagttagaggattagctgataaaagaggaatcgttgaccttgagggtgaagagtggcagagacgccttgaggaagaagataaagattatttgaaactcactctggaccaagaggaagcaacagaaagcactgtagaatcagaggaggaatcctccagcgactatactgaatacagtgaagaagagtctgagttcagtgagtctgagactacagaagaggaatctgagtcagagacaccctctgaggaggaggagagttccacccctgaatcagaagaatcggaatccacagagtcagaaggagaaaaagcaaggaaaaacattgtgcttgcaagaagaaggcccatggttgaggaggtcaaggaagtcaagggtaggaaagaggagccacaagaagaacaaaaagaacctaagatggaagaagaagaacactcagaagaagaagaaagtggaccagcccctgtggaagaaagtacagaccctgaagctcaagatatccctgaagagggcagtgcagaatcagcttcggtggaaggaggtgtggaaagtgaggaggaatcagaatcaggtagtagtagcagtagtagcgaaagtcagtctggaggtccatggggctatcaggtaccagcgtatgacagaagcaagaatgcaaaccaaaagaagtcgccaggagcaaactctgaaggttacaacacagcactttgaaagagatcacagtaggtggaagttttgctgtgatgagtgctctcgtgtgcagtgccttctgtgtgttctccaaagtgacacttgaaagggaggaaattgatcaagattttgatatgacttatgatcagaagcatgccagaaaagtgaatatatatgttgtccaaatccatttgtatattagactgtattagagtaaaactgactaatccttcctatattagtaaatcagaacacatgcaatcagctaatcaatatttaatatttactggtaggatttttgttaatgcaatgtggcattatgtattatcagtgacactctgtctattggaatggatggcatatatatatatatatatatatacacacacacactatatatgtttttatatcatctttcaaaataaatactaagacaagcttcaacaaattatatctttaacagtcgtctacttttgcatatatgtacgtttcaactggcaaaggtattataaaaactatcatgaacatgttcaaataagtaagtttgtatctgcaacttcaagtattaggaattcaatgaaataacatttttcaattaattaaaagttattacagcttattttctgtt

SEQ ID NO: 172232 - DNA, 5401 bp, Homo sapiens
  Payload ID: 13865
  Gene Symbol: PCDH15
  Gene Name: protocadherin-related 15
  ENST ID: ENST00000409834
  CDS Start-End: 577-4029
caacgtgctgagctaatagcgacagatagagggcagacagattcctgctagcagcttagtgttagttgcttgtggtaactaaggcaggtggcatacatctcagaacgtggagaatgatggtatgctttctgagttaacatgttgaactgttttgcttttctaaaaattttcctagtaacattttcttgatgatatgagagtggatatcaatgcctcacagaaacaagaggtggaacatgtgaatgaatcgtcttggaactagattatgagcactggttctttttaaagggatgtgcaagaggcagccttggcaagaaaacttgctgcataatcttacatggactaaagatgaaactttaaaccgcaaatcagctttgagtgaactttgacagaagatgtttcgacagttttatctctggacatgtttagcttcagggatcatcctgggctctctctttgaaatctgcttgggccagtatgatgatggctgaacaagacaatggtcatcctcttcctgcctttgccggtctacacattgaaatactggatgaaaacaatcaaagtccatattttacaatgcccagttatcaaggctatatcctggaatctgccccagtgggagcaaccatttcggacagtctcaatttgacttcacctttaagaatagtagctctggacaaggacatagaagatgttccacccagtggagttcctacaaaagacccagagcttcacctttttctgaatgactacacctcagtcttcaccgtcacacagactggtattactcgctacctcaccttacttcaaccagtggacagggaagaacagcaaacttacaccttttcgataacagcatttgatggtgtacaagaaagtgagccagtcatcgtcaatattcaagtgatggatgcaaatgataacacgccaaccttccctgaaatatcctatgatgtgtatgtttatacagacatgagacctggggacagtgtcatacagctcactgcagtcgacgcagacgaagggtcaaatggggagatcacatatgaaatccttgttggggctcagggagacttcatcatcaataaaacaacagggcttatcaccatcgctccaggggtggaaatgatagtcgggcggacttacgcactcacggtccaagcagcggataatgctcctcctgcagagcgaaggaactccatctgcactgtgtatattgaagtgcttccaccaaataatcaaagccctcctcgcttcccacagctgatgtatagccttgaaattagtgaagccatgagggttggtgctgttttattaaatctacaggcaactgatcgagagggagactcaataacatatgccattgagaatggagatcctcagagagtttttaatctttcagaaaccacggggattctaaccttagggaaagcactggacagggaaagcactgatcgctacattctgatcatcacagcttcagatggcaggccagatgggacctcaactgccacagtaaacatagtggtgacagatgtcaatgacaatgctccagtgtttgatccttatctgccaagaaatttatctgtggtggaagaagaagccaatgcctttgtgggtcaagtaaaagcaacagaccctgatgctggaataaatggtcaagtgcactacagtttgggtaactttaataatctttttcgtatcacatccaatgggagcatttacacagcagtgaagcttaacagagaagtcagggactactatgaacttgttgttgtggcaacagatggagcagtacaccctcgtcattcaactctaaccttggccatcaaggttttggacattgatgataacagtcctgtgttcaccaattcaacatacactgtccttgttgaagagaatttgccagctgggactaccatccttcaaatagaggccaaagatgtcgaccttggagcaaatgtgtcttaccggataagaagcccagaagtgaagcacttttttgcactacatccatttacaggagaactatcgcttttaaggagtttagattatgaggcatttccagaccaagaagcaagtatcacttttctggtagaggcctttgatatttatggaacaatgccacctggtattgctactgtcacagtgattgtaaaggatatgaatgattatcctcctgtctttagtaaacgaatatacaaagggatggtggctccggatgcagtcaagggtacacctatcacaacagtttatgctgaagatgcagaccctcctggattacctgcaagtcgtgtgaggtatagagtagatgatgtacagtttccttaccctgccagtatttttgaagtggaagaagattctggaagagtaataacacgagtcaatcttaatgaagaacctacaacaatttttaagttggtggtggttgcttttgatgatggggagcctgtgatgtccagcagtgccacagtgaagattcttgtcttacatcctggtgagatcccacgcttcacacaggaggaatatagacctcctccagtaagtgaacttgccaccaaagggaccatggttggtgtaatttctgctgctgccattaatcaaagtattgtgtactccattgtttcaggaaatgaagaagatacatttggaattaataacatcacaggtgttatctatgtgaatggacctctggattatgagaccaggacaagctatgtacttcgagtccaagctgattccctggaagtggtccttgccaatctccgagttccttcaaaaagcaatacagctaaagtatacattgagattcaggatgaaaataatcatcccccagtgtttcagaaaaaattctacatcggaggtgtatctgaagatgcaagaatgtttacttctgtactcagagtgaaggctactgataaagatactggcaattatagtgtcatggcctacagactcataataccaccaattaaagagggaaaagaaggatttgtagtggaaacatatacagggcttatcaaaactgctatgctcttccataatatgaggagatcctacttcaagtttcaagttattgcaactgacgactatgggaagggactgagcggcaaagccgatgtactcgtctccgtggtcaatcagctggatatgcaagtcattgtttccaatgtgcctcctactctagtggaaaaaaagatagaagatcttacagagatcttggatcgctatgttcaggaacaaattcctggtgccaaggtcgtagtggagtccattggagctcgccggcatggagatgccttttccctagaagattacaccaaatgtgacttgactgtctatgcaattgacccccaaaccaacagagccatcgatagaaatgagctttttaaatttttggatggcaaactacttgatatcaataaagactttcagccgtattatggggaaggaggacgcattctggagatccggactccagaggcagtgaccagcattaaaaagagaggagaaagtctaggatacacagaaggggccttgttggctctggccttcatcatcatcctctgctgcattcctgccatcttggtggttttggtcagctacagacagtttaaagtacgtcaagctgagtgtacaaagactgcacgaattcaggccgcattacccgcggctaaaccagcagtgccggctcctgcaccagtggcagcgcccccgccgccgccgccgcctccgccaggtgcgcatctctatgaagaacttggagacagctcaatgcataagaattatccatggagtctggaattgatcctggccaggaatatggacaagattattacagttatgagcatgggtatgaaatgcctcaatatgggagtcgccgtcgattgttaccaccagctggacaggaggaatatggtgaggtggttggtgaagctgaggaagaatatgaggaggaagaggaagagccaaagaaaattaaaaaaccaaaggttgaaattagagagcctagtgaggaggaagaagtagttgtaactatcgaaaaaccaccagcagctgagcctacatacacaacatggaagagagccagaatattccccatgatttttaagaaagttagaggattagctgataaaagaggaatcgttgaccttgagggtgaagagtggcagagacgccttgaggaagaagataaagattatttgaaactcactctggaccaagaggaagcaacagaaagcactgtagaatcagaggaggaatcctccagcgactatactgaatacagtgaagaagagtctgagttcagtgagtctgagactacagaagaggaatctgagtcagagacaccctctgaggaggaggagagttccacccctgaatcagaagaatcggaatccacagagtcagaaggagaaaaagcaaggaaaaacattgtgcttgcaagaagaaggcccatggttgaggaggtcaaggaagtcaagggtaggaaagaggagccacaagaagaacaaaaagaacctaagatggaagaagaagaacactcagaagaagaagaaagtggaccagcccctgtggaagaaagtacagaccctgaagctcaagatatccctgaagagggcagtgcagaatcagcttcggtggaaggaggtgtggaaagtgaggaggaatcagaatcaggtagtagtagcagtagtagcgaaagtcagtctggaggtccatggggctatcaggtaccagcgtatgacagaagcaagaatgcaaaccaaaagaagtcgccaggagcaaactctgaaggttacaacacagcactttgaaagagatcacagtaggtggaagttttgctgtgatgagtgctctcgtgtgcagtgccttctgtgtgttctccaaagtgacacttgaaagggaggaaattgatcaagattttgatatgacttatgatcagaagcatgccagaaaagtgaatatatatgttgtccaaatccatttgtatattagactgtattagagtaaaactgactaatccttcctatattagtaaatcagaacacatgcaatcagctaatcaatatttaatatttactggtaggatttttgttaatgcaatgtggcattatgtattatcagtgacactctgtctattggaatggatggcatatatatatatatatatatatacacacacacactatatatgtttttatatcatctttcaaaataaatactaagacaagcttcaacaaattatatctttaacagtcgtctacttttgcatatatgtacgtttcaactggcaaaggtattataaaaactatcatgaacatgttcaaataagtaagtttgtatctgcaacttcaagtattaggaattcaatgaaataacatttttcaattaattaaaa

SEQ ID NO: 172233 - DNA, 448 bp, Homo sapiens
  Payload ID: 13865
  Gene Symbol: PCDH15
  Gene Name: protocadherin-related 15
  ENST ID: ENST00000458638
  CDS Start-End: 172-448
tatgcaggatttccaggaaaatggaaacatcattccctagaaacagttgaagttgacagacctagaggttgacaaaaggacacgacactagggaatttgcattgtcatgtttcgaaataccattccaaagacctgcaaataagatcagctttgagtgaactttgacagaagatgtttcgacagttttatctctggacatgtttagcttcagggatcatcctgggctctctctttgaaatctgcttgggccagtatgatgatgattgcaaactagctaggggaggaccaccagctaccatagttgctattgatgaagaaagtcggaatggtacaattctggtggacaacatgctgatcaaagggactgctggaggaccagaccccaccatagaactttctttaaaggataatgtggattactgggtgttgatggatcctgttaagcaaa

SEQ ID NO: 172234 - DNA, 9234 bp, Homo sapiens
  Payload ID: 13865
  Gene Symbol: PCDH15
  Gene Name: protocadherin-related 15
  ENST ID: ENST00000414778
  CDS Start-End: 396-5426
caacgtgctgagctaatagcgacagatagagggcagacagattcctgctagcagcttagtgttagttgcttgtggtaactaaggcaggtggcatacatctcagaacgtggagaatgatggtatgctttctgagttaacatgttgaactgttttgcttttctaaaaattttcctagtaacattttcttgatgatatgagagtggatatcaatgcctcacagaaacaagaggtggaacatgtgaatgaatcgtcttggaactagattatgagcactggttctttttaaagggatgtgcaagaggcagccttggcaagaaaacttgctgcataatcttacatggactaaagatgaaactttaaaccgcaaatcagctttgagtgaactttgacagaagatgtttcgacagttttatctctggacatgtttagcttcagggatcatcctgggctctctctttgaaatctgcttgggccagtatgatgatgattgcaaactagctaggggaggaccaccagctaccatagttgctattgatgaagaaagtcggaatggtacaattctggtggacaacatgctgatcaaagggactgctggaggaccagaccccaccatagaactttctttaaaggataatgtggattactgggtgttgatggatcctgttaagcaaatgcttttcctgaacagcaccggaagagttctggatagagatccaccgatgaacatacactccattgtggtgcaggtccagtgcatcaacaaaaaagtgggcactattatctaccatgaagtgcgaatagtggtgagagacaggaatgacaactcacccactttcaagcatgaaagctactatgccacagtgaatgagctcactccagttggtaccacaatattcacaggattttcaggagacaatggagctacagatatagatgatggaccaaatggacagatagagtatgttattcagtataatccagatgatccgacatccaatgacacctttgaaattcccctaatgttgactggaaatatagtgttaaggaagaggctcaactatgaagataagactcgctactttgtcataatccaagctaatgaccgtgcccaaaatctgaatgagaggcgaaccaccaccaccactctcacagtggatgttctggatggagatgacttgggtccaatgtttcttccttgtgtccttgtgccaaacactcgtgattgccgtccactcacttatcaagctgccatacctgagttgagaactccggaagaactgaaccccattattgttacgccaccaatccaagccattgatcaggaccggaatattcaaccgccatcagataggccaggaatcctctattccatccttgttgggactcctgaggattacccacgatttttccatatgcatcctaggacagcagaacttagtctcctggagccagtaaacagagactttcaccagaaatttgatttggttattaaggctgaacaagacaatggtcatcctcttcctgcctttgccggtctacacattgaaatactggatgaaaacaatcaaagtccatattttacaatgcccagttatcaaggctatatcctggaatctgccccagtgggagcaaccatttcggacagtctcaatttgacttcacctttaagaatagtagctctggacaaggacatagaagatacaaaagacccagagcttcacctttttctgaatgactacacctcagtcttcaccgtcacacagactggtattactcgctacctcaccttacttcaaccagtggacagggaagaacagcaaacttacaccttttcgataacagcatttgatggtgtacaagaaagtgagccagtcatcgtcaatattcaagtgatggatgcaaatgataacacgccaaccttccctgaaatatcctatgatgtgtatgtttatacagacatgagacctggggacagtgtcatacagctcactgcagtcgacgcagacgaagggtcaaatggggagatcacatatgaaatccttgttggggctcagggagacttcatcatcaataaaacaacagggcttatcaccatcgctccaggggtggaaatgatagtcgggcggacttacgcactcacggtccaagcagcggataatgctcctcctgcagagcgaaggaactccatctgcactgtgtatattgaagtgcttccaccaaataatcaaagccctcctcgcttcccacagctgatgtatagccttgaaattagtgaagccatgagggttggtgctgttttattaaatctacaggcaactgatcgagagggagactcaataacatatgccattgagaatggagatcctcagagagtttttaatctttcagaaaccacggggattctaaccttagggaaagcactggacagggaaagcactgatcgctacattctgatcatcacagcttcagatggcaggccagatgggacctcaactgccacagtaaacatagtggtgacagatgtcaatgacaatgctccagtgtttgatccttatctgccaagaaatttatctgtggtggaagaagaagccaatgcctttgtgggtcaagtaaaagcaacagaccctgatgctggaataaatggtcaagtgcactacagtttgggtaactttaataatctttttcgtatcacatccaatgggagcatttacacagcagtgaagcttaacagagaagtcagggactactatgaacttgttgttgtggcaacagatggagcagtacaccctcgtcattcaactctaaccttggccatcaaggttttggacattgatgataacagtcctgtgttcaccaattcaacatacactgtccttgttgaagagaatttgccagctgggactaccatccttcaaatagaggccaaagatgtcgaccttggagcaaatgtgtcttaccggataagaagcccagaagtgaagcacttttttgcactacatccatttacaggagaactatcgcttttaaggagtttagattatgaggcatttccagaccaagaagcaagtatcacttttctggtagaggcctttgatatttatggaacaatgccacctggtattgctactgtcacagtgattgtaaaggatatgaatgattatcctcctgtctttagtaaacgaatatacaaagggatggtggctccggatgcagtcaagggtacacctatcacaacagtttatgctgaagatgcagaccctcctggattacctgcaagtcgtgtgaggtatagagtagatgatgtacagtttccttaccctgccagtatttttgaagtggaagaagattctggaagagtaataacacgagtcaatcttaatgaagaacctacaacaatttttaagttggtggtggttgcttttgatgatggggagcctgtgatgtccagcagtgccacagtgaagattcttgtcttacatcctggtgagatcccacgcttcacacaggaggaatatagacctcctccagtaagtgaacttgccaccaaagggaccatggttggtgtaatttctgctgctgccattaatcaaagtattgtgtactccattgtttcaggaaatgaagaagatacatttggaattaataacatcacaggtgttatctatgtgaatggacctctggattatgagaccaggacaagctatgtacttcgagtccaagctgattccctggaagtggtccttgccaatctccgagttccttcaaaaagcaatacagctaaagtatacattgagattcaggatgaaaataatcatcccccagtgtttcagaaaaaattctacatcggaggtgtatctgaagatgcaagaatgtttacttctgtactcagagtgaaggctactgataaagatactggcaattatagtgtcatggcctacagactcataataccaccaattaaagagggaaaagaaggatttgtagtggaaacatatacagggcttatcaaaactgctatgctcttccataatatgaggagatcctacttcaagtttcaagttattgcaactgacgactatgggaagggactgagcggcaaagccgatgtactcgtctccgtggtcaatcagctggatatgcaagtcattgtttccaatgtgcctcctactctagtggaaaaaaagatagaagatcttacagagatcttggatcgctatgttcaggaacaaattcctggtgccaaggtcgtagtggagtccattggagctcgccggcatggagatgccttttccctagaagattacaccaaatgtgacttgactgtctatgcaattgacccccaaaccaacagagccatcgatagaaatgagctttttaaatttttggatggcaaactacttgatatcaataaagactttcagccgtattatggggaaggaggacgcattctggagatccggactccagaggcagtgaccagcattaaaaagagaggagaaagtctaggatacacagaaggggccttgttggctctggccttcatcatcatcctctgctgcattcctgccatcttggtggttttggtcagctacagacaggtattcaagggacgtcaagctgagtgtacaaagactgcacgaattcaggccgcattacccgcggctaaaccagcagtgccggctcctgcaccagtggcagcgcccccgccgccgccgccgcctccgccaggtgcgcatctctatgaagaacttggagacagctcaatgtatgaaatgcctcaatatgggagtcgccgtcgattgttaccaccagctggacaggaggaatatggtgaggtggttggtgaagctgaggaagaatatgaggaggaagagtgggcaagaaaaagaatgatcaagttagttgttgatcgagagtatgaaaccagctcaactggagaagacagtgctcctgaatgtcagagaaaccgtcttcaccatcctagtatccacagtaatatcaacggcaatatatatattgcacagaatggttctgtggtgagaacccgccgtgcctgcctcacggacaacttaaaagttgcttcccctgttcgactgggagggccctttaagaaactagacaagttggcagtgacacatgaggagaatgtacctctgaacacattatcaaaggggccattttctactgaaaaaatgaatgcaagaccaactctggttacatttgccccttgccctgtggggactgacaatacagcggtgaagccactaaggaacaggctgaaaagcacagttgaacaggagtccatgattgacagtaagaacatcaaggaggctttggaatttcatagtgaccacacacagtctgatgatgaagagctttggatgggcccctggaacaacctccatataccaatgacaaaactgtgaccaattttttaaaagatattttaattaatttttacttacatttttaataaactgtgctttttattgtcactgagaaaacaatgtatggaatttatatcatgcacacaagctaaaactttgaacaatatgctttaaaattttaagagacagatttgcactcacattgttatcaattaatcgtttttcccagaaaatccttttggacatactttcactaaataacctatcgtttaaacatttagctgttttgttgggtcttgaatttttgttcattttaataaacaagaaataattactaaataatcatttatattttattgattaacatagattatgctttatttctagctccacaaaacatttttagtacatgtaattttattttccatagccaaaagggcaaaaaagaagtaagaggatatttacaggcaatgagtttatacagctgctgtctatactgccctaatttttaaaatgaaagctagaattgcaaagtaaagtaaatgagggaatcacctgtaaataattaattattttaaatcatgagcttgttttctttctttattgtcctgtataaaggttttcacattttaccataaatacatttatatcttgaccctttaggaaaccacttgaagtcgtatgtctttttatcaatattatttacaatattctcttgtcccttcatctcatatcaaatatggtagatactttagtttagtttaatcacttgaggttaaataattgtttggagcaacatggaaatctcacccttagcaaaagcttttagggaagtgagaaaggttcgagtaagcagtaatgcatctagaacgacaatttcataatggaagacatggtgaggttagggaagtctcacattaatgtcactagactttaatagtttgtaaacccagcatatcagagtaaaggaatttggcagggttgaaatgtatataatatataaagcttataaaggctatgaattcataacttcaaatgttgtgtttaacttcttccattttcaggttatttatagaatattttaatgcacatatttatgtgcctaaaatccagaaccaggaaatcattgcctgggcattttttaaaatcaaagaacatggtcttgattttttaccattgaacaaagcacagtgtttcatcataagtagaaatgaaaacagaatatcctttaaaaaacttgccttgtgtgttgcttattttccagatgatgtaaaaagaatgaaacaatatagattaagagaattcagaattctattgaatattacttagtatgatatagatgtagctcacttcaaattttgcacagtattgaccaagttcaggttttaatgaaatttcctcatgcatgcttaatatatggttgaaggactgaataatgcactattatttattcccctcttacatgtttcgcgtcttaaaaattgtttattattatgctatttcctcatttccaaagtgaatgaattgtactgacataaacttgccgacttgtaagagtagtatgtttttacttcagatttccaagaaaatatttgagatcaaatacagtaacatctcatctaccttattttattgagaattaatgcattccatacccttgccaaaaaaacaaaacaaaacaaacaaacaaaaaaaaacctagtggcattagctagattagaaacgtagaatcatgaccacacctcctggcctgccaaacaagcatccacattttcaaaagatcctaaggtggtttatatgcacattaaattttggaagcaatgaagtccggggcttattccttcaggcaccaaagcaatggtttttagtataggatactttgtataggaattagattaagcatatatttccctactaattcaatcagaggtcatcgaatataatttaatattatcttgatacccccagatcatctcagtcagcatcccttgatattctctctatatacagcttcatggctgcgtttttgtcctttgatttctggctgtgacatttaacttattctgttgttgtgcctttctcacatttttttctttcagtttatagcttctagtatcctgatgggaaagtttgtgttttttgtttgttttcttaatgttgaaaaatcatgaagcttaagatgggaattaggtacacggattcaaccaaatgttttgcgactcttagacgctttctttggttaccagtagatttggaaatatgatgttggcagaagtctagtggcctgacatatgagatgtcactgtattttaaactacattttttatgagaaaatatgcaaaattttacaagccacttagcagacacatttcagtaatttaaacttgatcatttcagtaaaaacaatcatgaggtcaatcatctgttacttaatggagatagtataaagagaagcagaatttacacagagcaaccaaaccaaatatttggtcagtatatttttgggtaacgtagagcagcaaaattattactaactaaataaatctggatcaattaaatagttactttcatagaactttcactagtctataaatccctgactcaggattaaaactgtggaacccagaggaaatacccaggtatgtttaatcttaagaatacttcatataaataacgtttcaatgtaaatatttataaagaaattggttgttatttttcctaggaaggtgtaggaaggttttcttgttgttctcaatcagcactagcttcaatcaggcagaagaaacagcaggtcttggctaatcgaggtgagaacagaatgatgtaatgactaatattgcaacccgttgattttagaaggtcttgtgggcattaagggaaagcagaggaagaatgagaaaatatggtcagagtgacataggacatttgtgacttaatgaccatcgaatcacaggtgttaatctccctctctcaatttgtctttctcattaattacagactctgagagttgtcatagaattgcaaccgtaggttggccaaaaccatctttttaaaatacagaagaaagtttgccttgaattttatatgtgatatgtcattcatgttattttaccacattgttcacagggatgttaaagactattatttacttaagtggttgttccaaaggtgattcagtagttaccattaaaatattatttaaaaacatttttatatcatagagccagaagtaattgaatattgactctcgagggaagacattttctgtcttttatttcatgagctttgatttttctctttctctgcttcaccttctgcactttataccttaagtgggatttatataccacttgaatttaattagcaaaataggcaaaaagtgctaataatctattctcagggcagatgcctattggtgcctgcaaattacacagcgataaggctgaaggataggttcaaaataatgttgaggacttacacattttatagatagtttctttctattcccaaatggtatgtgaaatttttgttctattttttttattggttttcaatagttaattttgatctttatcataagaagctttagttatagactggtatttttttcattgcaatctactttaaatttatggtcagttaagcacatgtatggaagattcgaacattgtctatagtttgaaaaatctatcaacaccttcactgctttcccaatttctttatccaaatacctgttcttccttaacaaatattatgttactgtataagaatctgaattagaagttttaagttaaaatgcattgttattcactacacaatgtttcaaaaataaattttcatttgaaaa

SEQ ID NO: 172235 - DNA, 6937 bp, Homo sapiens
  Payload ID: 13865
  Gene Symbol: PCDH15
  Gene Name: protocadherin-related 15
  ENST ID: ENST00000448885
  CDS Start-End: 396-2360
caacgtgctgagctaatagcgacagatagagggcagacagattcctgctagcagcttagtgttagttgcttgtggtaactaaggcaggtggcatacatctcagaacgtggagaatgatggtatgctttctgagttaacatgttgaactgttttgcttttctaaaaattttcctagtaacattttcttgatgatatgagagtggatatcaatgcctcacagaaacaagaggtggaacatgtgaatgaatcgtcttggaactagattatgagcactggttctttttaaagggatgtgcaagaggcagccttggcaagaaaacttgctgcataatcttacatggactaaagatgaaactttaaaccgcaaatcagctttgagtgaactttgacagaagatgtttcgacagttttatctctggacatgtttagcttcagggatcatcctgggctctctctttgaaatctgcttgggccagtatgatgatgattgcaaactagctaggggaggaccaccagctaccatagttgctattgatgaagaaagtcggaatggtacaattctggtggacaacatgctgatcaaagggactgctggaggaccagaccccaccatagaactttctttaaaggataatgtggattactgggtgttgatggatcctgttaagcaaatgcttttcctgaacagcaccggaagagttctggatagagatccaccgatgaacatacactccattgtggtgcaggtccagtgcatcaacaaaaaagtgggcactattatctaccatgaagtgcgaatagtggtgagagacaggaatgacaactcacccactttcaagcatgaaagctactatgccacagtgaatgagctcactccagttggtaccacaatattcacaggattttcaggagacaatggagctacagatatagatgatggaccaaatggacagatagagtatgttattcagtataatccagatgatccgacatccaatgacacctttgaaattcccctaatgttgactggaaatatagtgttaaggaagaggctcaactatgaagataagactcgctactttgtcataatccaagctaatgaccgtgcccaaaatctgaatgagaggcgaaccaccaccaccactctcacagtggatgttctggatggagatgacttgggtccaatgtttcttccttgtgtccttgtgccaaacactcgtgattgccgtccactcacttatcaagctgccatacctgagttgagaactccggaagaactgaaccccattattgttacgccaccaatccaagccattgatcaggaccggaatattcaaccgccatcagataggccaggaatcctctattccatccttgttgggactcctgaggattacccacgatttttccatatgcatcctaggacagcagaacttagtctcctggagccagtaaacagagactttcaccagaaatttgatttggttattaaggctgaacaagacaatggtcatcctcttcctgcctttgccggtctacacattgaaatactggatgaaaacaatcaaagtccatattttacaatgcccagttatcaaggctatatcctggaatctgccccagtgggagcaaccatttcggacagtctcaatttgacttcacctttaagaatagtagctctggacaaggacatagaagatacaaaagacccagagcttcacctttttctgaatgactacacctcagtcttcaccgtcacacagactggtattactcgctacctcaccttacttcaaccagtggacagggaagaacagcaaacttacaccttttcgataacagcatttgatggtgtacaagaaagtgagccagtcatcgtcaatattcaagtgatggatgcaaatgataacacgccaaccttccctgaaatatcctatgatgtgtatgtttatacagacatgagacctggggacagtgtcatacagctcactgcagtcgacgcagacgaagggtcaaatggggagatcacatatgaaatccttgttggggctcagggagacttcatcatcaataaaacaacagggcttatcaccatcgctccaggggtggaaatgatagtcgggcggacttacgcactcacggtccaagcagcggataatgctcctcctgcagagcgaaggaactccatctgcactgtgtatattgaagtgcttccaccaaataatcaaagccctcctcgcttcccacagctgatgtatagccttgaaattagtgaagccatgagggttggtgctgttttattaaatctacagcacggggattctaaccttagggaaagcactggacagggaaagcactgatcgctacattctgatcatcacagcttcagatggcaggccagatgggacctcaactgccacagtaaacatagtggtgacagatgtcaatgacaatgctccagtgtttgatccttatctgccaagaaatttatctgtggtggaagaagaagccaatgcctttgtgggtcaagtaaaagcaacagaccctgatgctggaataaatggtcaagtgcactacagtttgggtaactttaataatctttttcgtatcacatccaatgggagcatttacacagcagtgaagcttaacagagaagtcagggactactatgaacttgttgttgtggcaacagatggagcagtacaccctcgtcattcaactctaaccttggccatcaaggttttggacattgatgataacagtcctgtgttcaccaattcaacatacactgtccttgttgaagagaatttgccagctgggactaccatccttcaaatagaggccaaagatgtcgaccttggagcaaatgtgtcttaccggataagaagcccagaagtgaagcacttttttgcactacatccatttacaggagaactatcgcttttaaggagtttagattatgaggcatttccagaccaagaagcaagtatcacttttctggtagaggcctttgatatttatggaacaatgccacctggtattgctactgtcacagtgattgtaaaggatatgaatgattatcctcctgtctttagtaaacgaatatacaaagggatggtggctccggatgcagtcaagggtacacctatcacaacagtttatgctgaagatgcagaccctcctggattacctgcaagtcgtgtgaggtatagagtagatgatgtacagtttccttaccctgccagtatttttgaagtggaagaagattctggaagagtaataacacgagtcaatcttaatgaagaacctacaacaatttttaagttggtggtggttgcttttgatgatggggagcctgtgatgtccagcagtgccacagtgaagattcttgtcttacatcctggtgagatcccacgcttcacacaggaggaatatagacctcctccagtaagtgaacttgccaccaaagggaccatggttggtgtaatttctgctgctgccattaatcaaagtattgtgtactccattgtttcaggaaatgaagaagatacatttggaattaataacatcacaggtgttatctatgtgaatggacctctggattatgagaccaggacaagctatgtacttcgagtccaagctgattccctggaagtggtccttgccaatctccgagttccttcaaaaagcaatacagctaaagtatacattgagattcaggatgaaaataatcatcccccagtgtttcagaaaaaattctacatcggaggtgtatctgaagatgcaagaatgtttacttctgtactcagagtgaaggctactgataaagatactggcaattatagtgtcatggcctacagactcataataccaccaattaaagagggaaaagaaggatttgtagtggaaacatatacagggcttatcaaaactgctatgctcttccataatatgaggagatcctacttcaagtttcaagttattgcaactgacgactatgggaagggactgagcggcaaagccgatgtactcgtctccgtggtcaatcagctggatatgcaagtcattgtttccaatgtgcctcctactctagtggaaaaaaagatagaagatcttacagagatcttggatcgctatgttcaggaacaaattcctggtgccaaggtcgtagtggagtccattggagctcgccggcatggagatgccttttccctagaagattacaccaaatgtgacttgactgtctatgcaattgacccccaaaccaacagagccatcgatagaaatgagctttttaaatttttggatggcaaactacttgatatcaataaagactttcagccgtattatggggaaggaggacgcattctggagatccggactccagaggcagtgaccagcattaaaaagagaggagaaagtctaggatacacagaaggggccttgttggctctggccttcatcatcatcctctgctgcattcctgccatcttggtggttttggtcagctacagacagtttaaagtacgtcaagctgagtgtacaaagactgcacgaattcaggccgcattacccgcggctaaaccagcagtgccggctcctgcaccagtggcagcgcccccgccgccgccgccgcctccgccaggtgcgcatctctatgaagaacttggagacagctcaatgcataatcttttccttctctaccattttcaacaaagcaggggaaataactcagtctcagaagacaggaaacatcaacaagttgtgatgcccttttcttccaatactattgaggctcacaagtcagctcatgtagacggatcacttaagagcaacaaactgaagtctgcaagaaaattcacatttctatctgatgaggatgacttaagtgcccataatcccctttataaggaaaacataagtcaagtatcaacaaattcagacatttcacagagaacagattttgtagacccattttcacccaaaatacaagccaagagtaagtctctgaggggcccaagagaaaagattcagaggctgtggagtcagtcagtcagcttacccaggaggctgatgaggaaagttccaaatagaccagagatcatagatctgcagcagtggcaaggcaccaggcagaaagctgaaaatgaaaacactggaatctgtacaaacaaaagaggtagcagcaatccattgcttacaactgaagaggcaaatttgacagagaaagaggaaataaggcaaggtgaaacactgatgatagaaggaacagaacagttgaaatctctctcttcagactcttcattttgctttcccaggcctcacttctcattctccactttgccaactgtttcaagaactgtggaactcaaatcagaacctaatgtcatcagttctcctgctgagtgttccttggaactttctccttcaaggccttgtgttttacattcttcactctctaggagagagacacctatttgtatgttacctattgaaaccgaaagaaatatttttgaaaattttgcccatccaccaaacatctctccttctgcctgtccccttccccctcctcctcctatttctcctccttctcctcctcctgctcctgctcctcttgctcctcctcctgacatttctcctttttctcttttttgtcctcctccctctcctccttctatccctcttcctcttcctcctcctacattttttccactttccgtttcaacgtctggtcccccaacaccacctcttctacctccatttccaactcctcttcctccaccacctccttctattccttgccctccacctccttcagcttcatttctgtccacagagtgtgtctgtataacaggtgttaaatgcacgaccaacttgatgcctgccgagaaaattaagtcctctatgacacagctatcaacaacgacagtgtgtaaaacagaccctcagagagaaccaaaaggcatcctcagacacgttaaaaacttagcagaacttgaaaaatcagtagctaacatgtacagtcaaatagaaaaaaactatctacgcacaaatgtttcagaacttcaaactatgtgcccttcagaagtaacaaatatggaaatcacatctgaacaaaacaaggggagtttgaacaatattgtcgagggaactgaaaaacaatctcacagtcaatctacttcactgtaatgttgcttttcttattttagtcgggcaaacctcttgttgatcatagtcttcaagttgaacatcaaatttgaacgtcaaagaagactctattattttaccccaaattcaatgaaatgcagttttttttctcgtttttaatttaaaaagatattaacctcatcactactaactcactcatataatagatttaccttactttttaaaaactacaaagtagcataatttgttctacatttatttgaaaagtaagtaattttaatctcttttttagtgggaatatgtgggcatgaaaattagatacccaacttaaaccaaaggcatgtctatcatgtggatgcagtaacatttacatttagtttttgatcgtagttttatatgaatgttccaagaaaaaagcagactgttacaaataagttaaaactgatatgattgataggttctgttttttcttgaagcctatgtatttggtaagaagaaatactaccgaagtaaaatataatgtacctagattgtaggagatgacagacataaggtatttcaaaataaatctcaggtgctataacatgtagtcatctgttttctgataagaacatcttttactctgacttgcttttatcttagtagtatgcttatggatttagtagtatgcttatggatttgataaatcttatactttttcagttgctgtcttattctctttatttctcattgtgctttcccttcccttctttataatgaaaataaatct

SEQ ID NO: 172236 - DNA, 3357 bp, Homo sapiens
  Payload ID: 13865
  Gene Symbol: PCDH15
  Gene Name: protocadherin-related 15
  ENST ID: ENST00000414367
  CDS Start-End: 396-1385
caacgtgctgagctaatagcgacagatagagggcagacagattcctgctagcagcttagtgttagttgcttgtggtaactaaggcaggtggcatacatctcagaacgtggagaatgatggtatgctttctgagttaacatgttgaactgttttgcttttctaaaaattttcctagtaacattttcttgatgatatgagagtggatatcaatgcctcacagaaacaagaggtggaacatgtgaatgaatcgtcttggaactagattatgagcactggttctttttaaagggatgtgcaagaggcagccttggcaagaaaacttgctgcataatcttacatggactaaagatgaaactttaaaccgcaaatcagctttgagtgaactttgacagaagatgtttcgacagttttatctctggacatgtttagcttcagggatcatcctgggctctctctttgaaatctgcttgggccagtatgatgatgattgcaaactagctaggggaggaccaccagctaccatagttgctattgatgaagaaagtcggaatggtacaattctggtggacaacatgctgatcaaagggactgctggaggaccagaccccaccatagaactttctttaaaggataatgtggattactgggtgttgatggatcctgttaagcaaatgcttttcctgaacagcaccggaagagttctggatagagatccaccgatgaacatacactccattgtggtgcaggtccagtgcatcaacaaaaaagtgggcactattatctaccatgaagtgcgaatagtggtgagagacaggaatgacaactcacccactttcaagcatgaaagctactatgccacagtgaatgagctcactccagttggtaccacaatattcacaggattttcaggagacaatggagctacagatatagatgatggaccaaatggacagatagagtatgttattcagtataatccagatgatccgacatccaatgacacctttgaaattcccctaatgttgactggaaatatagtgttaaggaagaggctcaactatgaagataagactcgctactttgtcataatccaagctaatgaccgtgcccaaaatctgaatgagaggcgaaccaccaccaccactctcacagtggatgttctggatggagatgacttgggtccaatgtttcttccttgtgtccttgtgccaaacactcgtgattgccgtccactcacttatcaagctgccatacctgagttgagaactccggatcttggatcgctatgttcaggaacaaattcctggtgccaaggtcgtagtggagtccattggagctcgccggcatggagatgccttttccctagaagattacaccaaatgtgacttgactgtctatgcaattgacccccaaaccaacagagccatcgatagaaatgagctttttaaatttttggatggcaaactacttgatatcaataaagactttcagccgtattatggggaaggaggacgcattctggagatccggactccagaggcagtgaccagcattaaaaagagaggagaaagtctaggatacacagaaggggccttgttggctctggccttcatcatcatcctctgctgcattcctgccatcttggtggttttggtcagctacagacagtttaaagtacgtcaagctgagtgtacaaagactgcacgaattcaggccgcattacccgcggctaaaccagcagtgccggctcctgcaccagtggcagcgcccccgccgccgccgccgcctccgccaggtgcgcatctctatgaagaacttggagacagctcaatgtatgaaatgcctcaatatgggagtcgccgtcgattgttaccaccagctggacaggaggaatatggtgaggtggttggtgaagctgaggaagaatatgaggaggaagaggaagagccaaagaaaattaaaaaaccaaaggttgaaattagagagcctagtgaggaggaagaagtagttgtaactatcgaaaaaccaccagcagctgagcctacatacacaacatggaagagagccagaatattccccatgatttttaagaaagttagaggattagctgataaaagaggaatcgttgaccttgagggtgaagagtggcagagacgccttgaggaagaagataaagattatttgaaactcactctggaccaagaggaagcaacagaaagcactgtagaatcagaggaggaatcctccagcgactatactgaatacagtgaagaagagtctgagttcagtgagtctgagactacagaagaggaatctgagtcagagacaccctctgaggaggaggagagttccacccctgaatcagaagaatcggaatccacagagtcagaaggagaaaaagcaaggaaaaacattgtgcttgcaagaagaaggcccatggttgaggaggtcaaggaagtcaagggtaggaaagaggagccacaagaagaacaaaaagaacctaagatggaagaagaagaacactcagaagaagaagaaagtggaccagcccctgtggaagaaagtacagaccctgaagctcaagatatccctgaagagggcagtgcagaatcagcttcggtggaaggaggtgtggaaagtgaggaggaatcagaatcaggtagtagtagcagtagtagcgaaagtcagtctggaggtccatggggctatcaggtaccagcgtatgacagaagcaagaatgcaaaccaaaagaagtcgccaggagcaaactctgaaggttacaacacagcactttgaaagagatcacagtaggtggaagttttgctgtgatgagtgctctcgtgtgcagtgccttctgtgtgttctccaaagtgacacttgaaagggaggaaattgatcaagattttgatatgacttatgatcagaagcatgccagaaaagtgaatatatatgttgtccaaatccatttgtatattagactgtattagagtaaaactgactaatccttcctatattagtaaatcagaacacatgcaatcagctaatcaatatttaatatttactggtaggatttttgttaatgcaatgtggcattatgtattatcagtgacactctgtctattggaatggatggcatatatatatatatatatatatacacacacacactatatatgtttttatatcatctttcaaaataaatactaagacaagcttcaacaaattatatctttaacagtcgtctacttttgcatatatgtacgtttcaactggcaaaggtattataaaaactatcatgaacatgttcaaataagtaagtttgtatctgcaacttcaagtattaggaattcaatgaaa

SEQ ID NO: 172237 - DNA, 6804 bp, Homo sapiens
  Payload ID: 13865
  Gene Symbol: PCDH15
  Gene Name: protocadherin-related 15
  ENST ID: ENST00000437009
  CDS Start-End: 396-6056
caacgtgctgagctaatagcgacagatagagggcagacagattcctgctagcagcttagtgttagttgcttgtggtaactaaggcaggtggcatacatctcagaacgtggagaatgatggtatgctttctgagttaacatgttgaactgttttgcttttctaaaaattttcctagtaacattttcttgatgatatgagagtggatatcaatgcctcacagaaacaagaggtggaacatgtgaatgaatcgtcttggaactagattatgagcactggttctttttaaagggatgtgcaagaggcagccttggcaagaaaacttgctgcataatcttacatggactaaagatgaaactttaaaccgcaaatcagctttgagtgaactttgacagaagatgtttcgacagttttatctctggacatgtttagcttcagggatcatcctgggctctctctttgaaatctgcttgggccagtatgatgatgattgcaaactagctaggggaggaccaccagctaccatagttgctattgatgaagaaagtcggaatggtacaattctggtggacaacatgctgatcaaagggactgctggaggaccagaccccaccatagaactttctttaaaggataatgtggattactgggtgttgatggatcctgttaagcaaatgcttttcctgaacagcaccggaagagttctggatagagatccaccgatgaacatacactccattgtggtgcaggtccagtgcatcaacaaaaaagtgggcactattatctaccatgaagtgcgaatagtggtgagagacaggaatgacaactcacccactttcaagcatgaaagctactatgccacagtgaatgagctcactccagttggtaccacaatattcacaggattttcaggagacaatggagctacagatatagatgatggaccaaatggacagatagagtatgttattcagtataatccagatgatccgacatccaatgacacctttgaaattcccctaatgttgactggaaatatagtgttaaggaagaggctcaactatgaagataagactcgctactttgtcataatccaagctaatgaccgtgcccaaaatctgaatgagaggcgaaccaccaccaccactctcacagtggatgttctggatggagatgacttgggtccaatgtttcttccttgtgtccttgtgccaaacactcgtgattgccgtccactcacttatcaagctgccatacctgagttgagaactccggaagaactgaaccccattattgttacgccaccaatccaagccattgatcaggaccggaatattcaaccgccatcagataggccaggaatcctctattccatccttgttgggactcctgaggattacccacgatttttccatatgcatcctaggacagcagaacttagtctcctggagccagtaaacagagactttcaccagaaatttgatttggttattaaggctgaacaagacaatggtcatcctcttcctgcctttgccggtctacacattgaaatactggatgaaaacaatcaaagtccatattttacaatgcccagttatcaaggctatatcctggaatctgccccagtgggagcaaccatttcggacagtctcaatttgacttcacctttaagaatagtagctctggacaaggacatagaagatacaaaagacccagagcttcacctttttctgaatgactacacctcagtcttcaccgtcacacagactggtattactcgctacctcaccttacttcaaccagtggacagggaagaacagcaaacttacaccttttcgataacagcatttgatggtgtacaagaaagtgagccagtcatcgtcaatattcaagtgatggatgcaaatgataacacgccaaccttccctgaaatatcctatgatgtgtatgtttatacagacatgagacctggggacagtgtcatacagctcactgcagtcgacgcagacgaagggtcaaatggggagatcacatatgaaatccttgttggggctcagggagacttcatcatcaataaaacaacagggcttatcaccatcgctccaggggtggaaatgatagtcgggcggacttacgcactcacggtccaagcagcggataatgctcctcctgcagagcgaagcacggggattctaaccttagggaaagcactggacagggaaagcactgatcgctacattctgatcatcacagcttcagatggcaggccagatgggacctcaactgccacagtaaacatagtggtgacagatgtcaatgacaatgctccagtgtttgatccttatctgccaagaaatttatctgtggtggaagaagaagccaatgcctttgtgggtcaagtaaaagcaacagaccctgatgctggaataaatggtcaagtgcactacagtttgggtaactttaataatctttttcgtatcacatccaatgggagcatttacacagcagtgaagcttaacagagaagtcagggactactatgaacttgttgttgtggcaacagatggagcagtacaccctcgtcattcaactctaaccttggccatcaaggttttggacattgatgataacagtcctgtgttcaccaattcaacatacactgtccttgttgaagagaatttgccagctgggactaccatccttcaaatagaggccaaagatgtcgaccttggagcaaatgtgtcttaccggataagaagcccagaagtgaagcacttttttgcactacatccatttacaggagaactatcgcttttaaggagtttagattatgaggcatttccagaccaagaagcaagtatcacttttctggtagaggcctttgatatttatggaacaatgccacctggtattgctactgtcacagtgattgtaaaggatatgaatgattatcctcctgtctttagtaaacgaatatacaaagggatggtggctccggatgcagtcaagggtacacctatcacaacagtttatgctgaagatgcagaccctcctggattacctgcaagtcgtgtgaggtatagagtagatgatgtacagtttccttaccctgccagtatttttgaagtggaagaagattctggaagagtaataacacgagtcaatcttaatgaagaacctacaacaatttttaagttggtggtggttgcttttgatgatggggagcctgtgatgtccagcagtgccacagtgaagattcttgtcttacatcctggtgagatcccacgcttcacacaggaggaatatagacctcctccagtaagtgaacttgccaccaaagggaccatggttggtgtaatttctgctgctgccattaatcaaagtattgtgtactccattgtttcaggaaatgaagaagatacatttggaattaataacatcacaggtgttatctatgtgaatggacctctggattatgagaccaggacaagctatgtacttcgagtccaagctgattccctggaagtggtccttgccaatctccgagttccttcaaaaagcaatacagctaaagtatacattgagattcaggatgaaaataatcatcccccagtgtttcagaaaaaattctacatcggaggtgtatctgaagatgcaagaatgtttacttctgtactcagagtgaaggctactgataaagatactggcaattatagtgtcatggcctacagactcataataccaccaattaaagagggaaaagaaggatttgtagtggaaacatatacagggcttatcaaaactgctatgctcttccataatatgaggagatcctacttcaagtttcaagttattgcaactgacgactatgggaagggactgagcggcaaagccgatgtactcgtctccgtggtcaatcagctggatatgcaagtcattgtttccaatgtgcctcctactctagtggaaaaaaagatagaagatcttacagagatcttggatcgctatgttcaggaacaaattcctggtgccaaggtcgtagtggagtccattggagctcgccggcatggagatgccttttccctagaagattacaccaaatgtgacttgactgtctatgcaattgacccccaaaccaacagagccatcgatagaaatgagctttttaaatttttggatggcaaactacttgatatcaataaagactttcagccgtattatggggaaggaggacgcattctggagatccggactccagaggcagtgaccagcattaaaaagagaggagaaagtctaggatacacagaaggggccttgttggctctggccttcatcatcatcctctgctgcattcctgccatcttggtggttttggtcagctacagacagtttaaagtacgtcaagctgagtgtacaaagactgcacgaattcaggccgcattacccgcggctaaaccagcagtgccggctcctgcaccagtggcagcgcccccgccgccgccgccgcctccgccaggtgcgcatctctatgaagaacttggagacagctcaatgcataatcttttccttctctaccattttcaacaaagcaggggaaataactcagtctcagaagacaggaaacatcaacaagttgtgatgcccttttcttccaatactattgaggctcacaagtcagctcatgtagacggatcacttaagagcaacaaactgaagtctgcaagaaaattcacatttctatctgatgaggatgacttaagtgcccataatcccctttataaggaaaacataagtcaagtatcaacaaattcagacatttcacagagaacagattttgtagacccattttcacccaaaatacaagccaagagtaagtctctgaggggcccaagagaaaagattcagaggctgtggagtcagtcagtcagcttacccaggaggctgatgaggaaagttccaaatagaccagagatcatagatctgcagcagtggcaaggcaccaggcagaaagctgaaaatgaaaacactggaatctgtacaaacaaaagaggtagcagcaatccattgcttacaactgaagaggcaaatttgacagagaaagaggaaataaggcaaggtgaaacactgatgatagaaggaacagaacagttgaaatctctctcttcagactcttcattttgctttcccaggcctcacttctcattctccactttgccaactgtttcaagaactgtggaactcaaatcagaacctaatgtcatcagttctcctgctgagtgttccttggaactttctccttcaaggccttgtgttttacattcttcactctctaggagagagacacctatttgtatgttacctattgaaaccgaaagaaatatttttgaaaattttgcccatccaccaaacatctctccttctgcctgtccccttccccctcctcctcctatttctcctccttctcctcctcctgctcctgctcctcttgctcctcctcctgacatttctcctttttctcttttttgtcctcctccctctcctccttctatccctcttcctcttcctcctcctacattttttccactttccgtttcaacgtctggtcccccaacaccacctcttctacctccatttccaactcctcttcctccaccacctccttctattccttgccctccacctccttcagcttcatttctgtccacagagtgtgtctgtataacaggtgttaaatgcacgaccaacttgatgcctgccgagaaaattaagtcctctatgacacagctatcaacaacgacagtgtgtaaaacagaccctcagagagaaccaaaaggcatcctcagacacgttaaaaacttagcagaacttgaaaaatcagtagctaacatgtacagtcaaatagaaaaaaactatctacgcacaaatgtttcagaacttcaaactatgtgcccttcagaagtaacaaatatggaaatcacatctgaacaaaacaaggggagtttgaacaatattgtcgagggaactgaaaaacaatctcacagtcaatctacttcactgtaatgttgcttttcttattttagtcgggcaaacctcttgttgatcatagtcttcaagttgaacatcaaatttgaacgtcaaagaagactctattattttaccccaaattcaatgaaatgcagttttttttctcgtttttaatttaaaaagatattaacctcatcactactaactcactcatataatagatttaccttactttttaaaaactacaaagtagcataatttgttctacatttatttgaaaagtaagtaattttaatctcttttttagtgggaatatgtgggcatgaaaattagatacccaacttaaaccaaaggcatgtctatcatgtggatgcagtaacatttacatttagtttttgatcgtagttttatatgaatgttccaagaaaaaagcagactgttacaaataagttaaaactgatatgattgataggttctgttttttcttgaagcctatgtatttggtaagaagaaatactaccgaagtaaaatataatgtacctagattgtaggagatgacagacataaggtatttcaaaataaatctcaggtgctataacatgtagtcatctgttttctgataagaacatcttttactctgacttgcttttatcttagtagtatgcttatggatttagtagtatgcttatggatttgataaatcttatactttttcagttgctgtcttattctctttatttctcattgtgctttcccttcccttctttataatgaaaataaatct

SEQ ID NO: 172238 - DNA, 6425 bp, Homo sapiens
  Payload ID: 13865
  Gene Symbol: PCDH15
  Gene Name: protocadherin-related 15
  ENST ID: ENST00000617271
  CDS Start-End: 396-5015
caacgtgctgagctaatagcgacagatagagggcagacagattcctgctagcagcttagtgttagttgcttgtggtaactaaggcaggtggcatacatctcagaacgtggagaatgatggtatgctttctgagttaacatgttgaactgttttgcttttctaaaaattttcctagtaacattttcttgatgatatgagagtggatatcaatgcctcacagaaacaagaggtggaacatgtgaatgaatcgtcttggaactagattatgagcactggttctttttaaagggatgtgcaagaggcagccttggcaagaaaacttgctgcataatcttacatggactaaagatgaaactttaaaccgcaaatcagctttgagtgaactttgacagaagatgtttcgacagttttatctctggacatgtttagcttcagggatcatcctgggctctctctttgaaatctgcttgggccagtatgatgatgattgcaaactagctaggggaggaccaccagctaccatagttgctattgatgaagaaagtcggaatggtacaattctggtggacaacatgctgatcaaagggactgctggaggaccagaccccaccatagaactttctttaaaggataatgtggattactgggtgttgatggatcctgttaagcaaatgcttttcctgaacagcaccggaagagttctggatagagatccaccgatgaacatacactccattgtggtgcaggtccagtgcatcaacaaaaaagtgggcactattatctaccatgaagtgcgaatagtggtgagagacaggaatgacaactcacccactttcaagcatgaaagctactatgccacagtgaatgagctcactccagttggtaccacaatattcacaggattttcaggagacaatggagctacagatatagatgatggaccaaatggacagatagagtatgttattcagtataatccagatgatccgacatccaatgacacctttgaaattcccctaatgttgactggaaatatagtgttaaggaagaggctcaactatgaagataagactcgctactttgtcataatccaagctaatgaccgtgcccaaaatctgaatgagaggcgaaccaccaccaccactctcacagtggatgttctggatggagatgacttgggtccaatgtttcttccttgtgtccttgtgccaaacactcgtgattgccgtccactcacttatcaagctgccatacctgagttgagaactccggaagaactgaaccccattattgttacgccaccaatccaagccattgatcaggaccggaatattcaaccgccatcagataggccaggaatcctctattccatccttgttgggactcctgaggattacccacgatttttccatatgcatcctaggacagcagaacttagtctcctggagccagtaaacagagactttcaccagaaatttgatttggttattaaggctgaacaagacaatggtcatcctcttcctgcctttgccggtctacacattgaaatactggatgaaaacaatcaaagtccatattttacaatgcccagttatcaaggctatatcctggaatctgccccagtgggagcaaccatttcggacagtctcaatttgacttcacctttaagaatagtagctctggacaaggacatagaagatacaaaagacccagagcttcacctttttctgaatgactacacctcagtcttcaccgtcacacagactggtattactcgctacctcaccttacttcaaccagtggacagggaagaacagcaaacttacaccttttcgataacagcatttgatggtgtacaagaaagtgagccagtcatcgtcaatattcaagtgatggatgcaaatgataacacgccaaccttccctgaaatatcctatgatgtgtatgtttatacagacatgagacctggggacagtgtcatacagctcactgcagtcgacgcagacgaagggtcaaatggggagatcacatatgaaatccttgttggggctcagggagacttcatcatcaataaaacaacagggcttatcaccatcgctccaggggtggaaatgatagtcgggcggacttacgcactcacggtccaagcagcggataatgctcctcctgcagagcgaaggaactccatctgcactgtgtatattgaagtgcttccaccaaataatcaaagccctcctcgcttcccacagctgatgtatagccttgaaattagtgaagccatgagggttggtgctgttttattaaatctacaggcaactgatcgagagggagactcaataacatatgccattgagaatggagatcctcagagagtttttaatctttcagaaaccacggggattctaaccttagggaaagcactggacagggaaagcactgatcgctacattctgatcatcacagcttcagatggcaggccagatgggacctcaactgccacagtaaacatagtggtgacagatgtcaatgacaatgctccagtgtttgatccttatctgccaagaaatttatctgtggtggaagaagaagccaatgcctttgtgggtcaagtaaaagcaacagaccctgatgctggaataaatggtcaagtgcactacagtttgggtaactttaataatctttttcgtatcacatccaatgggagcatttacacagcagtgaagcttaacagagaagtcagggactactatgaacttgttgttgtggcaacagatggagcagtacaccctcgtcattcaactctaaccttggccatcaaggttttggacattgatgataacagtcctgtgttcaccaattcaacatacactgtccttgttgaagagaatttgccagctgggactaccatccttcaaatagaggccaaagatgtcgaccttggagcaaatgtgtcttaccggataagaagcccagaagtgaagcacttttttgcactacatccatttacaggagaactatcgcttttaaggagtttagattatgaggcatttccagaccaagaagcaagtatcacttttctggtagaggcctttgatatttatggaacaatgccacctggtattgctactgtcacagtgattgtaaaggatatgaatgattatcctcctgtctttagtaaacgaatatacaaagggatggtggctccggatgcagtcaagggtacacctatcacaacagtttatgctgaagatgcagaccctcctggattacctgcaagtcgtgtgaggtatagagtagatgatgtacagtttccttaccctgccagtatttttgaagtggaagaagattctggaagagtaataacacgagtcaatcttaatgaagaacctacaacaatttttaagttggtggtggttgcttttgatgatggggagcctgtgatgtccagcagtgccacagtgaagattcttgtcttacatcctggtgagatcccacgcttcacacaggaggaatatagacctcctccagtaagtgaacttgccaccaaagggaccatggttggtgtaatttctgctgctgccattaatcaaagtattgtgtactccattgtttcaggaaatgaagaagatacatttggaattaataacatcacaggtgttatctatgtgaatggacctctggattatgagaccaggacaagctatgtacttcgagtccaagctgattccctggaagtggtccttgccaatctccgagttccttcaaaaagcaatacagctaaagtatacattgagattcaggatgaaaataatcatcccccagtgtttcagaaaaaattctacatcggaggtgtatctgaagatgcaagaatgtttacttctgtactcagagtgaaggctactgataaagatactggcaattatagtgtcatggcctacagactcataataccaccaattaaagagggaaaagaaggatttgtagtggaaacatatacagggcttatcaaaactgctatgctcttccataatatgaggagatcctacttcaagtttcaagttattgcaactgacgactatgggaagggactgagcggcaaagccgatgtactcgtctccgtggtcaatcagctggatatgcaagtcattgtttccaatgtgcctcctactctagtggaaaaaaagatagaagatcttacagagatcttggatcgctatgttcaggaacaaattcctggtgccaaggtcgtagtggagtccattggagctcgccggcatggagatgccttttccctagaagattacaccaaatgtgacttgactgtctatgcaattgacccccaaaccaacagagccatcgatagaaatgagctttttaaatttttggatggcaaactacttgatatcaataaagactttcagccgtattatggggaaggaggacgcattctggagatccggactccagaggcagtgaccagcattaaaaagagaggagaaagtctaggatacacagaaggggccttgttggctctggccttcatcatcatcctctgctgcattcctgccatcttggtggttttggtcagctacagacagtttaaagtacgtcaagctgagtgtacaaagactgcacgaattcaggccgcattacccgcggctaaaccagcagtgccggctcctgcaccagtggcagcgcccccgccgccgccgccgcctccgccaggtgcgcatctctatgaagaacttggagacagctcaatgcataagaattatccatggagtctggaattgatcctggccaggaatatggacaagattattacagttatgagcatgggtatgaaatgcctcaatatgggagtcgccgtcgattgttaccaccagctggacaggaggaatatggtgaggtggttggtgaagctgaggaagaatatgaggaggaagaggaagagccaaagaaaattaaaaaaccaaaggttgaaattagagagcctagtgaggaggaagaagtagttgtaactatcgaaaaaccaccagcagctgagcctacatacacaacatggaagagagccagaatattccccatgatttttaagaaagttagaggattagctgataaaagaggaatcgttgaccttgagggtgaagagtggcagagacgccttgaggaagaagataaagattatttgaaactcactctggaccaagaggaagcaacagaaagcactgtagaatcagaggaggaatcctccagcgactatactgaatacagtgaagaagagtctgagttcagtgagtctgagactacagaagaggaatctgagtcagagacaccctctgaggaggaggagagttccacccctgaatcagaagaatcggaatccacagagtcagaaggagaaaaagcaaggaaaaacattgtgcttgcaagaagaaggcccatggttgaggaggtcaaggaagtcaagggtaggaaagaggagccacaagaagaacaaaaagaacctaagatggaagaagaagaacactcagaagaagaagaaagtggaccagcccctgtggaagaaagtacagaccctgaagctcaagatatccctgaagagggcagtgcagaatcagcttcggtggaaggaggtgtggaaagtgaggaggaatcagaatcaggtagtagtagcagtagtagcgaaagtcagtctggaggtccatggggctatcaggtaccagcgtatgacagaagcaagaatgcaaaccaaaagaagtcgccaggagcaaactctgaaggttacaacacagcactttgaaagagatcacagtaggtggaagttttgctgtgatgagtgctctcgtgtgcagtgccttctgtgtgttctccaaagtgacacttgaaagggaggaaattgatcaagattttgatatgacttatgatcagaagcatgccagaaaagtgaatatatatgttgtccaaatccatttgtatattagactgtattagagtaaaactgactaatccttcctatattagtaaatcagaacacatgcaatcagctaatcaatatttaatatttactggtaggatttttgttaatgcaatgtggcattatgtattatcagtgacactctgtctattggaatggatggcatatatatatatatatatatatacacacacacactatatatgtttttatatcatctttcaaaataaatactaagacaagcttcaacaaattatatctttaacagtcgtctacttttgcatatatgtacgtttcaactggcaaaggtattataaaaactatcatgaacatgttcaaataagtaagtttgtatctgcaacttcaagtattaggaattcaatgaaataacatttttcaattaattaaaagttattacagcttattttctgttattattagctacagt

SEQ ID NO: 172239 - DNA, 9249 bp, Homo sapiens
  Payload ID: 13865
  Gene Symbol: PCDH15
  Gene Name: protocadherin-related 15
  ENST ID: ENST00000614895
  CDS Start-End: 396-5441
caacgtgctgagctaatagcgacagatagagggcagacagattcctgctagcagcttagtgttagttgcttgtggtaactaaggcaggtggcatacatctcagaacgtggagaatgatggtatgctttctgagttaacatgttgaactgttttgcttttctaaaaattttcctagtaacattttcttgatgatatgagagtggatatcaatgcctcacagaaacaagaggtggaacatgtgaatgaatcgtcttggaactagattatgagcactggttctttttaaagggatgtgcaagaggcagccttggcaagaaaacttgctgcataatcttacatggactaaagatgaaactttaaaccgcaaatcagctttgagtgaactttgacagaagatgtttcgacagttttatctctggacatgtttagcttcagggatcatcctgggctctctctttgaaatctgcttgggccagtatgatgatgactggcaatatgaggattgcaaactagctaggggaggaccaccagctaccatagttgctattgatgaagaaagtcggaatggtacaattctggtggacaacatgctgatcaaagggactgctggaggaccagaccccaccatagaactttctttaaaggataatgtggattactgggtgttgatggatcctgttaagcaaatgcttttcctgaacagcaccggaagagttctggatagagatccaccgatgaacatacactccattgtggtgcaggtccagtgcatcaacaaaaaagtgggcactattatctaccatgaagtgcgaatagtggtgagagacaggaatgacaactcacccactttcaagcatgaaagctactatgccacagtgaatgagctcactccagttggtaccacaatattcacaggattttcaggagacaatggagctacagatatagatgatggaccaaatggacagatagagtatgttattcagtataatccagatgatccgacatccaatgacacctttgaaattcccctaatgttgactggaaatatagtgttaaggaagaggctcaactatgaagataagactcgctactttgtcataatccaagctaatgaccgtgcccaaaatctgaatgagaggcgaaccaccaccaccactctcacagtggatgttctggatggagatgacttgggtccaatgtttcttccttgtgtccttgtgccaaacactcgtgattgccgtccactcacttatcaagctgccatacctgagttgagaactccggaagaactgaaccccattattgttacgccaccaatccaagccattgatcaggaccggaatattcaaccgccatcagataggccaggaatcctctattccatccttgttgggactcctgaggattacccacgatttttccatatgcatcctaggacagcagaacttagtctcctggagccagtaaacagagactttcaccagaaatttgatttggttattaaggctgaacaagacaatggtcatcctcttcctgcctttgccggtctacacattgaaatactggatgaaaacaatcaaagtccatattttacaatgcccagttatcaaggctatatcctggaatctgccccagtgggagcaaccatttcggacagtctcaatttgacttcacctttaagaatagtagctctggacaaggacatagaagatacaaaagacccagagcttcacctttttctgaatgactacacctcagtcttcaccgtcacacagactggtattactcgctacctcaccttacttcaaccagtggacagggaagaacagcaaacttacaccttttcgataacagcatttgatggtgtacaagaaagtgagccagtcatcgtcaatattcaagtgatggatgcaaatgataacacgccaaccttccctgaaatatcctatgatgtgtatgtttatacagacatgagacctggggacagtgtcatacagctcactgcagtcgacgcagacgaagggtcaaatggggagatcacatatgaaatccttgttggggctcagggagacttcatcatcaataaaacaacagggcttatcaccatcgctccaggggtggaaatgatagtcgggcggacttacgcactcacggtccaagcagcggataatgctcctcctgcagagcgaaggaactccatctgcactgtgtatattgaagtgcttccaccaaataatcaaagccctcctcgcttcccacagctgatgtatagccttgaaattagtgaagccatgagggttggtgctgttttattaaatctacaggcaactgatcgagagggagactcaataacatatgccattgagaatggagatcctcagagagtttttaatctttcagaaaccacggggattctaaccttagggaaagcactggacagggaaagcactgatcgctacattctgatcatcacagcttcagatggcaggccagatgggacctcaactgccacagtaaacatagtggtgacagatgtcaatgacaatgctccagtgtttgatccttatctgccaagaaatttatctgtggtggaagaagaagccaatgcctttgtgggtcaagtaaaagcaacagaccctgatgctggaataaatggtcaagtgcactacagtttgggtaactttaataatctttttcgtatcacatccaatgggagcatttacacagcagtgaagcttaacagagaagtcagggactactatgaacttgttgttgtggcaacagatggagcagtacaccctcgtcattcaactctaaccttggccatcaaggttttggacattgatgataacagtcctgtgttcaccaattcaacatacactgtccttgttgaagagaatttgccagctgggactaccatccttcaaatagaggccaaagatgtcgaccttggagcaaatgtgtcttaccggataagaagcccagaagtgaagcacttttttgcactacatccatttacaggagaactatcgcttttaaggagtttagattatgaggcatttccagaccaagaagcaagtatcacttttctggtagaggcctttgatatttatggaacaatgccacctggtattgctactgtcacagtgattgtaaaggatatgaatgattatcctcctgtctttagtaaacgaatatacaaagggatggtggctccggatgcagtcaagggtacacctatcacaacagtttatgctgaagatgcagaccctcctggattacctgcaagtcgtgtgaggtatagagtagatgatgtacagtttccttaccctgccagtatttttgaagtggaagaagattctggaagagtaataacacgagtcaatcttaatgaagaacctacaacaatttttaagttggtggtggttgcttttgatgatggggagcctgtgatgtccagcagtgccacagtgaagattcttgtcttacatcctggtgagatcccacgcttcacacaggaggaatatagacctcctccagtaagtgaacttgccaccaaagggaccatggttggtgtaatttctgctgctgccattaatcaaagtattgtgtactccattgtttcaggaaatgaagaagatacatttggaattaataacatcacaggtgttatctatgtgaatggacctctggattatgagaccaggacaagctatgtacttcgagtccaagctgattccctggaagtggtccttgccaatctccgagttccttcaaaaagcaatacagctaaagtatacattgagattcaggatgaaaataatcatcccccagtgtttcagaaaaaattctacatcggaggtgtatctgaagatgcaagaatgtttacttctgtactcagagtgaaggctactgataaagatactggcaattatagtgtcatggcctacagactcataataccaccaattaaagagggaaaagaaggatttgtagtggaaacatatacagggcttatcaaaactgctatgctcttccataatatgaggagatcctacttcaagtttcaagttattgcaactgacgactatgggaagggactgagcggcaaagccgatgtactcgtctccgtggtcaatcagctggatatgcaagtcattgtttccaatgtgcctcctactctagtggaaaaaaagatagaagatcttacagagatcttggatcgctatgttcaggaacaaattcctggtgccaaggtcgtagtggagtccattggagctcgccggcatggagatgccttttccctagaagattacaccaaatgtgacttgactgtctatgcaattgacccccaaaccaacagagccatcgatagaaatgagctttttaaatttttggatggcaaactacttgatatcaataaagactttcagccgtattatggggaaggaggacgcattctggagatccggactccagaggcagtgaccagcattaaaaagagaggagaaagtctaggatacacagaaggggccttgttggctctggccttcatcatcatcctctgctgcattcctgccatcttggtggttttggtcagctacagacaggtattcaagggacgtcaagctgagtgtacaaagactgcacgaattcaggccgcattacccgcggctaaaccagcagtgccggctcctgcaccagtggcagcgcccccgccgccgccgccgcctccgccaggtgcgcatctctatgaagaacttggagacagctcaatgtatgaaatgcctcaatatgggagtcgccgtcgattgttaccaccagctggacaggaggaatatggtgaggtggttggtgaagctgaggaagaatatgaggaggaagagtgggcaagaaaaagaatgatcaagttagttgttgatcgagagtatgaaaccagctcaactggagaagacagtgctcctgaatgtcagagaaaccgtcttcaccatcctagtatccacagtaatatcaacggcaatatatatattgcacagaatggttctgtggtgagaacccgccgtgcctgcctcacggacaacttaaaagttgcttcccctgttcgactgggagggccctttaagaaactagacaagttggcagtgacacatgaggagaatgtacctctgaacacattatcaaaggggccattttctactgaaaaaatgaatgcaagaccaactctggttacatttgccccttgccctgtggggactgacaatacagcggtgaagccactaaggaacaggctgaaaagcacagttgaacaggagtccatgattgacagtaagaacatcaaggaggctttggaatttcatagtgaccacacacagtctgatgatgaagagctttggatgggcccctggaacaacctccatataccaatgacaaaactgtgaccaattttttaaaagatattttaattaatttttacttacatttttaataaactgtgctttttattgtcactgagaaaacaatgtatggaatttatatcatgcacacaagctaaaactttgaacaatatgctttaaaattttaagagacagatttgcactcacattgttatcaattaatcgtttttcccagaaaatccttttggacatactttcactaaataacctatcgtttaaacatttagctgttttgttgggtcttgaatttttgttcattttaataaacaagaaataattactaaataatcatttatattttattgattaacatagattatgctttatttctagctccacaaaacatttttagtacatgtaattttattttccatagccaaaagggcaaaaaagaagtaagaggatatttacaggcaatgagtttatacagctgctgtctatactgccctaatttttaaaatgaaagctagaattgcaaagtaaagtaaatgagggaatcacctgtaaataattaattattttaaatcatgagcttgttttctttctttattgtcctgtataaaggttttcacattttaccataaatacatttatatcttgaccctttaggaaaccacttgaagtcgtatgtctttttatcaatattatttacaatattctcttgtcccttcatctcatatcaaatatggtagatactttagtttagtttaatcacttgaggttaaataattgtttggagcaacatggaaatctcacccttagcaaaagcttttagggaagtgagaaaggttcgagtaagcagtaatgcatctagaacgacaatttcataatggaagacatggtgaggttagggaagtctcacattaatgtcactagactttaatagtttgtaaacccagcatatcagagtaaaggaatttggcagggttgaaatgtatataatatataaagcttataaaggctatgaattcataacttcaaatgttgtgtttaacttcttccattttcaggttatttatagaatattttaatgcacatatttatgtgcctaaaatccagaaccaggaaatcattgcctgggcattttttaaaatcaaagaacatggtcttgattttttaccattgaacaaagcacagtgtttcatcataagtagaaatgaaaacagaatatcctttaaaaaacttgccttgtgtgttgcttattttccagatgatgtaaaaagaatgaaacaatatagattaagagaattcagaattctattgaatattacttagtatgatatagatgtagctcacttcaaattttgcacagtattgaccaagttcaggttttaatgaaatttcctcatgcatgcttaatatatggttgaaggactgaataatgcactattatttattcccctcttacatgtttcgcgtcttaaaaattgtttattattatgctatttcctcatttccaaagtgaatgaattgtactgacataaacttgccgacttgtaagagtagtatgtttttacttcagatttccaagaaaatatttgagatcaaatacagtaacatctcatctaccttattttattgagaattaatgcattccatacccttgccaaaaaaacaaaacaaaacaaacaaacaaaaaaaaacctagtggcattagctagattagaaacgtagaatcatgaccacacctcctggcctgccaaacaagcatccacattttcaaaagatcctaaggtggtttatatgcacattaaattttggaagcaatgaagtccggggcttattccttcaggcaccaaagcaatggtttttagtataggatactttgtataggaattagattaagcatatatttccctactaattcaatcagaggtcatcgaatataatttaatattatcttgatacccccagatcatctcagtcagcatcccttgatattctctctatatacagcttcatggctgcgtttttgtcctttgatttctggctgtgacatttaacttattctgttgttgtgcctttctcacatttttttctttcagtttatagcttctagtatcctgatgggaaagtttgtgttttttgtttgttttcttaatgttgaaaaatcatgaagcttaagatgggaattaggtacacggattcaaccaaatgttttgcgactcttagacgctttctttggttaccagtagatttggaaatatgatgttggcagaagtctagtggcctgacatatgagatgtcactgtattttaaactacattttttatgagaaaatatgcaaaattttacaagccacttagcagacacatttcagtaatttaaacttgatcatttcagtaaaaacaatcatgaggtcaatcatctgttacttaatggagatagtataaagagaagcagaatttacacagagcaaccaaaccaaatatttggtcagtatatttttgggtaacgtagagcagcaaaattattactaactaaataaatctggatcaattaaatagttactttcatagaactttcactagtctataaatccctgactcaggattaaaactgtggaacccagaggaaatacccaggtatgtttaatcttaagaatacttcatataaataacgtttcaatgtaaatatttataaagaaattggttgttatttttcctaggaaggtgtaggaaggttttcttgttgttctcaatcagcactagcttcaatcaggcagaagaaacagcaggtcttggctaatcgaggtgagaacagaatgatgtaatgactaatattgcaacccgttgattttagaaggtcttgtgggcattaagggaaagcagaggaagaatgagaaaatatggtcagagtgacataggacatttgtgacttaatgaccatcgaatcacaggtgttaatctccctctctcaatttgtctttctcattaattacagactctgagagttgtcatagaattgcaaccgtaggttggccaaaaccatctttttaaaatacagaagaaagtttgccttgaattttatatgtgatatgtcattcatgttattttaccacattgttcacagggatgttaaagactattatttacttaagtggttgttccaaaggtgattcagtagttaccattaaaatattatttaaaaacatttttatatcatagagccagaagtaattgaatattgactctcgagggaagacattttctgtcttttatttcatgagctttgatttttctctttctctgcttcaccttctgcactttataccttaagtgggatttatataccacttgaatttaattagcaaaataggcaaaaagtgctaataatctattctcagggcagatgcctattggtgcctgcaaattacacagcgataaggctgaaggataggttcaaaataatgttgaggacttacacattttatagatagtttctttctattcccaaatggtatgtgaaatttttgttctattttttttattggttttcaatagttaattttgatctttatcataagaagctttagttatagactggtatttttttcattgcaatctactttaaatttatggtcagttaagcacatgtatggaagattcgaacattgtctatagtttgaaaaatctatcaacaccttcactgctttcccaatttctttatccaaatacctgttcttccttaacaaatattatgttactgtataagaatctgaattagaagttttaagttaaaatgcattgttattcactacacaatgtttcaaaaataaattttcatttgaaaa

SEQ ID NO: 172240 - DNA, 1143 bp, Homo sapiens
  Payload ID: 13865
  Gene Symbol: PCDH15
  Gene Name: protocadherin-related 15
  ENST ID: ENST00000615043
  CDS Start-End: 1-113
gtatgaaatgcctcaatatgggagtcgccgtcgattgttaccaccagctggacaggaggaatatggtgaggtggttggtgaagctgaggaagaatatgaggaggaagaggtaattactgaagagccaaagaaaattaaaaaaccaaaggttgaaattagagagcctagtgaggaggaagaagtagttgtaactatcgaaaaaccaccagcagctgagcctacatacacaacatggaagagagccagaatattccccatgatttttaagaaagttagaggattagctgataaaagaggaatcgttgaccttgagggtgaagagtggcagagacgccttgaggaagaagataaagattatttgaaactcactctggaccaagaggaagcaacagaaagcactgtagaatcagaggaggaatcctccagcgactatactgaatacagtgaagaagagtctgagttcagtgagtctgagactacagaagaggaatctgagtcagagacaccctctgaggaggaggagagttccacccctgaatcagaagaatcggaatccacagagtcagaaggagaaaaagcaaggaaaaacattgtgcttgcaagaagaaggcccatggttgaggaggtcaaggaagtcaagggtaggaaagaggagccacaagaagaacaaaaagaacctaagatggaagaagaagaacactcagaagaagaagaaagtggaccagcccctgtggaagaaagtacagaccctgaagctcaagatatccctgaagagggcagtgcagaatcagcttcggtggaaggaggtgtggaaagtgaggaggaatcagaatcaggtagtagtagcagtagtagcgaaagtcagtctggaggtccatggggctatcaggtaccagcgtatgacagaagcaagaatgcaaaccaaaagaagtcgccaggagcaaactctgaaggttacaacacagcactttgaaagagatcacagtaggtggaagttttgctgtgatgagtgctctcgtgtgcagtgccttctgtgtgttctccaaagtgacacttgaaagggaggaaattgatcaagattttgatatgacttatgatcagaagcatgccagaaaagtgaatatatatgttgtccaaatccat

SEQ ID NO: 172241 - DNA, 1896 bp, Homo sapiens
  Payload ID: 13865
  Gene Symbol: PCDH15
  Gene Name: protocadherin-related 15
  ENST ID: ENST00000495484
  CDS Start-End: 392-1642
caacgtgctgagctaatagcgacagatagagggcagacagattcctgctagcagcttagtgttagttgcttgtggtaactaaggcaggtggcatacatctcagaacgtggagaatgatggtatgctttctgagttaacatgttgaactgttttgcttttctaaaaattttcctagtaacattttcttgatgatatgagagtggatatcaatgcctcacagaaacaagaggtggaacatgtgaatgaatcgtcttggaactagattatgagcactggttctttttaaagggatgtgcaagaggcagccttggcaagaaaacttgctgcataatcttacatggactaaagatgaaactttaaaccgcaagtctccgtggtcaatcagctggatatgcaagtcattgtttccaatgtgcctcctactctagtggaaaaaaagatagaagatcttacagagatcttggatcgctatgttcaggaacaaattcctggtgccaaggtcgtagtggagtccattggagctcgccggcatggagatgccttttccctagaagattacaccaaatgtgacttgactgtctatgcaattgacccccaaaccaacagagccatcgatagaaatgagctttttaaatttttggatggcaaactacttgatatcaataaagactttcagccgtattatggggaaggaggacgcattctggagatccggactccagaggcagtgaccagcattaaaaagagaggagaaagtctaggatacacagaaggggccttgttggctctggccttcatcatcatcctctgctgcattcctgccatcttggtggttttggtcagctacagacagagaggttatggatcagagcaacagcaactgctgaggccctctcttcttaaaccagaggaattatccatggagtctggaattgatcctggccaggaatatggacaagattattacagttatgagcatgggtatgaaatgcctcaatatgggagtcgccgtcgattgttaccaccagctggacaggaggaatatggtgaggtggttggtgaagctgaggaagaatatgaggaggaagagtgggcaagaaaaagaatgatcaagttagttgttgatcgagagtatgaaaccagctcaactggagaagacagtgctcctgaatgtcagagaaaccgtcttcaccatcctagtatccacagtaatatcaacggcaatatatatattgcacagaatggttctgtggtgagaacccgccgtgcctgcctcacggacaacttaaaagttgcttcccctgttcgactgggagggccctttaagaaactagacaagttggcagtgacacatgaggagaatgtacctctgaacacattatcaaaggggccattttctactgaaaaaatgaatgcaagaccaactctggttacatttgccccttgccctgtggggactgacaatacagcggtgaagccactaaggaacaggctgaaaagcacagttgaacaggagtccatgattgacagtaagaacatcaaggaggctttggaatttcatagtgaccacacacagtctgatgatgaagagctttggatgggcccctggaacaacctccatataccaatgacaaaactgtgaccaattttttaaaagatattttaattaatttttacttacatttttaataaactgtgctttttattgtcactgagaaaacaatgtatggaatttatatcatgcacacaagctaaaactttgaacaatatgctttaaaattttaagagacagatttgcactcacattgttatcaattaatcgtttttcccagaaaatccttttggacatactttcactaaataacctatcgtttaaacatttagctgttttgttgg

SEQ ID NO: 172242 - DNA, 580 bp, Homo sapiens
  Payload ID: 13865
  Gene Symbol: PCDH15
  Gene Name: protocadherin-related 15
  ENST ID: ENST00000613346
  CDS Start-End: 363-580
gctatcaggaggagcaaaagggaaggatctgctgctgggggctcgctgggtgaccctttgccagacgaaaagagctggtcgagagagaagcgcttggcaggagctctctgcgggacctaagctccgtggctgctcgggatccctacgtccgctgctgctgaaggagcagaggggaggacgccagcggttgcttactggagcctggaggaaaatggaaacatcattccctagaaacagttgaagttgacagacctagaggttgacaaaaggacacgacactagggaatttgcattgtcatgtttcgaaataccattccaaagacctgcaaataagatcagctttgagtgaactttgacagaagatgtttcgacagttttatctctggacatgtttagcttcagggatcatcctgggctctctctttgaaatctgcttgggccagtatgatgatggtacaattctggtggacaacatgctgatcaaagggactgctggaggaccagaccccaccatagaactttctttaaaggataatgtggattactgggtgttgatggatcctgttaagcaaatgctttt

SEQ ID NO: 172243 - DNA, 6820 bp, Homo sapiens
  Payload ID: 13865
  Gene Symbol: PCDH15
  Gene Name: protocadherin-related 15
  ENST ID: ENST00000622048
  CDS Start-End: 396-6062
caacgtgctgagctaatagcgacagatagagggcagacagattcctgctagcagcttagtgttagttgcttgtggtaactaaggcaggtggcatacatctcagaacgtggagaatgatggtatgctttctgagttaacatgttgaactgttttgcttttctaaaaattttcctagtaacattttcttgatgatatgagagtggatatcaatgcctcacagaaacaagaggtggaacatgtgaatgaatcgtcttggaactagattatgagcactggttctttttaaagggatgtgcaagaggcagccttggcaagaaaacttgctgcataatcttacatggactaaagatgaaactttaaaccgcaaatcagctttgagtgaactttgacagaagatgtttcgacagttttatctctggacatgtttagcttcagggatcatcctgggctctctctttgaaatctgcttgggccagtatgatgatgattgcaaactagctaggggaggaccaccagctaccatagttgctattgatgaagaaagtcggaatggtacaattctggtggacaacatgctgatcaaagggactgctggaggaccagaccccaccatagaactttctttaaaggataatgtggattactgggtgttgatggatcctgttaagcaaatgcttttcctgaacagcaccggaagagttctggatagagatccaccgatgaacatacactccattgtggtgcaggtccagtgcatcaacaaaaaagtgggcactattatctaccatgaagtgcgaatagtggtgagagacaggaatgacaactcacccactttcaagcatgaaagctactatgccacagtgaatgagctcactccagttggtaccacaatattcacaggattttcaggagacaatggagctacagatatagatgatggaccaaatggacagatagagtatgttattcagtataatccagatgatccgacatccaatgacacctttgaaattcccctaatgttgactggaaatatagtgttaaggaagaggctcaactatgaagataagactcgctactttgtcataatccaagctaatgaccgtgcccaaaatctgaatgagaggcgaaccaccaccaccactctcacagtggatgttctggatggagatgacttgggtccaatgtttcttccttgtgtccttgtgccaaacactcgtgattgccgtccactcacttatcaagctgccatacctgagttgagaactccggaagaactgaaccccattattgttacgccaccaatccaagccattgatcaggaccggaatattcaaccgccatcagataggccaggaatcctctattccatccttgttgggactcctgaggattacccacgatttttccatatgcatcctaggacagcagaacttagtctcctggagccagtaaacagagactttcaccagaaatttgatttggttattaaggctgaacaagacaatggtcatcctcttcctgcctttgccggtctacacattgaaatactggatgaaaacaatcaaagtccatattttacaatgcccagttatcaaggctatatcctggaatctgccccagtgggagcaaccatttcggacagtctcaatttgacttcacctttaagaatagtagctctggacaaggacatagaagatacaaaagacccagagcttcacctttttctgaatgactacacctcagtcttcaccgtcacacagactggtattactcgctacctcaccttacttcaaccagtggacagggaagaacagcaaacttacaccttttcgataacagcatttgatggtgtacaagaaagtgagccagtcatcgtcaatattcaagtgatggatgcaaatgataacacgccaaccttccctgaaatatcctatgatgtgtatgtttatacagacatgagacctggggacagtgtcatacagctcactgcagtcgacgcagacgaagggtcaaatggggagatcacatatgaaatccttgttggggctcagggagacttcatcatcaataaaacaacagggcttatcaccatcgctccaggggtggaaatgatagtcgggcggacttacgcactcacggtccaagcagcggataatgctcctcctgcagagcgaagcacggggattctaaccttagggaaagcactggacagggaaagcactgatcgctacattctgatcatcacagcttcagatggcaggccagatgggacctcaactgccacagtaaacatagtggtgacagatgtcaatgacaatgctccagtgtttgatccttatctgccaagaaatttatctgtggtggaagaagaagccaatgcctttgtgggtcaagtaaaagcaacagaccctgatgctggaataaatggtcaagtgcactacagtttgggtaactttaataatctttttcgtatcacatccaatgggagcatttacacagcagtgaagcttaacagagaagtcagggactactatgaacttgttgttgtggcaacagatggagcagtacaccctcgtcattcaactctaaccttggccatcaaggttttggacattgatgataacagtcctgtgttcaccaattcaacatacactgtccttgttgaagagaatttgccagctgggactaccatccttcaaatagaggccaaagatgtcgaccttggagcaaatgtgtcttaccggataagaagcccagaagtgaagcacttttttgcactacatccatttacaggagaactatcgcttttaaggagtttagattatgaggcatttccagaccaagaagcaagtatcacttttctggtagaggcctttgatatttatggaacaatgccacctggtattgctactgtcacagtgattgtaaaggatatgaatgattatcctcctgtctttagtaaacgaatatacaaagggatggtggctccggatgcagtcaagggtacacctatcacaacagtttatgctgaagatgcagaccctcctggattacctgcaagtcgtgtgaggtatagagtagatgatgtacagtttccttaccctgccagtatttttgaagtggaagaagattctggaagagtaataacacgagtcaatcttaatgaagaacctacaacaatttttaagttggtggtggttgcttttgatgatggggagcctgtgatgtccagcagtgccacagtgaagattcttgtcttacatcctggtgagatcccacgcttcacacaggaggaatatagacctcctccagtaagtgaacttgccaccaaagggaccatggttggtgtaatttctgctgctgccattaatcaaagtattgtgtactccattgtttcaggaaatgaagaagatacatttggaattaataacatcacaggtgttatctatgtgaatggacctctggattatgagaccaggacaagctatgtacttcgagtccaagctgattccctggaagtggtccttgccaatctccgagttccttcaaaaagcaatacagctaaagtatacattgagattcaggatgaaaataatcatcccccagtgtttcagaaaaaattctacatcggaggtgtatctgaagatgcaagaatgtttacttctgtactcagagtgaaggctactgataaagatactggcaattatagtgtcatggcctacagactcataataccaccaattaaagagggaaaagaaggatttgtagtggaaacatatacagggcttatcaaaactgctatgctcttccataatatgaggagatcctacttcaagtttcaagttattgcaactgacgactatgggaagggactgagcggcaaagccgatgtactcgtctccgtggtcaatcagctggatatgcaagtcattgtttccaatgtgcctcctactctagtggaaaaaaagatagaagatcttacagagatcttggatcgctatgttcaggaacaaattcctggtgccaaggtcgtagtggagtccattggagctcgccggcatggagatgccttttccctagaagattacaccaaatgtgacttgactgtctatgcaattgacccccaaaccaacagagccatcgatagaaatgagctttttaaatttttggatggcaaactacttgatatcaataaagactttcagccgtattatggggaaggaggacgcattctggagatccggactccagaggcagtgaccagcattaaaaagagaggagaaagtctaggatacacagaaggggccttgttggctctggccttcatcatcatcctctgctgcattcctgccatcttggtggttttggtcagctacagacaggtattcaagggacgtcaagctgagtgtacaaagactgcacgaattcaggccgcattacccgcggctaaaccagcagtgccggctcctgcaccagtggcagcgcccccgccgccgccgccgcctccgccaggtgcgcatctctatgaagaacttggagacagctcaattctttcaagtcttttccttctctaccattttcaacaaagcaggggaaataactcagtctcagaagacaggaaacatcaacaagttgtgatgcccttttcttccaatactattgaggctcacaagtcagctcatgtagacggatcacttaagagcaacaaactgaagtctgcaagaaaattcacatttctatctgatgaggatgacttaagtgcccataatcccctttataaggaaaacataagtcaagtatcaacaaattcagacatttcacagagaacagattttgtagacccattttcacccaaaatacaagccaagagtaagtctctgaggggcccaagagaaaagattcagaggctgtggagtcagtcagtcagcttacccaggaggctgatgaggaaagttccaaatagaccagagatcatagatctgcagcagtggcaaggcaccaggcagaaagctgaaaatgaaaacactggaatctgtacaaacaaaagaggtagcagcaatccattgcttacaactgaagaggcaaatttgacagagaaagaggaaataaggcaaggtgaaacactgatgatagaaggaacagaacagttgaaatctctctcttcagactcttcattttgctttcccaggcctcacttctcattctccactttgccaactgtttcaagaactgtggaactcaaatcagaacctaatgtcatcagttctcctgctgagtgttccttggaactttctccttcaaggccttgtgttttacattcttcactctctaggagagagacacctatttgtatgttacctattgaaaccgaaagaaatatttttgaaaattttgcccatccaccaaacatctctccttctgcctgtccccttccccctcctcctcctatttctcctccttctcctcctcctgctcctgctcctcttgctcctcctcctgacatttctcctttttctcttttttgtcctcctccctctcctccttctatccctcttcctcttcctcctcctacattttttccactttccgtttcaacgtctggtcccccaacaccacctcttctacctccatttccaactcctcttcctccaccacctccttctattccttgccctccacctccttcagcttcatttctgtccacagagtgtgtctgtataacaggtgttaaatgcacgaccaacttgatgcctgccgagaaaattaagtcctctatgacacagctatcaacaacgacagtgtgtaaaacagaccctcagagagaaccaaaaggcatcctcagacacgttaaaaacttagcagaacttgaaaaatcagtagctaacatgtacagtcaaatagaaaaaaactatctacgcacaaatgtttcagaacttcaaactatgtgcccttcagaagtaacaaatatggaaatcacatctgaacaaaacaaggggagtttgaacaatattgtcgagggaactgaaaaacaatctcacagtcaatctacttcactgtaatgttgcttttcttattttagtcgggcaaacctcttgttgatcatagtcttcaagttgaacatcaaatttgaacgtcaaagaagactctattattttaccccaaattcaatgaaatgcagttttttttctcgtttttaatttaaaaagatattaacctcatcactactaactcactcatataatagatttaccttactttttaaaaactacaaagtagcataatttgttctacatttatttgaaaagtaagtaattttaatctcttttttagtgggaatatgtgggcatgaaaattagatacccaacttaaaccaaaggcatgtctatcatgtggatgcagtaacatttacatttagtttttgatcgtagttttatatgaatgttccaagaaaaaagcagactgttacaaataagttaaaactgatatgattgataggttctgttttttcttgaagcctatgtatttggtaagaagaaatactaccgaagtaaaatataatgtacctagattgtaggagatgacagacataaggtatttcaaaataaatctcaggtgctataacatgtagtcatctgttttctgataagaacatcttttactctgacttgcttttatcttagtagtatgcttatggatttagtagtatgcttatggatttgataaatcttatactttttcagttgctgtcttattctctttatttctcattgtgctttcccttcccttctttataatgaaaataaatcttgagtcgttg

SEQ ID NO: 172244 - DNA, 1461 bp, Homo sapiens
  Payload ID: 13865
  Gene Symbol: PCDH15
  Gene Name: protocadherin-related 15
  ENST ID: ENST00000618301
  CDS Start-End: 1-1383
ctagtggaaaaaaagatagaagatcttacagagatcttggatcgctatgttcaggaacaaattcctggtgccaaggtcgtagtggagtccattggagctcgccggcatggagatgccttttccctagaagattacaccaaatgtgacttgactgtctatgcaattgacccccaaaccaacagagccatcgatagaaatgagctttttaaatttttggatggcaaactacttgatatcaataaagactttcagccgtattatggggaaggaggacgcattctggagatccggactccagaggcagtgaccagcattaaaaagagaggagaaagtctaggatacacagaaggggccttgttggctctggccttcatcatcatcctctgctgcattcctgccatcttggtggttttggtcagctacagacagtttaaagtacgtcaagctgagtgtacaaagactgcacgaattcaggccgcattacccgcggctaaaccagcagtgccggctcctgcaccagtggcagcgcccccgccgccgccgccgcctccgccaggtgcgcatctctatgaagaacttggagacagctcaatgagaggttatggatcagagcaacagcaactgctgaggccctctcttcttaaaccagaggaattatccatggagtctggaattgatcctggccaggaatatggacaagattattacagttatgagcatgggtatgaaatgcctcaatatgggagtcgccgtcgattgttaccaccagctggacaggaggaatatggtgaggtggttggtgaagctgaggaagaatatgaggaggaagagtgggcaagaaaaagaatgatcaagttagttgttgatcgagagtatgaaaccagctcaactggagaagacagtgctcctgaatgtcagagaaaccgtcttcaccatcctagtatccacagtaatatcaacggcaatatatatattgcacagaatggttctgtggtgagaacccgccgtgcctgcctcacggacaacttaaaagttgcttcccctgttcgactgggagggccctttaagaaactagacaagttggcagtgacacatgaggagaatgtacctctgaacacattatcaaaggggccattttctactgaaaaaatgaatgcaagaccaactctggttacatttgccccttgccctgtggggactgacaatacagcggtgaagccactaaggaacaggctgaaaagcacagttgaacaggagtccatgattgacagtaagaacatcaaggaggctttggaatttcatagtgaccacacacagtctgatgatgaagagctttggatgggcccctggaacaacctccatataccaatgacaaaactgtgaccaattttttaaaagatattttaattaatttttacttacatttttaataaactgtgctttttattgtcactgagaaaa

SEQ ID NO: 172245 - DNA, 6329 bp, Homo sapiens
  Payload ID: 13865
  Gene Symbol: PCDH15
  Gene Name: protocadherin-related 15
  ENST ID: ENST00000613657
  CDS Start-End: 396-5768
caacgtgctgagctaatagcgacagatagagggcagacagattcctgctagcagcttagtgttagttgcttgtggtaactaaggcaggtggcatacatctcagaacgtggagaatgatggtatgctttctgagttaacatgttgaactgttttgcttttctaaaaattttcctagtaacattttcttgatgatatgagagtggatatcaatgcctcacagaaacaagaggtggaacatgtgaatgaatcgtcttggaactagattatgagcactggttctttttaaagggatgtgcaagaggcagccttggcaagaaaacttgctgcataatcttacatggactaaagatgaaactttaaaccgcaaatcagctttgagtgaactttgacagaagatgtttcgacagttttatctctggacatgtttagcttcagggatcatcctgggctctctctttgaaatctgcttgggccagtatgatgatgactggcaatatgaggattgcaaactagctaggggaggaccaccagctaccatagttgctattgatgaagaaagtcggaatggtacaattctggtggacaacatgctgatcaaagggactgctggaggaccagaccccaccatagaactttctttaaaggataatgtggattactgggtgttgatggatcctgttaagcaaatgcttttcctgaacagcaccggaagagttctggatagagatccaccgatgaacatacactccattgtggtgcaggtccagtgcatcaacaaaaaagtgggcactattatctaccatgaagtgcgaatagtggtgagagacaggaatgacaactcacccactttcaagcatgaaagctactatgccacagtgaatgagctcactccagttggtaccacaatattcacaggattttcaggagacaatggagctacagatatagatgatggaccaaatggacagatagagtatgttattcagtataatccagatgatccgacatccaatgacacctttgaaattcccctaatgttgactggaaatatagtgttaaggaagaggctcaactatgaagataagactcgctactttgtcataatccaagctaatgaccgtgcccaaaatctgaatgagaggcgaaccaccaccaccactctcacagtggatgttctggatggagatgacttgggtccaatgtttcttccttgtgtccttgtgccaaacactcgtgattgccgtccactcacttatcaagctgccatacctgagttgagaactccggaagaactgaaccccattattgttacgccaccaatccaagccattgatcaggaccggaatattcaaccgccatcagataggccaggaatcctctattccatccttgttgggactcctgaggattacccacgatttttccatatgcatcctaggacagcagaacttagtctcctggagccagtaaacagagactttcaccagaaatttgatttggttattaaggctgaacaagacaatggtcatcctcttcctgcctttgccggtctacacattgaaatactggatgaaaacaatcaaagtccatattttacaatgcccagttatcaaggctatatcctggaatctgccccagtgggagcaaccatttcggacagtctcaatttgacttcacctttaagaatagtagctctggacaaggacatagaagatgttccacccagtggagttcctacaaaagacccagagcttcacctttttctgaatgactacacctcagtcttcaccgtcacacagactggtattactcgctacctcaccttacttcaaccagtggacagggaagaacagcaaacttacaccttttcgataacagcatttgatggtgtacaagaaagtgagccagtcatcgtcaatattcaagtgatggatgcaaatgataacacgccaaccttccctgaaatatcctatgatgtgtatgtttatacagacatgagacctggggacagtgtcatacagctcactgcagtcgacgcagacgaagggtcaaatggggagatcacatatgaaatccttgttggggctcagggagacttcatcatcaataaaacaacagggcttatcaccatcgctccaggggtggaaatgatagtcgggcggacttacgcactcacggtccaagcagcggataatgctcctcctgcagagcgaaggaactccatctgcactgtgtatattgaagtgcttccaccaaataatcaaagccctcctcgcttcccacagctgatgtatagccttgaaattagtgaagccatgagggttggtgctgttttattaaatctacaggcaactgatcgagagggagactcaataacatatgccattgagaatggagatcctcagagagtttttaatctttcagaaaccacggggattctaaccttagggaaagcactggacagggaaagcactgatcgctacattctgatcatcacagcttcagatggcaggccagatgggacctcaactgccacagtaaacatagtggtgacagatgtcaatgacaatgctccagtgtttgatccttatctgccaagaaatttatctgtggtggaagaagaagccaatgcctttgtgggtcaagtaaaagcaacagaccctgatgctggaataaatggtcaagtgcactacagtttgggtaactttaataatctttttcgtatcacatccaatgggagcatttacacagcagtgaagcttaacagagaagtcagggactactatgaacttgttgttgtggcaacagatggagcagtacaccctcgtcattcaactctaaccttggccatcaaggttttggacattgatgataacagtcctgtgttcaccaattcaacatacactgtccttgttgaagagaatttgccagctgggactaccatccttcaaatagaggccaaagatgtcgaccttggagcaaatgtgtcttaccggataagaagcccagaagtgaagcacttttttgcactacatccatttacaggagaactatcgcttttaaggagtttagattatgaggcatttccagaccaagaagcaagtatcacttttctggtagaggcctttgatatttatggaacaatgccacctggtattgctactgtcacagtgattgtaaaggatatgaatgattatcctcctgtctttagtaaacgaatatacaaagggatggtggctccggatgcagtcaagggtacacctatcacaacagtttatgctgaagatgcagaccctcctggattacctgcaagtcgtgtgaggtatagagtagatgatgtacagtttccttaccctgccagtatttttgaagtggaagaagattctggaagagtaataacacgagtcaatcttaatgaagaacctacaacaatttttaagttggtggtggttgcttttgatgatggggagcctgtgatgtccagcagtgccacagtgaagattcttgtcttacatcctggtgagatcccacgcttcacacaggaggaatatagacctcctccagtaagtgaacttgccaccaaagggaccatggttggtgtaatttctgctgctgccattaatcaaagtattgtgtactccattgtttcaggaaatgaagaagatacatttggaattaataacatcacaggtgttatctatgtgaatggacctctggattatgagaccaggacaagctatgtacttcgagtccaagctgattccctggaagtggtccttgccaatctccgagttccttcaaaaagcaatacagctaaagtatacattgagattcaggatgaaaataatcatcccccagtgtttcagaaaaaattctacatcggaggtgtatctgaagatgcaagaatgtttacttctgtactcagagtgaaggctactgataaagatactggcaattatagtgtcatggcctacagactcataataccaccaattaaagagggaaaagaaggatttgtagtggaaacatatacagggcttatcaaaactgctatgctcttccataatatgaggagatcctacttcaagtttcaagttattgcaactgacgactatgggaagggactgagcggcaaagccgatgtactcgtctccgtggtcaatcagctggatatgcaagtcattgtttccaatgtgcctcctactctagtggaaaaaaagatagaagatcttacagagatcttggatcgctatgttcaggaacaaattcctggtgccaaggtcgtagtggagtccattggagctcgccggcatggagatgccttttccctagaagattacaccaaatgtgacttgactgtctatgcaattgacccccaaaccaacagagccatcgatagaaatgagctttttaaatttttggatggcaaactacttgatatcaataaagactttcagccgtattatggggaaggaggacgcattctggagatccggactccagaggcagtgaccagcattaaaaagagaggagaaagtctaggatacacagaaggggccttgttggctctggccttcatcatcatcctctgctgcattcctgccatcttggtggttttggtcagctacagacagtttaaagtacgtcaagctgagtgtacaaagactgcacgaattcaggccgcattacccgcggctaaaccagcagtgccggctcctgcaccagtggcagcgcccccgccgccgccgccgcctccgccaggtgcgcatctctatgaagaacttggagacagctcaatgcataagtatgaaatgcctcaatatgggagtcgccgtcgattgttaccaccagctggacaggaggaatatggtgaggtggttggtgaagctgaggaagaatatgaggaggaagaggaagagccaaagaaaattaaaaaaccaaaggttgaaattagagagcctagtgaggaggaagaagtagttgtaactatcgaaaaaccaccagcagctgagcctacatacacaacatggaagagagccagaatattccccatgatttttaagaaagttagaggattagctgataaaagaggaatcgttgaccttgagggtgaagagtggcagagacgccttgaggaagaagataaagattatttgaaactcactctggaccaagaggaagcaacagaaagcactgtagaatcagaggaggaatcctccagcgactatactgaatacagtgaagaagagtctgagttcagtgagtctgagactacagaagaggaatctgagtcagagacaccctctgaggaggaggagagttccacccctgaatcagaagaatcggaatccacagagtcagaaggagaaaaagcaaggaaaaacattgtgcttgcaagaagaaggcccatggttgaggaggtcaaggaagtcaagggtaggaaagaggagccacaagaagaacaaaaagaacctaagatggaagaagaagaacactcagaagaagaagaaagtggaccagcccctgtggaagaaagtacagaccctgaagctcaagatatccctgaagagggcagtgcagaatcagcttcggtggaaggaggtgtggaaagtgaggaggaatcagaatcaggtagtagtagcagtagtagcgaaagtcagtctggaggtccatggggctatcaggtaccagcgtatgacagaagcaagaatgcaaaccaaaagaagtcgccaggagcaaactctgaaggttacaacacagcactttgaaagagatcacagtaggtggaagttttgctgtgatgagtgctctcgtgtgcagtgccttctgtgtgttctccaaagtgacacttgaaagggaggaaattgatcaagattttgatatgacttatgatcagaagcatgccagaaaagtgaatatatatgttgtccaaatccatttgtatattagactgtattagagtaaaactgactaatccttcctatattagtaaatcagaacacatgcaatcagctaatcaatatttaatatttactggtaggatttttgttaatgcaatgtggcattatgtattatcagtgacactctgtctattggaatggatggcatatatatatatatatatatatacacacacacactatatatgtttttatatcatctttcaaaataaatactaagacaagcttcaacaaattatatctttaacagtcgtctacttttgcatatatgtacgtttcaactggcaaaggtattataaaaactatcatgaacatgttcaaataagtaagtttgtatctgcaacttcaagtattaggaattcaatgaaa

SEQ ID NO: 172246 - DNA, 5765 bp, Homo sapiens
  Payload ID: 13865
  Gene Symbol: PCDH15
  Gene Name: protocadherin-related 15
  ENST ID: ENST00000612394
  CDS Start-End: 396-5765
caacgtgctgagctaatagcgacagatagagggcagacagattcctgctagcagcttagtgttagttgcttgtggtaactaaggcaggtggcatacatctcagaacgtggagaatgatggtatgctttctgagttaacatgttgaactgttttgcttttctaaaaattttcctagtaacattttcttgatgatatgagagtggatatcaatgcctcacagaaacaagaggtggaacatgtgaatgaatcgtcttggaactagattatgagcactggttctttttaaagggatgtgcaagaggcagccttggcaagaaaacttgctgcataatcttacatggactaaagatgaaactttaaaccgcaaatcagctttgagtgaactttgacagaagatgtttcgacagttttatctctggacatgtttagcttcagggatcatcctgggctctctctttgaaatctgcttgggccagtatgatgatgactggcaatatgaggattgcaaactagctaggggaggaccaccagctaccatagttgctattgatgaagaaagtcggaatggtacaattctggtggacaacatgctgatcaaagggactgctggaggaccagaccccaccatagaactttctttaaaggataatgtggattactgggtgttgatggatcctgttaagcaaatgcttttcctgaacagcaccggaagagttctggatagagatccaccgatgaacatacactccattgtggtgcaggtccagtgcatcaacaaaaaagtgggcactattatctaccatgaagtgcgaatagtggtgagagacaggaatgacaactcacccactttcaagcatgaaagctactatgccacagtgaatgagctcactccagttggtaccacaatattcacaggattttcaggagacaatggagctacagatatagatgatggaccaaatggacagatagagtatgttattcagtataatccagatgatccgacatccaatgacacctttgaaattcccctaatgttgactggaaatatagtgttaaggaagaggctcaactatgaagataagactcgctactttgtcataatccaagctaatgaccgtgcccaaaatctgaatgagaggcgaaccaccaccaccactctcacagtggatgttctggatggagatgacttgggtccaatgtttcttccttgtgtccttgtgccaaacactcgtgattgccgtccactcacttatcaagctgccatacctgagttgagaactccggaagaactgaaccccattattgttacgccaccaatccaagccattgatcaggaccggaatattcaaccgccatcagataggccaggaatcctctattccatccttgttgggactcctgaggattacccacgatttttccatatgcatcctaggacagcagaacttagtctcctggagccagtaaacagagactttcaccagaaatttgatttggttattaaggctgaacaagacaatggtcatcctcttcctgcctttgccggtctacacattgaaatactggatgaaaacaatcaaagtccatattttacaatgcccagttatcaaggctatatcctggaatctgccccagtgggagcaaccatttcggacagtctcaatttgacttcacctttaagaatagtagctctggacaaggacatagaagatgttccacccagtggagttcctacaaaagacccagagcttcacctttttctgaatgactacacctcagtcttcaccgtcacacagactggtattactcgctacctcaccttacttcaaccagtggacagggaagaacagcaaacttacaccttttcgataacagcatttgatggtgtacaagaaagtgagccagtcatcgtcaatattcaagtgatggatgcaaatgataacacgccaaccttccctgaaatatcctatgatgtgtatgtttatacagacatgagacctggggacagtgtcatacagctcactgcagtcgacgcagacgaagggtcaaatggggagatcacatatgaaatccttgttggggctcagggagacttcatcatcaataaaacaacagggcttatcaccatcgctccaggggtggaaatgatagtcgggcggacttacgcactcacggtccaagcagcggataatgctcctcctgcagagcgaaggaactccatctgcactgtgtatattgaagtgcttccaccaaataatcaaagccctcctcgcttcccacagctgatgtatagccttgaaattagtgaagccatgagggttggtgctgttttattaaatctacaggcaactgatcgagagggagactcaataacatatgccattgagaatggagatcctcagagagtttttaatctttcagaaaccacggggattctaaccttagggaaagcactggacagggaaagcactgatcgctacattctgatcatcacagcttcagatggcaggccagatgggacctcaactgccacagtaaacatagtggtgacagatgtcaatgacaatgctccagtgtttgatccttatctgccaagaaatttatctgtggtggaagaagaagccaatgcctttgtgggtcaagtaaaagcaacagaccctgatgctggaataaatggtcaagtgcactacagtttgggtaactttaataatctttttcgtatcacatccaatgggagcatttacacagcagtgaagcttaacagagaagtcagggactactatgaacttgttgttgtggcaacagatggagcagtacaccctcgtcattcaactctaaccttggccatcaaggttttggacattgatgataacagtcctgtgttcaccaattcaacatacactgtccttgttgaagagaatttgccagctgggactaccatccttcaaatagaggccaaagatgtcgaccttggagcaaatgtgtcttaccggataagaagcccagaagtgaagcacttttttgcactacatccatttacaggagaactatcgcttttaaggagtttagattatgaggcatttccagaccaagaagcaagtatcacttttctggtagaggcctttgatatttatggaacaatgccacctggtattgctactgtcacagtgattgtaaaggatatgaatgattatcctcctgtctttagtaaacgaatatacaaagggatggtggctccggatgcagtcaagggtacacctatcacaacagtttatgctgaagatgcagaccctcctggattacctgcaagtcgtgtgaggtatagagtagatgatgtacagtttccttaccctgccagtatttttgaagtggaagaagattctggaagagtaataacacgagtcaatcttaatgaagaacctacaacaatttttaagttggtggtggttgcttttgatgatggggagcctgtgatgtccagcagtgccacagtgaagattcttgtcttacatcctggtgagatcccacgcttcacacaggaggaatatagacctcctccagtaagtgaacttgccaccaaagggaccatggttggtgtaatttctgctgctgccattaatcaaagtattgtgtactccattgtttcaggaaatgaagaagatacatttggaattaataacatcacaggtgttatctatgtgaatggacctctggattatgagaccaggacaagctatgtacttcgagtccaagctgattccctggaagtggtccttgccaatctccgagttccttcaaaaagcaatacagctaaagtatacattgagattcaggatgaaaataatcatcccccagtgtttcagaaaaaattctacatcggaggtgtatctgaagatgcaagaatgtttacttctgtactcagagtgaaggctactgataaagatactggcaattatagtgtcatggcctacagactcataataccaccaattaaagagggaaaagaaggatttgtagtggaaacatatacagggcttatcaaaactgctatgctcttccataatatgaggagatcctacttcaagtttcaagttattgcaactgacgactatgggaagggactgagcggcaaagccgatgtactcgtctccgtggtcaatcagctggatatgcaagtcattgtttccaatgtgcctcctactctagtggaaaaaaagatagaagatcttacagagatcttggatcgctatgttcaggaacaaattcctggtgccaaggtcgtagtggagtccattggagctcgccggcatggagatgccttttccctagaagattacaccaaatgtgacttgactgtctatgcaattgacccccaaaccaacagagccatcgatagaaatgagctttttaaatttttggatggcaaactacttgatatcaataaagactttcagccgtattatggggaaggaggacgcattctggagatccggactccagaggcagtgaccagcattaaaaagagaggagaaagtctaggatacacagaaggggccttgttggctctggccttcatcatcatcctctgctgcattcctgccatcttggtggttttggtcagctacagacaggtattcaagggacgtcaagctgagtgtacaaagactgcacgaattcaggccgcattacccgcggctaaaccagcagtgccggctcctgcaccagtggcagcgcccccgccgccgccgccgcctccgccaggtgcgcatctctatgaagaacttggagacagctcaatgtatgaaatgcctcaatatgggagtcgccgtcgattgttaccaccagctggacaggaggaatatggtgaggtggttggtgaagctgaggaagaatatgaggaggaagaggaagagccaaagaaaattaaaaaaccaaaggttgaaattagagagcctagtgaggaggaagaagtagttgtaactatcgaaaaaccaccagcagctgagcctacatacacaacatggaagagagccagaatattccccatgatttttaagaaagttagaggattagctgataaaagaggaatcgttgaccttgagggtgaagagtggcagagacgccttgaggaagaagataaagattatttgaaactcactctggaccaagaggaagcaacagaaagcactgtagaatcagaggaggaatcctccagcgactatactgaatacagtgaagaagagtctgagttcagtgagtctgagactacagaagaggaatctgagtcagagacaccctctgaggaggaggagagttccacccctgaatcagaagaatcggaatccacagagtcagaaggagaaaaagcaaggaaaaacattgtgcttgcaagaagaaggcccatggttgaggaggtcaaggaagtcaagggtaggaaagaggagccacaagaagaacaaaaagaacctaagatggaagaagaagaacactcagaagaagaagaaagtggaccagcccctgtggaagaaagtacagaccctgaagctcaagatatccctgaagagggcagtgcagaatcagcttcggtggaaggaggtgtggaaagtgaggaggaatcagaatcaggtagtagtagcagtagtagcgaaagtcagtctggaggtccatggggctatcaggtaccagcgtatgacagaagcaagaatgcaaaccaaaagaagtcgccaggagcaaactctgaaggttacaacacagcactttga

SEQ ID NO: 172247 - DNA, 5846 bp, Homo sapiens
  Payload ID: 13865
  Gene Symbol: PCDH15
  Gene Name: protocadherin-related 15
  Uniprot ID: Q96QU1
  ENST ID: ENST00000616114
  CDS Start-End: 396-5423
caacgtgctgagctaatagcgacagatagagggcagacagattcctgctagcagcttagtgttagttgcttgtggtaactaaggcaggtggcatacatctcagaacgtggagaatgatggtatgctttctgagttaacatgttgaactgttttgcttttctaaaaattttcctagtaacattttcttgatgatatgagagtggatatcaatgcctcacagaaacaagaggtggaacatgtgaatgaatcgtcttggaactagattatgagcactggttctttttaaagggatgtgcaagaggcagccttggcaagaaaacttgctgcataatcttacatggactaaagatgaaactttaaaccgcaaatcagctttgagtgaactttgacagaagatgtttcgacagttttatctctggacatgtttagcttcagggatcatcctgggctctctctttgaaatctgcttgggccagtatgatgatgattgcaaactagctaggggaggaccaccagctaccatagttgctattgatgaagaaagtcggaatggtacaattctggtggacaacatgctgatcaaagggactgctggaggaccagaccccaccatagaactttctttaaaggataatgtggattactgggtgttgatggatcctgttaagcaaatgcttttcctgaacagcaccggaagagttctggatagagatccaccgatgaacatacactccattgtggtgcaggtccagtgcatcaacaaaaaagtgggcactattatctaccatgaagtgcgaatagtggtgagagacaggaatgacaactcacccactttcaagcatgaaagctactatgccacagtgaatgagctcactccagttggtaccacaatattcacaggattttcaggagacaatggagctacagatatagatgatggaccaaatggacagatagagtatgttattcagtataatccagatgatccgacatccaatgacacctttgaaattcccctaatgttgactggaaatatagtgttaaggaagaggctcaactatgaagataagactcgctactttgtcataatccaagctaatgaccgtgcccaaaatctgaatgagaggcgaaccaccaccaccactctcacagtggatgttctggatggagatgacttgggtccaatgtttcttccttgtgtccttgtgccaaacactcgtgattgccgtccactcacttatcaagctgccatacctgagttgagaactccggaagaactgaaccccattattgttacgccaccaatccaagccattgatcaggaccggaatattcaaccgccatcagataggccaggaatcctctattccatccttgttgggactcctgaggattacccacgatttttccatatgcatcctaggacagcagaacttagtctcctggagccagtaaacagagactttcaccagaaatttgatttggttattaaggctgaacaagacaatggtcatcctcttcctgcctttgccggtctacacattgaaatactggatgaaaacaatcaaagtccatattttacaatgcccagttatcaaggctatatcctggaatctgccccagtgggagcaaccatttcggacagtctcaatttgacttcacctttaagaatagtagctctggacaaggacatagaagatacaaaagacccagagcttcacctttttctgaatgactacacctcagtcttcaccgtcacacagactggtattactcgctacctcaccttacttcaaccagtggacagggaagaacagcaaacttacaccttttcgataacagcatttgatggtgtacaagaaagtgagccagtcatcgtcaatattcaagtgatggatgcaaatgataacacgccaaccttccctgaaatatcctatgatgtgtatgtttatacagacatgagacctggggacagtgtcatacagctcactgcagtcgacgcagacgaagggtcaaatggggagatcacatatgaaatccttgttggggctcagggagacttcatcatcaataaaacaacagggcttatcaccatcgctccaggggtggaaatgatagtcgggcggacttacgcactcacggtccaagcagcggataatgctcctcctgcagagcgaaggaactccatctgcactgtgtatattgaagtgcttccaccaaataatcaaagccctcctcgcttcccacagctgatgtatagccttgaaattagtgaagccatgagggttggtgctgttttattaaatctacaggcaactgatcgagagggagactcaataacatatgccattgagaatggagatcctcagagagtttttaatctttcagaaaccacggggattctaaccttagggaaagcactggacagggaaagcactgatcgctacattctgatcatcacagcttcagatggcaggccagatgggacctcaactgccacagtaaacatagtggtgacagatgtcaatgacaatgctccagtgtttgatccttatctgccaagaaatttatctgtggtggaagaagaagccaatgcctttgtgggtcaagtaaaagcaacagaccctgatgctggaataaatggtcaagtgcactacagtttgggtaactttaataatctttttcgtatcacatccaatgggagcatttacacagcagtgaagcttaacagagaagtcagggactactatgaacttgttgttgtggcaacagatggagcagtacaccctcgtcattcaactctaaccttggccatcaaggttttggacattgatgataacagtcctgtgttcaccaattcaacatacactgtccttgttgaagagaatttgccagctgggactaccatccttcaaatagaggccaaagatgtcgaccttggagcaaatgtgtcttaccggataagaagcccagaagtgaagcacttttttgcactacatccatttacaggagaactatcgcttttaaggagtttagattatgaggcatttccagaccaagaagcaagtatcacttttctggtagaggcctttgatatttatggaacaatgccacctggtattgctactgtcacagtgattgtaaaggatatgaatgattatcctcctgtctttagtaaacgaatatacaaagggatggtggctccggatgcagtcaagggtacacctatcacaacagtttatgctgaagatgcagaccctcctggattacctgcaagtcgtgtgaggtatagagtagatgatgtacagtttccttaccctgccagtatttttgaagtggaagaagattctggaagagtaataacacgagtcaatcttaatgaagaacctacaacaatttttaagttggtggtggttgcttttgatgatggggagcctgtgatgtccagcagtgccacagtgaagattcttgtcttacatcctggtgagatcccacgcttcacacaggaggaatatagacctcctccagtaagtgaacttgccaccaaagggaccatggttggtgtaatttctgctgctgccattaatcaaagtattgtgtactccattgtttcaggaaatgaagaagatacatttggaattaataacatcacaggtgttatctatgtgaatggacctctggattatgagaccaggacaagctatgtacttcgagtccaagctgattccctggaagtggtccttgccaatctccgagttccttcaaaaagcaatacagctaaagtatacattgagattcaggatgaaaataatcatcccccagtgtttcagaaaaaattctacatcggaggtgtatctgaagatgcaagaatgtttacttctgtactcagagtgaaggctactgataaagatactggcaattatagtgtcatggcctacagactcataataccaccaattaaagagggaaaagaaggatttgtagtggaaacatatacagggcttatcaaaactgctatgctcttccataatatgaggagatcctacttcaagtttcaagttattgcaactgacgactatgggaagggactgagcggcaaagccgatgtactcgtctccgtggtcaatcagctggatatgcaagtcattgtttccaatgtgcctcctactctagtggaaaaaaagatagaagatcttacagagatcttggatcgctatgttcaggaacaaattcctggtgccaaggtcgtagtggagtccattggagctcgccggcatggagatgccttttccctagaagattacaccaaatgtgacttgactgtctatgcaattgacccccaaaccaacagagccatcgatagaaatgagctttttaaatttttggatggcaaactacttgatatcaataaagactttcagccgtattatggggaaggaggacgcattctggagatccggactccagaggcagtgaccagcattaaaaagagaggagaaagtctaggatacacagaaggggccttgttggctctggccttcatcatcatcctctgctgcattcctgccatcttggtggttttggtcagctacagacagtttaaagtacgtcaagctgagtgtacaaagactgcacgaattcaggccgcattacccgcggctaaaccagcagtgccggctcctgcaccagtggcagcgcccccgccgccgccgccgcctccgccaggtgcgcatctctatgaagaacttggagacagctcaatgtatgaaatgcctcaatatgggagtcgccgtcgattgttaccaccagctggacaggaggaatatggtgaggtggttggtgaagctgaggaagaatatgaggaggaagagtgggcaagaaaaagaatgatcaagttagttgttgatcgagagtatgaaaccagctcaactggagaagacagtgctcctgaatgtcagagaaaccgtcttcaccatcctagtatccacagtaatatcaacggcaatatatatattgcacagaatggttctgtggtgagaacccgccgtgcctgcctcacggacaacttaaaagttgcttcccctgttcgactgggagggccctttaagaaactagacaagttggcagtgacacatgaggagaatgtacctctgaacacattatcaaaggggccattttctactgaaaaaatgaatgcaagaccaactctggttacatttgccccttgccctgtggggactgacaatacagcggtgaagccactaaggaacaggctgaaaagcacagttgaacaggagtccatgattgacagtaagaacatcaaggaggctttggaatttcatagtgaccacacacagtctgatgatgaagagctttggatgggcccctggaacaacctccatataccaatgacaaaactgtgaccaattttttaaaagatattttaattaatttttacttacatttttaataaactgtgctttttattgtcactgagaaaacaatgtatggaatttatatcatgcacacaagctaaaactttgaacaatatgctttaaaattttaagagacagatttgcactcacattgttatcaattaatcgtttttcccagaaaatccttttggacatactttcactaaataacctatcgtttaaacatttagctgttttgttgggtcttgaatttttgttcattttaataaacaagaaataattactaaataatcatttatattttattgattaacatagattatgctttatttctagctccacaaaacatttttagtacatgtaattttattttccatagccaaaagggcaaaaaagaagtaagaggatatt

SEQ ID NO: 172248 - DNA, 5700 bp, Homo sapiens
  Payload ID: 13865
  Gene Symbol: PCDH15
  Gene Name: protocadherin-related 15
  ENST ID: ENST00000621708
  CDS Start-End: 396-5444
caacgtgctgagctaatagcgacagatagagggcagacagattcctgctagcagcttagtgttagttgcttgtggtaactaaggcaggtggcatacatctcagaacgtggagaatgatggtatgctttctgagttaacatgttgaactgttttgcttttctaaaaattttcctagtaacattttcttgatgatatgagagtggatatcaatgcctcacagaaacaagaggtggaacatgtgaatgaatcgtcttggaactagattatgagcactggttctttttaaagggatgtgcaagaggcagccttggcaagaaaacttgctgcataatcttacatggactaaagatgaaactttaaaccgcaaatcagctttgagtgaactttgacagaagatgtttcgacagttttatctctggacatgtttagcttcagggatcatcctgggctctctctttgaaatctgcttgggccagtatgatgatgactggcaatatgaggattgcaaactagctaggggaggaccaccagctaccatagttgctattgatgaagaaagtcggaatggtacaattctggtggacaacatgctgatcaaagggactgctggaggaccagaccccaccatagaactttctttaaaggataatgtggattactgggtgttgatggatcctgttaagcaaatgcttttcctgaacagcaccggaagagttctggatagagatccaccgatgaacatacactccattgtggtgcaggtccagtgcatcaacaaaaaagtgggcactattatctaccatgaagtgcgaatagtggtgagagacaggaatgacaactcacccactttcaagcatgaaagctactatgccacagtgaatgagctcactccagttggtaccacaatattcacaggattttcaggagacaatggagctacagatatagatgatggaccaaatggacagatagagtatgttattcagtataatccagatgatccgacatccaatgacacctttgaaattcccctaatgttgactggaaatatagtgttaaggaagaggctcaactatgaagataagactcgctactttgtcataatccaagctaatgaccgtgcccaaaatctgaatgagaggcgaaccaccaccaccactctcacagtggatgttctggatggagatgacttgggtccaatgtttcttccttgtgtccttgtgccaaacactcgtgattgccgtccactcacttatcaagctgccatacctgagttgagaactccggaagaactgaaccccattattgttacgccaccaatccaagccattgatcaggaccggaatattcaaccgccatcagataggccaggaatcctctattccatccttgttgggactcctgaggattacccacgatttttccatatgcatcctaggacagcagaacttagtctcctggagccagtaaacagagactttcaccagaaatttgatttggttattaaggctgaacaagacaatggtcatcctcttcctgcctttgccggtctacacattgaaatactggatgaaaacaatcaaagtccatattttacaatgcccagttatcaaggctatatcctggaatctgccccagtgggagcaaccatttcggacagtctcaatttgacttcacctttaagaatagtagctctggacaaggacatagaagatacaaaagacccagagcttcacctttttctgaatgactacacctcagtcttcaccgtcacacagactggtattactcgctacctcaccttacttcaaccagtggacagggaagaacagcaaacttacaccttttcgataacagcatttgatggtgtacaagaaagtgagccagtcatcgtcaatattcaagtgatggatgcaaatgataacacgccaaccttccctgaaatatcctatgatgtgtatgtttatacagacatgagacctggggacagtgtcatacagctcactgcagtcgacgcagacgaagggtcaaatggggagatcacatatgaaatccttgttggggctcagggagacttcatcatcaataaaacaacagggcttatcaccatcgctccaggggtggaaatgatagtcgggcggacttacgcactcacggtccaagcagcggataatgctcctcctgcagagcgaaggaactccatctgcactgtgtatattgaagtgcttccaccaaataatcaaagccctcctcgcttcccacagctgatgtatagccttgaaattagtgaagccatgagggttggtgctgttttattaaatctacaggcaactgatcgagagggagactcaataacatatgccattgagaatggagatcctcagagagtttttaatctttcagaaaccacggggattctaaccttagggaaagcactggacagggaaagcactgatcgctacattctgatcatcacagcttcagatggcaggccagatgggacctcaactgccacagtaaacatagtggtgacagatgtcaatgacaatgctccagtgtttgatccttatctgccaagaaatttatctgtggtggaagaagaagccaatgcctttgtgggtcaagtaaaagcaacagaccctgatgctggaataaatggtcaagtgcactacagtttgggtaactttaataatctttttcgtatcacatccaatgggagcatttacacagcagtgaagcttaacagagaagtcagggactactatgaacttgttgttgtggcaacagatggagcagtacaccctcgtcattcaactctaaccttggccatcaaggttttggacattgatgataacagtcctgtgttcaccaattcaacatacactgtccttgttgaagagaatttgccagctgggactaccatccttcaaatagaggccaaagatgtcgaccttggagcaaatgtgtcttaccggataagaagcccagaagtgaagcacttttttgcactacatccatttacaggagaactatcgcttttaaggagtttagattatgaggcatttccagaccaagaagcaagtatcacttttctggtagaggcctttgatatttatggaacaatgccacctggtattgctactgtcacagtgattgtaaaggatatgaatgattatcctcctgtctttagtaaacgaatatacaaagggatggtggctccggatgcagtcaagggtacacctatcacaacagtttatgctgaagatgcagaccctcctggattacctgcaagtcgtgtgaggtatagagtagatgatgtacagtttccttaccctgccagtatttttgaagtggaagaagattctggaagagtaataacacgagtcaatcttaatgaagaacctacaacaatttttaagttggtggtggttgcttttgatgatggggagcctgtgatgtccagcagtgccacagtgaagattcttgtcttacatcctggtgagatcccacgcttcacacaggaggaatatagacctcctccagtaagtgaacttgccaccaaagggaccatggttggtgtaatttctgctgctgccattaatcaaagtattgtgtactccattgtttcaggaaatgaagaagatacatttggaattaataacatcacaggtgttatctatgtgaatggacctctggattatgagaccaggacaagctatgtacttcgagtccaagctgattccctggaagtggtccttgccaatctccgagttccttcaaaaagcaatacagctaaagtatacattgagattcaggatgaaaataatcatcccccagtgtttcagaaaaaattctacatcggaggtgtatctgaagatgcaagaatgtttacttctgtactcagagtgaaggctactgataaagatactggcaattatagtgtcatggcctacagactcataataccaccaattaaagagggaaaagaaggatttgtagtggaaacatatacagggcttatcaaaactgctatgctcttccataatatgaggagatcctacttcaagtttcaagttattgcaactgacgactatgggaagggactgagcggcaaagccgatgtactcgtctccgtggtcaatcagctggatatgcaagtcattgtttccaatgtgcctcctactctagtggaaaaaaagatagaagatcttacagagatcttggatcgctatgttcaggaacaaattcctggtgccaaggtcgtagtggagtccattggagctcgccggcatggagatgccttttccctagaagattacaccaaatgtgacttgactgtctatgcaattgacccccaaaccaacagagccatcgatagaaatgagctttttaaatttttggatggcaaactacttgatatcaataaagactttcagccgtattatggggaaggaggacgcattctggagatccggactccagaggcagtgaccagcattaaaaagagaggagaaagtctaggatacacagaaggggccttgttggctctggccttcatcatcatcctctgctgcattcctgccatcttggtggttttggtcagctacagacagtttaaagtacgtcaagctgagtgtacaaagactgcacgaattcaggccgcattacccgcggctaaaccagcagtgccggctcctgcaccagtggcagcgcccccgccgccgccgccgcctccgccaggtgcgcatctctatgaagaacttggagacagctcaatgcataagtatgaaatgcctcaatatgggagtcgccgtcgattgttaccaccagctggacaggaggaatatggtgaggtggttggtgaagctgaggaagaatatgaggaggaagagtgggcaagaaaaagaatgatcaagttagttgttgatcgagagtatgaaaccagctcaactggagaagacagtgctcctgaatgtcagagaaaccgtcttcaccatcctagtatccacagtaatatcaacggcaatatatatattgcacagaatggttctgtggtgagaacccgccgtgcctgcctcacggacaacttaaaagttgcttcccctgttcgactgggagggccctttaagaaactagacaagttggcagtgacacatgaggagaatgtacctctgaacacattatcaaaggggccattttctactgaaaaaatgaatgcaagaccaactctggttacatttgccccttgccctgtggggactgacaatacagcggtgaagccactaaggaacaggctgaaaagcacagttgaacaggagtccatgattgacagtaagaacatcaaggaggctttggaatttcatagtgaccacacacagtctgatgatgaagagctttggatgggcccctggaacaacctccatataccaatgacaaaactgtgaccaattttttaaaagatattttaattaatttttacttacatttttaataaactgtgctttttattgtcactgagaaaacaatgtatggaatttatatcatgcacacaagctaaaactttgaacaatatgctttaaaattttaagagacagatttgcactcacattgttatcaattaatcgtttttcccagaaaatccttttggacatactttcactaaataacctatcgtttaaacatttagctgttttgttgggt

SEQ ID NO: 172249 - DNA, 7048 bp, Homo sapiens
  Payload ID: 13865
  Gene Symbol: PCDH15
  Gene Name: protocadherin-related 15
  ENST ID: ENST00000617051
  CDS Start-End: 396-6290
caacgtgctgagctaatagcgacagatagagggcagacagattcctgctagcagcttagtgttagttgcttgtggtaactaaggcaggtggcatacatctcagaacgtggagaatgatggtatgctttctgagttaacatgttgaactgttttgcttttctaaaaattttcctagtaacattttcttgatgatatgagagtggatatcaatgcctcacagaaacaagaggtggaacatgtgaatgaatcgtcttggaactagattatgagcactggttctttttaaagggatgtgcaagaggcagccttggcaagaaaacttgctgcataatcttacatggactaaagatgaaactttaaaccgcaaatcagctttgagtgaactttgacagaagatgtttcgacagttttatctctggacatgtttagcttcagggatcatcctgggctctctctttgaaatctgcttgggccagtatgatgatgactggcaatatgaggattgcaaactagctaggggaggaccaccagctaccatagttgctattgatgaagaaagtcggaatggtacaattctggtggacaacatgctgatcaaagggactgctggaggaccagaccccaccatagaactttctttaaaggataatgtggattactgggtgttgatggatcctgttaagcaaatgcttttcctgaacagcaccggaagagttctggatagagatccaccgatgaacatacactccattgtggtgcaggtccagtgcatcaacaaaaaagtgggcactattatctaccatgaagtgcgaatagtggtgagagacaggaatgacaactcacccactttcaagcatgaaagctactatgccacagtgaatgagctcactccagttggtaccacaatattcacaggattttcaggagacaatggagctacagatatagatgatggaccaaatggacagatagagtatgttattcagtataatccagatgatccgacatccaatgacacctttgaaattcccctaatgttgactggaaatatagtgttaaggaagaggctcaactatgaagataagactcgctactttgtcataatccaagctaatgaccgtgcccaaaatctgaatgagaggcgaaccaccaccaccactctcacagtggatgttctggatggagatgacttgggtccaatgtttcttccttgtgtccttgtgccaaacactcgtgattgccgtccactcacttatcaagctgccatacctgagttgagaactccggaagaactgaaccccattattgttacgccaccaatccaagccattgatcaggaccggaatattcaaccgccatcagataggccaggaatcctctattccatccttgttgggactcctgaggattacccacgatttttccatatgcatcctaggacagcagaacttagtctcctggagccagtaaacagagactttcaccagaaatttgatttggttattaaggctgaacaagacaatggtcatcctcttcctgcctttgccggtctacacattgaaatactggatgaaaacaatcaaagtccatattttacaatgcccagttatcaaggctatatcctggaatctgccccagtgggagcaaccatttcggacagtctcaatttgacttcacctttaagaatagtagctctggacaaggacatagaagatacaaaagacccagagcttcacctttttctgaatgactacacctcagtcttcaccgtcacacagactggtattactcgctacctcaccttacttcaaccagtggacagggaagaacagcaaacttacaccttttcgataacagcatttgatggtgtacaagaaagtgagccagtcatcgtcaatattcaagtgatggatgcaaatgataacacgccaaccttccctgaaatatcctatgatgtgtatgtttatacagacatgagacctggggacagtgtcatacagctcactgcagtcgacgcagacgaagggtcaaatggggagatcacatatgaaatccttgttggggctcagggagacttcatcatcaataaaacaacagggcttatcaccatcgctccaggggtggaaatgatagtcgggcggacttacgcactcacggtccaagcagcggataatgctcctcctgcagagcgaaggaactccatctgcactgtgtatattgaagtgcttccaccaaataatcaaagccctcctcgcttcccacagctgatgtatagccttgaaattagtgaagccatgagggttggtgctgttttattaaatctacaggcaactgatcgagagggagactcaataacatatgccattgagaatggagatcctcagagagtttttaatctttcagaaaccacggggattctaaccttagggaaagcactggacagggaaagcactgatcgctacattctgatcatcacagcttcagatggcaggccagatgggacctcaactgccacagtaaacatagtggtgacagatgtcaatgacaatgctccagtgtttgatccttatctgccaagaaatttatctgtggtggaagaagaagccaatgcctttgtgggtcaagtaaaagcaacagaccctgatgctggaataaatggtcaagtgcactacagtttgggtaactttaataatctttttcgtatcacatccaatgggagcatttacacagcagtgaagcttaacagagaagtcagggactactatgaacttgttgttgtggcaacagatggagcagtacaccctcgtcattcaactctaaccttggccatcaaggttttggacattgatgataacagtcctgtgttcaccaattcaacatacactgtccttgttgaagagaatttgccagctgggactaccatccttcaaatagaggccaaagatgtcgaccttggagcaaatgtgtcttaccggataagaagcccagaagtgaagcacttttttgcactacatccatttacaggagaactatcgcttttaaggagtttagattatgaggcatttccagaccaagaagcaagtatcacttttctggtagaggcctttgatatttatggaacaatgccacctggtattgctactgtcacagtgattgtaaaggatatgaatgattatcctcctgtctttagtaaacgaatatacaaagggatggtggctccggatgcagtcaagggtacacctatcacaacagtttatgctgaagatgcagaccctcctggattacctgcaagtcgtgtgaggtatagagtagatgatgtacagtttccttaccctgccagtatttttgaagtggaagaagattctggaagagtaataacacgagtcaatcttaatgaagaacctacaacaatttttaagttggtggtggttgcttttgatgatggggagcctgtgatgtccagcagtgccacagtgaagattcttgtcttacatcctggtgagatcccacgcttcacacaggaggaatatagacctcctccagtaagtgaacttgccaccaaagggaccatggttggtgtaatttctgctgctgccattaatcaaagtattgtgtactccattgtttcaggaaatgaagaagatacatttggaattaataacatcacaggtgttatctatgtgaatggacctctggattatgagaccaggacaagctatgtacttcgagtccaagctgattccctggaagtggtccttgccaatctccgagttccttcaaaaagcaatacagctaaagtatacattgagattcaggatgaaaataatcatcccccagtgtttcagaaaaaattctacatcggaggtgtatctgaagatgcaagaatgtttacttctgtactcagagtgaaggctactgataaagatactggcaattatagtgtcatggcctacagactcataataccaccaattaaagagggaaaagaaggatttgtagtggaaacatatacagggcttatcaaaactgctatgctcttccataatatgaggagatcctacttcaagtttcaagttattgcaactgacgactatgggaagggactgagcggcaaagccgatgtactcgtctccgtggtcaatcagctggatatgcaagtcattgtttccaatgtgcctcctactctagtggaaaaaaagatagaagatcttacagagatcttggatcgctatgttcaggaacaaattcctggtgccaaggtcgtagtggagtccattggagctcgccggcatggagatgccttttccctagaagattacaccaaatgtgacttgactgtctatgcaattgacccccaaaccaacagagccatcgatagaaatgagctttttaaatttttggatggcaaactacttgatatcaataaagactttcagccgtattatggggaaggaggacgcattctggagatccggactccagaggcagtgaccagcattaaaaagagaggagaaagtctaggatacacagaaggggccttgttggctctggccttcatcatcatcctctgctgcattcctgccatcttggtggttttggtcagctacagacaggtattcaagggacgtcaagctgagtgtacaaagactgcacgaattcaggccgcattacccgcggctaaaccagcagtgccggctcctgcaccagtggcagcgcccccgccgccgccgccgcctccgccaggtgcgcatctctatgaagaacttggagacagctcaattctttcaagtcttttccttctctaccattttcaacaaagcaggggaaataactcagtctcagaagacaggaaacatcaacaagttgtgatgcccttttcttccaatactattgaggctcacaagtcagctcatgtagacggatcacttaagagcaacaaactgaagtctgcaagaaaattcacatttctatctgatgaggatgacttaagtgcccataatcccctttataaggaaaacataagtcaagtatcaacaaattcagacatttcacagagaacagattttgtagacccattttcacccaaaatacaagccaagagtaagtctctgaggggcccaagagaaaagattcagaggctgtggagtcagtcagtcagcttacccaggaggctgatgaggaaagttccaaatagaccagagatcatagatctgcagcagtggcaaggcaccaggcagaaagctgaaaatgaaaacactggaatctgtacaaacaaaagaggtagcagcaatccattgcttacaactgaagaggcaaatttgacagagaaagaggaaataaggcaaggtgaaacactgatgatagaaggaacagaacagttgaaatctctctcttcagactcttcattttgctttcccaggcctcacttctcattctccactttgccaactgtttcaagaactgtggaactcaaatcagaacctaatgtcatcagttctcctgctgagtgttccttggaactttctccttcaaggccttgtgttttacattcttcactctctaggagagagacacctatttgtatgttacctattgaaaccgaaagaaatatttttgaaaattttgcccatccaccaaacatctctccttctgcctgtccccttccccctcctcctcctatttctcctccttctcctcctcctgctcctgctcctcttgctcctcctcctgacatttctcctttttctcttttttgtcctcctccctctcctccttctatccctcttcctcttcctcctcctacattttttccactttccgtttcaacgtctggtcccccaacaccacctcttctacctccatttccaactcctcttcctccaccacctccttctattccttgccctccacctccttcagcttcatttctgtccacagagtgtgtctgtataacaggtgttaaatgcacgaccaacttgatgcctgccgagaaaattaagtcctctatgacacagctatcaacaacgacagtgtgtaaaacagaccctcagagagaaccaaaaggcatcctcagacacgttaaaaacttagcagaacttgaaaaatcagtagctaacatgtacagtcaaatagaaaaaaactatctacgcacaaatgtttcagaacttcaaactatgtgcccttcagaagtaacaaatatggaaatcacatctgaacaaaacaaggggagtttgaacaatattgtcgagggaactgaaaaacaatctcacagtcaatctacttcactgtaatgttgcttttcttattttagtcgggcaaacctcttgttgatcatagtcttcaagttgaacatcaaatttgaacgtcaaagaagactctattattttaccccaaattcaatgaaatgcagttttttttctcgtttttaatttaaaaagatattaacctcatcactactaactcactcatataatagatttaccttactttttaaaaactacaaagtagcataatttgttctacatttatttgaaaagtaagtaattttaatctcttttttagtgggaatatgtgggcatgaaaattagatacccaacttaaaccaaaggcatgtctatcatgtggatgcagtaacatttacatttagtttttgatcgtagttttatatgaatgttccaagaaaaaagcagactgttacaaataagttaaaactgatatgattgataggttctgttttttcttgaagcctatgtatttggtaagaagaaatactaccgaagtaaaatataatgtacctagattgtaggagatgacagacataaggtatttcaaaataaatctcaggtgctataacatgtagtcatctgttttctgataagaacatcttttactctgacttgcttttatcttagtagtatgcttatggatttagtagtatgcttatggatttgataaatcttatactttttcagttgctgtcttattctctttatttctcattgtgctttcccttcccttctttataatgaaaataaatcttgagtcgttg

SEQ ID NO: 172250 - DNA, 11967 bp, Homo sapiens
  Payload ID: 13866
  Gene Symbol: PRTG
  Gene Name: protogenin
  Uniprot ID: Q2VWP7
  ENST ID: ENST00000389286
  CDS Start-End: 49-3501
gacaggggctctgggcggccggggagcatgcccgcgcggctacgctgaatggcgcctcctctgcgacccctcgcccggctgcgaccgccggggatgctgctccgcgcgctcctgctcctgctgctgctcagtcctttgccaggagtgtggtgctttagcgaactgtcttttgtaaaagaaccacaggatgtaactgtcacaagaaaggacccagtcgttttagattgccaggctcacggagaagttcctattaaggtcacatggttgaaaaatggagcaaaaatgtctgaaaataaacggatcgaggttctttctaacggctctttatacatcagtgaggtggaaggcaggcgaggagagcagtccgatgaaggattttatcagtgcttggcaatgaacaaatatggagccattcttagtcaaaaagctcatcttgccttatcaactatttctgcatttgaagtccagccaatttccactgaggtccacgaaggtggagttgctcgatttgcatgcaagatttcatcccaccctcctgcagtcataacatgggagttcaatcggacaactctacctatgactatggacaggataactgccctaccaacaggagtattgcagatctatgatgtcagccaaagggattctggaaattatcgttgtattgctgccactgtagcccaccgacgtaaaagtatggaggcctcgctaactgtgattccagctaaggagtcaaaatccttccacacaccaacaattatagcaggtccacagaacataacaacatctcttcatcagactgtagttttggaatgcatggccacaggaaatcccaaaccaatcatttcttggagccgccttgatcacaaatccattgatgtctttaatactcgggtacttggaaatggtaatctcatgatatctgatgtcaggctacaacatgctggagtatatgtttgtcgggccactacccctggcacacgcaactttacagttgctatggcaactttaactgtattagctcctccttcatttgttgaatggccagaaagtttaacaaggcctcgagctggcactgctcgatttgtgtgtcaggcagaaggaatcccctctcccaagatgtcatggttgaaaaatggaaggaagatacattcgaatggtagaattaaaatgtacaacagtaaattggtaattaaccagattattcctgaagatgatgctatttatcagtgcatggctgagaatagccaaggatctattttatctagagccagactgactgtagtgatgtcagaagacagacccagtgctccctataatgtacatgctgaaaccatgtcaagctcagccattcttttagcctgggagaggccactttataattcagacaaagtcattgcctattctgtacactacatgaaagcagaaggtttaaataatgaagagtatcaagtagtcatcggaaatgacacaactcattatattattgatgacttagagcctgccagcaattatactttctacattgtagcatatatgccaatgggagccagccagatgtctgaccatgtgacacagaatactctagaggatgttcccctgagacctcctgaaattagtttgacaagtcgaagtcccactgatattctcatctcctggctgccaatcccagccaaatatcggcggggccaagtggtgctgtatcgcttgtctttccgcctaagtactgagaattcaatccaagttctggagctcccggggaccacgcatgagtaccttttggaaggcctgaaacctgacagtgtctacctggttcggattactgctgccaccagagtggggctgggagagtcatcagtatggacttcacataggacgcccaaagctacaagcgtgaaagcccctaagtctccagagttgcatttggagcctctgaactgtaccaccatttctgtgaggtggcagcaagatgtagaggacacagctgctattcagggctacaagctgtactacaaggaagaagggcagcaggagaatgggcccattttcttggataccaaggacctactctatactctcagtggcttagaccccagaagaaaatatcatgtgagactcctggcttacaacaacatagacgatggctatcaggcagatcagactgtcagcactccaggatgcgtgtctgttcgtgatcgcatggtccctcctccaccaccaccccaccatctctatgcgaaggctaacacctcatcttccatcttcctgcactggaggaggcctgcattcaccgctgcacaaatcattaactacaccatccgctgtaatcctgttggcctgcagaatgcttctttggttctgtaccttcaaacatcagaaactcacatgttggttcaaggtctagaaccaaacaccaaatacgaatttgccgttcgattacatgtggatcagctttccagtccttggagccctgtagtctaccattctactcttccagaagcaccagcaggcccaccagttggagtaaaagtgacattaatagaggatgacactgccctggtttcttggaaaccccctgatggcccagaaacagttgtgacccgctatactatcttatatgcatctaggaaggcctggattgcaggagagtggcaggtcttacaccgtgaaggggcaataaccatggctttgctagaaaacttggtagcaggaaatgtgtacattgtcaagatatctgcatccaatgaggtgggagaaggacccttttcaaattctgtggagctggcagtacttccaaaggaaacctctgaatcaaatcagaggcccaagcgtttagattctgctgatgccaaagtttattcaggatattaccatctggaccaaaaatcaatgactggcattgctgtaggtgttggcatagccttgacctgcatcctcatctgtgttctcatcttgatataccgaagtaaagccaggaaatcatctgcttccaagacggcacagaatggaactcaacagttacctcgtaccagtgcctccttagctagtggaaatgaggtaggaaagaacctggaaggagctgtaggaaatgaagaatctttaatgccaatgatcatgccaaacagcttcattgatgcaaagggaggaactgacctgataattaatagctatggtcctataattaaaaacaactctaagaaaaagtggttttttttccaagactcaaagaagatacaagttgagcagcctcaaagaagatttactccagcggtctgcttttaccagccaggcaccactgtattaatcagtgatgaagactcccctagctccccaggtcagacaaccagcttctcaagaccctttggtgttgcagctgatacagaacattcagcaaatagtgaaggcagccatgagactggggattctgggcggttttctcatgagtccaacgatgagatacatctgtcctcagttataagtaccacaccccccaacctctgattctttcactggcagtgattcaggtggagattccgcattgaggaagtgtgaagaccctgctgtgtcatctgttagtgagcagacttcctccttagttctgcagccgccatctgccatgctatgctttgataaaaatgattttccaatctagacggccatgctcaggtattctcaccattaaatctgttcgaaggacaatgaacagggaaccaaagccttttgtgaaaatcttaatatctttatggggtattttagctttttttgaatgtgttttgttttttatttttaaacttgtgtaatttgaatgtttcattgtcagcaatgtgaaagaacggtcgagatgtttgactggattataaaatatatcactggagcaaagggaagacttttgaaagcccctttgctgactatctacctcagtttgcctcccggcaaactctgaagacaactttgttacctcatttgttgttatagtttatctcagctacataaccaatgatacttcctagtagtattgtgttttcattgctgtacgtgtaatgtgtgtgatcaaaggagtcatataggtagatgagtaagaatgtttatctgaagctctgatttttttaaaaaaagaaactatgacatctgcatggtttggataagttcatacctctggctgtgaggaccgttaaaccactgagaagaggaaaagtggggctatttcttctaacgatgaccaaaacaagaaagtatatttcttttgagaacagaactattcaataccaggtagggatcattttgcttaaaaggcctttatgttttgggcattagagtctgagtgctttatctcctatatcccaaacctcaagctgcccagaactgtgccttttctaccttcccctttgcctgacggttggccaaaggctgcactgtctagtttgcaaagcatcctcaactttgccagtattagttgcaaaaccccatgcagaatatggatttttaaagaaaatgggttaaggtggttttttttctttttttaaatcccagtttggcttaaaggagtgaagacatttcatgaactattaagaatgaaggtaaatgcaacagtagacagtaaaatgaactcgaagttattatggtaacagtgcctttcagtataatgaaattctttgccttatacctttttaatattcatgaaattgtttaggaacaggagtacaaaaagttgccttaagagtttcttggattttatcagtaactattttgatgtatagtatcttaccaaggcattttttttaagtgcaggttttgtttagggataaatattcagagttctaccaccctacttgtgttttcttgaattctttagagaatatggtatctacttaatcttccttcagtgtcagtgctgtgaatgaggaatgctaactccaggagtgagttaatcctcttgcaggtttgaaatcagcaaattgtttactcagctacataacataggccttttctccgtcatgagacagttacctaggtgccgagcagtgggagaggataaagaactaaacgcgtgtagagaaggggtcccatatccttttaaaagtattttttcaaattttctggaagtgacttttgattctcattttaaaaggaatcataatgggtttacacttgaaatgctttgttcctagaggaggcagggtcatgttcactgatgttctaaaatcaaaggaatattagcagataatagtcccagcatcatctgctagtctaatgactgtagatataacatttttaatttttttaaatctgtaattttgtgccaaactggatgtgattaagactaaagttcaatgccagcaaccacttctgaactaaactcagagtcccccagttagttatctaagtacggaattcatcgcaaaacaaacaaaaaagcagagctttaggtgaacagtctgcagcaaggaaaaatgctgctcctgcctttatagctcctgttttatactacctccttttaaagttattctagtgttattttttttcctgtactcagggaacgttttgttacttttgagctgcctcatggaagcataggcagattgacagggtatagcgctttgtggttggtaagtagaagtatatagggccaacttttatcagtatctaaaattaagtacagtgagatcattttatttttaagctttcattaaaaggcaaacaaaatctaaagctgaaacatcatccatcatggttatggaagatgtgtctaggactacatgaattcgagtggttttaaatggctaaaaagacgagctaaagtccttgaggaaagtattttgtttgtttggtttttgatgaataggcttatagttacaatagaactttaggctataactatttgataattatttaacagtacattttttaccttttcattttgttcttatacggactttttcataataattctgttaccaaagaattttcagtagaaaataaaattttgattataattccccccaaattgaattaactagaagcatttatagatatgaaacttacacaagtagttactaacccaaaacaatagggtttatattgattgttgtagttaaatagattagtaatgttaactaccttattgttaccagagcatttaaaataagttgtaatactttctttaccagcagatcgttccaaagaatttcaggtatagttttttcttcagcaagtaaatcttcaactatacagtattaaagtatttttatattgttgaaactacttgttggagagaaaattttttttttttaccaaaaataaatactttggtctcattgaataagatatttagtaatacagcaaagacttctttttacttgaccaaatcaagcttctttgaagtcttaagtatgaaattgtaattaaaatgtgaagattttcactcatttttcatagtggtattacttcatggtattgtacttcaaaggggctaatatgcaaatggtaactattttcttttccaaagatgtatttgctgtaagtactgatacctgcatgtcatttttatgccaaatattacaagatactgctcatcagtattttcataccaaagaccattaagatgtataggttagcctgtaagtaagtaaagatgagcagatttgaaataaatttatttagaggccgatagagaatctagctttagtagcaaaaaatatcaaagggctaagtttacataattaaaagcaatacaattatattggtatttatcagtgtttttattcaagtactttttatcagcaaattaaaaagaaaaaaaccaaagatatttaaggttacctccgcatataggcaaatatagttgtacattaaactgttgtttcttgtttttatgttaaaccaaacatgtctcttcggaacacagtctgtatacaaataacatgcatgaggactttccatttaatctgtgattcagccacatgatgtttttgccaaatgatgtgatactttccaaagcaccttgagtgtgaaatgtcaacagaaatatcagcaagcttttatgttgcagagtattatggtacctctgaattagcctgtatagttctcttcctgctttaagcattacctggttagctcagacggcttgaggcagtcccttaataatagggatgcttttcatctctaaggatgtaagaggcaaacaaatcatgtcattctttaagtgggctatgctttgatagatgtgctctttaaaggtgtgagattggaatttagagttgttaaattgaaatgtttgcattgcaccaaaggagctcagttttcaaactttaatggaaccttgggtaaagggaaaaaatttttaatgaaatctggggttttatattttgattagcctaaaagtaaaaatacagctttatccattaagtgacttttaaaaatcagttttgccataccaaagaaattagattcttagtgtcacatgctatacttttgtctgtgcttgaaacgagcaatgccaacattgggaacaatgacagaggtttgcatcagtttgtcttggctttgttaaggacttctgccagaaatgtgctcgtggttgacaacccaggatcattgttcaagttcttatgcagacacctttgaaaacaattcagatcgtgtcacaagaatttggaattgaaaatatcatttattttttaatgcaagaatacccagatgtggtttcacttcagcagtagctatagtggttcacttatatacatttctgtttcactgaatgtaaattttgaatactgaatgtaaaaaaaaaactccagttatattgaaacagtcactaagactgcacatgtgttttgcagactttcttcctgaccatttgccacatgggtctctgataagattctgttggtttaatagtcaaaataatctttgcagtttgtgagcactgagtagcaggttctggagactaccatatacaaccagttgtctaattgtgatttttttattgatgtttagaagaatgtaaccgtagagttctgtgttaagttgatttatgctcaggacataagatcacaggctaatgcaatgtgtatgtttcaggctttaatcttctcaatttccctttttaagccgttgatggtgtttaagattaacatgacagtcttgtatttttaccagatactgtattatttttcctattgctgctgtaacacattaccatgaaggtggtggcttaaaataacacaaatttttcttaagttctgcagatcagaagtctaacacaggtctccctgggacaaaatcaaggcgcttgcagggctgtttctttttgaggctttagggaaaaatctatttccttttctagttttttaaggctgggaacccctccttccatcttcaaagccagccatgtagcatctctctgaagctccttccgttatcatttctctttgtccaaccccagctgatacaggttatctaggtttaaggattccagtgatcacattgagcccacctaaataatccaggataatctccccaactgaagttcctcaacttaatcacatctacagagttccttttgctatgtttggtaacatattcactggttccagggatttgggcatggacttctgtaggtggccagtattttgcccacaacaggtacattctttctgtggaattctgatccctgtaaaatgtctgtagcattaaagagattggaaatctgaggtcatgtgccccttggggatctttaaagattaaaagcatgaaaactttgacttgtagcctaccaaaattatacactaaactttctctccaaaatacttgtgaaacaatttatctttaaagtttctgaatatgtgcttcataaaataacatctcatgtttatcagcaagtgtcctaaatatttgcgtctaactttatggaatttattcagaaaaagaattgaaaactcttcttatagttaccctttctccttttctcttcagtggttatgttgctggggaagagttgggggaagacctcaaaacacaggaactcagagtgatgaacaggaccatgctcaagtttattctttgttttcttttaatgacatattcacaacattcacaactttctgcctttaaatctggttcctctcttcagcttcaccaagccactgaatgcttttcagttttattaaccctcacattccccatccttctcagcaagagcctctccttatgccatcagcatgtatatacatttcctaggaaatttgatctttcttgtcattcttttttggttccaatcggccttttcctggttctcaaagctctagtttcttctaatttctggatcatcgcaagtctggccctctttgaactttaaaacataatgtctaattccaccccaattttcagcatttcttcaactaaatcgataaagctgtctccattatgagaaaggccagaataatactccgagtaagcataagaaagctggtcattttacaacttctcccgactctaggaagtaatatgatgccatttgttgagcatctacagtgtgccaagcacatggttcatctctgcaaactgctgctacattctgtaaagcaagtattatccgcattttagggattaggaacagcttcctgatctcttgccaaaagtcacagctagtgagtggtttaggcaagatacaaaccctagttagttaatccttactcagaagtgtataggactatgatacattgtctcagcttaaaaaaaaaaaaaaaaaaaaaaggtatttaatcacccagggtcatagtgccttccatagtgtgaccagatacaactgttttttccttgtatccacaaaagccaggttgtgtcagaacaacctttctacagagtaataaccaatcgaaaaagagaagactaccttatttaaatccacttattcacaggagggattaaggcggctgtaactcatcccttatcatctcctaatttctctcctccaaaaccttccatttatctcagctaaaattgtgtctgaaggctgtttgtacttagagttacattacaaataaggtaggcatggtttctagagtccttttctagtcaagcatttccttattcgacaatgtcttcagaattgcattttatcttttgtaattttctgtagctcccatattccaaacaggaattcattgacttgaaaaagtcaggtgtgtaaacagtaatcctttcttgttaggtctgaagagttcatgattttttatgaatataaactaatttattatttgcattaatgtaggagacagcaaagttaacggagagtcataaaacagaacaagtataagttaggctttggagcacctaagttctaatcttgacaattttgagaatcgtttggtacaaaaattcttaaactgtttctgtgccttctccatccatgaaatgaggataatttttttgtgcaaaatgaaacaatagtactttgaaaacttaagagaaaattcaagtgtaaataatcataatctgaaactcatttgtatgaggctgtgaaagattttacagactctttcttttcaagtcagcctttgcaattatattttgcctttgttgaaatgaaaaatgtttgcatctcccgtacgcatacacaaaaccaatagaagaaagtggttggtaaaagatatagctgaaatggaaacactcatatgttaggtggataaaatcataagagaaaatgggaattgactgtactttcaaagtactaaatttgaagtcatcttactccaatttaagtcatatatatatatatatatatatatatatatatatatatatatatatatatattggcttttaaagagttaaagagagaatcagatctgtccagcaggatagatgggtgaggagaaaagtacatatttaggatttttctctaaaagatctttttcaagattatggagtattttaatatttctgcaaactattccaaatgaatgcattttatatagggcaacacatactggcacctgattctggtttattcgagttcatatgtagggtttgttgggaagaattatatgattggcttctttttttagaggaaatattttcccttttttcttatccatatactattctgaacagctttgcagatttccttaagttcatagcttgtaagtagttcatggtatatagacatagtcttgacttacaactgaaaaaaaatttatgttacagaagtttattttttctatggaactgtctttaaaaacaaaaatattacaaatcttgaccttgaaatattctgtttcctgttatcacattctggatatctattttgtttgcaaatgaaaattattactgatgattagcaacttgagcctgttaataggaaattgcaaagcctgaatacacacacattgccttagcctatcagtagagtagaggacatatgttaagaaaatgtgtctgcttgttgctgttgttggacaaaattttatgtctgtgtgtatgatttttttttttctattttcttcaaagatgtgaattaaatgaaagtgtgggagccagttaaattattttgtattatgggtgttctggatcctttcactccgtataccattttcttgtaagggcagcatttgtagacttgctaatggactgtagagctgagctatattaattttatacttgactcaggggatcagttctgtgaatgccattgcacgaagaaagcaaatgtttgccttgattttgaatgtatctttttaatgtcttcttaaaacatatttgtttaataatgtagatttgtttttttttttctagtatcatagtaaatattgcttagtacttgcccccaccccactgggtagtttatatactaccctataggtcatgccaaaaatgaataaaagtttaaatgccaaaatgtttatgaaactgctgtctaaatactgattgattgcacaatttaaataaaagctttccttagttaaaaaa

SEQ ID NO: 172251 - DNA, 576 bp, Homo sapiens
  Payload ID: 13866
  Gene Symbol: PRTG
  Gene Name: protogenin
  ENST ID: ENST00000558349
  CDS Start-End: 510-576
cttctcgcgccattgtcccggctccggccgcgtccgcgcctccgcgaccggccggactccgggtcgccagcccgccggggccgccgcggctgcacgtggctttatttatattgtttccttagtggcagcctcgccgtgcagggggcgccgcggttcctcgcggcttcccgtgtctgttgtgggagttcccccactttttagggctgcgagagggaataggtgaactcataaccccaatcggcaccagcttgccggatctggatccagccaggaggagatgggagggtggaattggcagggttggaagtgaagtggccgatttgtgccccggaaaggaggggggaaaagtccccgaagctgaaaaggaaggagtgtggtgctttagcgaactgtcttttgtaaaagaaccacaggatgtaactgtcacaagaaaggacccagtcgttttagattgccaggctcacggagaagttcctattaaggtcacatggttgaaaaatggagcaaaaatgtctgaaaataaacggatcgaggttctttctaacggctctttatacatcagtgaggtggaaggca

SEQ ID NO: 172252 - DNA, 1925 bp, Homo sapiens
  Payload ID: 13866
  Gene Symbol: PRTG
  Gene Name: protogenin
  ENST ID: ENST00000561465
  CDS Start-End: 1-657
gagtatcaagtagtcatcggaaatgacacaactcattatattattgatgacttagagcctgccagcaattatactttctacattgtagcatatatgccaatgggagccagccagatgtctgaccatgtgacacagaatactctagaggatgttcccctgagacctcctgaaattagtttgacaagtcgaagtcccactgatattctcatctcctggctgccaatcccagccaaatatcggcggggccaagtggtgctgtatcgcttgtctttccgcctaagtactgagaattcaatccaagttctggagctcccggggaccacgcatgagtaccttttggaaggcctgaaacctgacagtgtctacctggttcggattactgctgccaccagagtggggctgggagagtcatcagtatggacttcacataggacgcccaaagctacaagcgtgaaagcccctaagtctccagagttgcatttggagcctctgaactgtaccaccatttctgtgaggtggcagcaagatgtagaggacacagctgctattcagggctacaagctgtactacaaggaagaagggcagcaggagaatgggcccattttcttggataccaaggacctactctatactctcagtggcttagcccgaatctaataatgaaaccatcagataagtccggattgtgagacattccacaaaacagctcaactggaaatgccatccttggagaagacaggaaaagagcaggagacagttctagatggagacacgatgtggagcgtgtaatcctggattcttgtggggaaaagcagttataaagaacattattggacaattttggaaatttaaatacagactatatattagataaatgctgccattgttaaatttgttgggtataataatactgtgtttatgttggagaacatccctttttagggggaaaatgtcacagtatttaggtgtgatgtgaagtgtcatgattcaataaaaggaaagatgtgtataagtacacacacaaataaaagaataagaaataaagcaaatacattaaaatgtctataactaattttaaaggtttaaaaatgccctatactcttgtactgacaatttttagtctgtagtatctccaaattagataatggttttacaatgattaggcactgaaaggttaaaacaacagcacttctgaagtaattgcttataaaaaaattctctaggaatgtggggatatttaaaagttgtatcagtcagtatatactataagtttgcctcttaagaaattaaggcacagaacatcagtttcttatactgtccagagcccgcctgttcatactgtccaaagtttatactgtctaaagttcatactgtccaaagttctgtcttattcttactgtccaaagcccacttgaggaactaaaggctgtttctgtaactgagtgcataatataaaaatattctgaactgaaattatttccttaaacaactgaataactcattcatgaaatgtttgtaaactgatatttataataatatatttcagattgaatataagaaacctagatctgttgaatgttttatttatcagaaaatctttttggtttaattctatatgcttaatttgtttgaggttctgtgtcatacgtgttgaaaaccattttaagatatgttgaatacctttcagtacccctaagcatcttcagtgtcttttaataactaaaaaatttctggttgaatagactgtttatagccagttaacacattaataatatgcagctgcttggatctaagaactcccagaattcttttatttgctaacattaaaatctattgcagtgagtttacataagttgttgtaacatactgtttcttgtgagttttaaagaaggcataaataaataatcatggttttatcactgtga

SEQ ID NO: 172253 - DNA, 833 bp, Homo sapiens
  Payload ID: 13866
  Gene Symbol: PRTG
  Gene Name: protogenin
  ENST ID: ENST00000561292
  CDS Start-End: 160-573
cctcgccgccgcagagacgctcgccacgccggtgccggagccggagcggggagccaggctgcgtgcgaccagccgcagagcagagagcgcccggggcgggggccgcagacggacaggggctctgggcggccggggagcatgcccgcgcggctacgctgaatggcgcctcctctgcgacccctcgcccggctgcgaccgccggggatgctgctccgcgcgctcctgctcctgctgctgctcagtcctttgccaggagtgtggtgctttagcgaactgtcttttgtaaaagaaccacaggatgtaactgtcacaagaaaggacccagtcgttttagattgccaggctcacggagaagttcctattaaggtcacatggttgaaaaatggagcaaaaatgtctgaaaataaacggatcgaggttctttctaacggctctttatacatcagtgaggtggaaggcaggcgaggagagcagtccgatgaaggattttatcagtgcttggcaatgaacaaatatggagccattcttagtcaaaaagctcatcttgccttatcaaggatagggagtacatagtggaggtggccagataggccatgagaagatgaagcatttgtcatgaccacacattgtttccaggacctcctgagaagcctgatagaatcctagggcttccagaaacacttttggaaaaacacagagctttctaacttcataaataaaatgtgaatggtgtgtgataggtgtaacaaacaaaatgtcagaactggctttttaaatatctttagatttttgcatctctatagaaattatcactaataataaataattacatg

SEQ ID NO: 172254 - DNA, 1686 bp, Homo sapiens
  Payload ID: 13867
  Gene Symbol: PPOX
  Gene Name: protoporphyrinogen oxidase
  Uniprot ID: P50336
  ENST ID: ENST00000352210
  CDS Start-End: 211-1644
gccgcgagaacagagtggacggagcgtaggagagaccgaaaaggctgggggtgggagtagcggatttgaagcacttgttggcctacagaggtgtggcaagcagagcacctcagaactcaggcgtactgcccgccgcccgagccctgcgagggccgatagcgagggtgtggcccttatctgcacccagcagagcgccggcggggtttccgcatgggccggaccgtggtcgtgctgggcggaggcatcagcggcttggccgccagttaccacctgagccgggccccctgcccccctaaggtggtcctagtggagagcagtgagcgtctgggaggctggattcgctccgttcgaggccctaatggtgctatctttgagcttggacctcggggaattaggccagcgggagccctaggggcccggaccttgctcctggtttctgagcttggcttggattcagaagtgctgcctgtccggggagaccacccagctgcccagaacaggttcctctacgtgggcggtgccctgcatgccctacccactggcctcagggggctactccgcccttcaccccccttctccaaacctctgttttgggctgggctgagggagctgaccaagccccggggcaaagagcctgatgagactgtgcacagttttgcccagcgccgccttggacctgaggtggcgtctctagccatggacagtctctgccgtggagtgtttgcaggcaacagccgtgagctcagcatcaggtcctgctttcccagtctcttccaagctgagcaaacccatcgttccatattactgggcctgctgctgggggcagggcggaccccacagccagactcagcactcattcgccaggccttggctgagcgctggagccagtggtcacttcgtggaggtctagagatgttgcctcaggcccttgaaacccacctgactagtaggggggtcagtgttctcagaggccagccggtctgtgggctcagcctccaggcagaagggcgctggaaggtatctctaagggacagcagtctggaggctgaccacgttattagtgccattccagcttcagtgctcagtgagctgctccctgctgaggctgcccctctggctcgtgccctgagtgccatcactgcagtgtctgtagctgtggtgaatctgcagtaccaaggagcccatctgcctgtccagggatttggacatttggtgccatcttcagaagatccaggagtcctgggaatcgtgtatgactcagttgctttccctgagcaggacgggagcccccctggcctcagagtgactgtgatgctgggaggttcctggttacagacactggaggctagtggctgtgtcttatctcaggagctgtttcaacagcgggcccaggaagcagctgctacacaattaggactgaaggagatgccgagccactgcttggtccatctacacaagaactgcattccccagtatacactaggtcactggcaaaaactagagtcagctaggcaattcctgactgctcacaggttgcccctgactctggctggagcctcctatgagggagttgctgttaatgactgtatagagagtgggcgccaggcagcagtcagtgtcctgggcacagaacctaacagctgatccccaactctcattcatgaaaataaaaattgctggagcttg

SEQ ID NO: 172255 - DNA, 1740 bp, Homo sapiens
  Payload ID: 13867
  Gene Symbol: PPOX
  Gene Name: protoporphyrinogen oxidase
  Uniprot ID: P50336
  ENST ID: ENST00000367999
  CDS Start-End: 267-1700
gagaacagagtggacggagcgtaggagagaccgaaaaggctgggggtgggagtagcggatttgaagcacttgttggcctacagaggtgtggcaagcagagcacctcagaactcaggcgtactgcccgccgcccgagccctgcgagggccgatagcgagggtgtggcccttatctgcacccagcagagcgccggcggggtacggtcttaggacctcgatctccttctccctcattttctctcatccctacctattgtgggtttccgcatgggccggaccgtggtcgtgctgggcggaggcatcagcggcttggccgccagttaccacctgagccgggccccctgcccccctaaggtggtcctagtggagagcagtgagcgtctgggaggctggattcgctccgttcgaggccctaatggtgctatctttgagcttggacctcggggaattaggccagcgggagccctaggggcccggaccttgctcctggtttctgagcttggcttggattcagaagtgctgcctgtccggggagaccacccagctgcccagaacaggttcctctacgtgggcggtgccctgcatgccctacccactggcctcagggggctactccgcccttcaccccccttctccaaacctctgttttgggctgggctgagggagctgaccaagccccggggcaaagagcctgatgagactgtgcacagttttgcccagcgccgccttggacctgaggtggcgtctctagccatggacagtctctgccgtggagtgtttgcaggcaacagccgtgagctcagcatcaggtcctgctttcccagtctcttccaagctgagcaaacccatcgttccatattactgggcctgctgctgggggcagggcggaccccacagccagactcagcactcattcgccaggccttggctgagcgctggagccagtggtcacttcgtggaggtctagagatgttgcctcaggcccttgaaacccacctgactagtaggggggtcagtgttctcagaggccagccggtctgtgggctcagcctccaggcagaagggcgctggaaggtatctctaagggacagcagtctggaggctgaccacgttattagtgccattccagcttcagtgctcagtgagctgctccctgctgaggctgcccctctggctcgtgccctgagtgccatcactgcagtgtctgtagctgtggtgaatctgcagtaccaaggagcccatctgcctgtccagggatttggacatttggtgccatcttcagaagatccaggagtcctgggaatcgtgtatgactcagttgctttccctgagcaggacgggagcccccctggcctcagagtgactgtgatgctgggaggttcctggttacagacactggaggctagtggctgtgtcttatctcaggagctgtttcaacagcgggcccaggaagcagctgctacacaattaggactgaaggagatgccgagccactgcttggtccatctacacaagaactgcattccccagtatacactaggtcactggcaaaaactagagtcagctaggcaattcctgactgctcacaggttgcccctgactctggctggagcctcctatgagggagttgctgttaatgactgtatagagagtgggcgccaggcagcagtcagtgtcctgggcacagaacctaacagctgatccccaactctcattcatgaaaataaaaattgctggagct

SEQ ID NO: 172256 - DNA, 728 bp, Homo sapiens
  Payload ID: 13867
  Gene Symbol: PPOX
  Gene Name: protoporphyrinogen oxidase
  ENST ID: ENST00000537829
  CDS Start-End: 1-485
aggctgaccacgttattagtgccattccagcttcagtgctcagtgagctgctccctgctgaggctgcccctctggctcgtgccctgagtgccatcactgcagtgtctgtagctgtggtgaatctgcagtaccaaggagcccatctgcctgtccagggatttggacatttggtgccatcttcagaagatccaggagtcctgggaatcgtgtatgactcagttgctttccctgagcaggacgggagcccccctggcctcagagtgactgtgatgctgggaggttcctggttacagacactggaggctagtggctgtgtcttatctcaggagctgtttcaacagcgggcccaggaagcagctgctacacaattaggactgaaggagatgccgagccactgcttggtccatctacacaagaactgcattccccagtatacactaggtcactggcaaaaactaggtaagttgggaaaacagctgggctgaggagggccaaggacatcagacccccagctaaaacattcctttcatcctttccttccagagtcagctaggcaattcctgactgctcacaggttgcccctgactctggctggagcctcctatgagggagttgctgttaatgactgtatagagagtgggcgccaggcagcagtcagtgtcctgggcacagaacctaacagctgatccccaactctcattcatgaaaataaaaattgctggagcttg

SEQ ID NO: 172257 - DNA, 734 bp, Homo sapiens
  Payload ID: 13867
  Gene Symbol: PPOX
  Gene Name: protoporphyrinogen oxidase
  ENST ID: ENST00000537523
  CDS Start-End: 1-692
tccaagctgagcaaacccatcgttccatattactgggcctgctgctgggggcagggcggaccccacagccagactcagcactcattcgccaggccttggctgagcgctggagccagtggtcacttcgtggaggtctagagatgttgcctcaggcccttgaaacccacctgactagtaggggggtcagtgttctcagaggccagccggtctgtgggctcagcctccaggcagaagggcgctggaagggatttggacatttggtgccatcttcagaagatccaggagtcctgggaatcgtgtatgactcagttgctttccctgagcaggacgggagcccccctggcctcagagtgactgtgatgctgggaggttcctggttacagacactggaggctagtggctgtgtcttatctcaggagctgtttcaacagcgggcccaggaagcagctgctacacaattaggactgaaggagatgccgagccactgcttggtccatctacacaagaactgcattccccagtatacactaggtcactggcaaaaactagagtcagctaggcaattcctgactgctcacaggttgcccctgactctggctggagcctcctatgagggagttgctgttaatgactgtatagagagtgggcgccaggcagcagtcagtgtcctgggcacagaacctaacagctgatccccaactctcattcatgaaaataaaaattgctggagcttg

SEQ ID NO: 172258 - DNA, 816 bp, Homo sapiens
  Payload ID: 13867
  Gene Symbol: PPOX
  Gene Name: protoporphyrinogen oxidase
  ENST ID: ENST00000539753
  CDS Start-End: 230-571
ggctgggggtgggagtagcggatttgaagcacttgttggcctacagaggtgtggcaagcagagcacctcagaactcaggcgtactgcccgccgcccgagccctgcgagggccgatagcgagggtgtggcccttatctgcacccagcagagcgccggcggggtacggtcttaggacctcgatctccttctccctcattttctctcatccctacctattgtgggtttccgcatgggccggaccgtggtcgtgctgggcggaggcatcagcggcttggccgccagttaccacctgagccgggccccctgcccccctaaggtggtcctagtggagagcagtgagcgtctgggaggctggattcgctccgttcgaggccctaatggtgctatctttgagcttggacctcggggaattaggccagcgggagccctaggggcccggaccttgctcctggtatctctaagggacagcagtctggaggctgaccacgttattagtgccattccagcttcagggatttggacatttggtgccatcttcagaagatccaggagtcctgggaatcgtgtatgactcagttgctttccctgagcaggacgggagcccccctggcctcagagtgactgtgatgctgggaggttcctggttacagacactggaggctagtggctgtgtcttatctcaggagctgtttcaacagcgggcccaggaagcagctgctacacaattaggactgaaggagatgccgagccactgcttggtccatctacacaagaactgcattccccagtatacactaggtcactggcaaaaactag

SEQ ID NO: 172259 - DNA, 664 bp, Homo sapiens
  Payload ID: 13867
  Gene Symbol: PPOX
  Gene Name: protoporphyrinogen oxidase
  ENST ID: ENST00000535223
  CDS Start-End: 184-654
aggtgtggcaagcagagcacctcagaactcaggcgtactgcccgccgcccgagccctgcgagggccgatagcgagggtgtggcccttatctgcacccagcagagcgccggcggggtacggtcttaggacctcgatctccttctccctcattttctctcatccctacctattgtgggtttccgcatgggccggaccgtggtcgtgctgggcggaggcatcagcggcttggccgccagttaccacctgagccgggccccctgcccccctaaggtgatgctgggaggttcctggttacagacactggaggctagtggctgtgtcttatctcaggagctgtttcaacagcgggcccaggaagcagctgctacacaattaggactgaaggagatgccgagccactgcttggtccatctacacaagaccaagaaccagttgaagtggcgacagagtcatgacaggaccgtggagtggcctaaggagtacccagggcgaagtaggaaacaggctccttctattcttcatgtgcctgggtgccaactcctcaggtgcagggaccgtgaccacctgggggctgtaagcgaacagccccggagctcggcggagagtagggtgggggtggcgtcctctaccttttctacctttcccctcttctagcgggggtggg

SEQ ID NO: 172260 - DNA, 813 bp, Homo sapiens
  Payload ID: 13867
  Gene Symbol: PPOX
  Gene Name: protoporphyrinogen oxidase
  ENST ID: ENST00000544598
  CDS Start-End: 212-769
cggatttgaagcacttgttggcctacagaggtgtggcaagcagagcacctcagaactcaggcgtactgcccgccgcccgagccctgcgagggccgatagcgagggtgtggcccttatctgcacccagcagagcgccggcggggtacggtcttaggacctcgatctccttctccctcattttctctcatccctacctattgtgggtttccgcatgggccggaccgtggtcgtgctgggcggaggcatcagcggcttggccgccagttaccacctgagccgggccccctgcccccctaaggtggtcctagtggagagcagtgagcgtctgggaggctggattcgctccgttcgaggccctaatggtgctatctttgagcttggacctcggggaattaggccagcgggagccctaggggcccggaccttgctcctggtgatgctgggaggttcctggttacagacactggaggctagtggctgtgtcttatctcaggagctgtttcaacagcgggcccaggaagcagctgctacacaattaggactgaaggagatgccgagccactgcttggtccatctacacaagaactgcattccccagtatacactaggtcactggcaaaaactagagtcagctaggcaattcctgactgctcacaggttgcccctgactctggctggagcctcctatgagggagttgctgttaatgactgtatagagagtgggcgccaggcagcagtcagtgtcctgggcacagaacctaacagctgatccccaactctcattcatgaaaataaaaattgctggagcttggc

SEQ ID NO: 172261 - DNA, 3602 bp, Homo sapiens
  Payload ID: 13868
  Gene Symbol: PRPF40B
  Gene Name: PRP40 homolog, pre-mRNA processing factor B
  Uniprot ID: Q6NWY9
  ENST ID: ENST00000261897
  CDS Start-End: 552-3128
ggctcggggcggtcccacagcgccccctgcggcccgggccgtggccgatggggcggggaggccgctggggatagctgggaccccggggagggcgagggaggccaagggtgagggaagagagcccgggaggggggatgggggcggggactgggggcgaaggggcgggggaggccatgatggagcctggccgggggcgaaaggtgcgagagtggcgggactgggtgaagagtgggattgggagaggtgggggtgggttcgcggagaaagatcgggaaagaagagagagggcggagatgaggggactgaggggaccaggggacaggtggggaccagtttcccctcctgggatatttggtgtgcgacatgcccttcccccagccccagcgcccgttccctttggaagcctgggtgctcctcagaccacttggggactccctgcttcaccttcctgcatttgcaagagcttgtctcctgaggtggagagggggcctctgaagaaaggggctcccagcccaggccatcaacaaactaacgactctgtgtgaccttggatgccccctccagggatccccccaccctttcctccgatggggctaccccccatgagtcagagaccaccagctatcccccccatgccacctggcatcctgcccccaatgcttccaccaatgggggcgccaccaccactcacacagataccaggaatggtacctccgatgatgccaggaatgctgatgccagcggtgcctgtcaccgcagcgacggctccgggtgcggacaccgccagctctgctgtggctgggacaggccctccgagggccctatggagtgagcatgtggccccagatgggcgcatctactactacaatgctgacgacaagcagtccgtgtgggagaagcccagcgtgctcaagtccaaggcagagctgctcctgtcccaatgtccctggaaagagtacaagtcggacacaggcaaaccttattactataacaaccagagtaaagagtcccgctggacccggcccaaggatctggatgacctagaggttctagtcaaacaagaggctgcagggaaacagcagcagcagctgccacagacacttcagccacagccacctcagccacagcctgaccccccacctgtgcctcctggccccaccccagtgcccacaggcctcctggaacctgagccaggtgggagtgaagattgtgatgtgttggaggccacccagcccctggaacaggggttcctgcagcagctggaggagggccccagcagttctggacagcatcagccacagcaggaggaggaggaatcaaagccagaaccagagaggtctggcctcagttggagcaaccgggagaaggcaaagcaggcattcaaggaactgctgagggacaaggctgtcccctccaatgcctcatgggaacaggccatgaagatggtggtcaccgacccccgttacagtgccttgcctaaactgagtgagaaaaagcaggcattcaatgcctacaaggcgcagcgggagaaggaggagaaggaggaggcccggctaagggccaaagaggccaagcagaccctgcagcatttcctggagcagcatgaacgcatgacctccaccacccgctaccggcgggcagaacagacctttggggagctggaggtctgggctgtggtccctgagagggatcgaaaagaggtttatgatgatgtcctcttcttcctggccaagaaggagaaggaacaggccaagcagctccggcgccgcaatatccaggccctaaagagcatcctggatgggatgagtagtgtcaacttccaaaccacgtggtcccaggcccagcagtacctcatggataaccccagctttgctcaggaccatcagctgcagaacatggacaaggaagatgcactgatctgttttgaggagcacatccgagctttggagagggaagaggaggaggaacgggagcgggcccggcttcgggagcgacgccaacaacgcaagaatcgggaggccttccagaccttcctggacgagctgcatgagacagggcagctgcactctatgtccacctggatggagctatatccagcagtcagcactgatgtccgctttgccaacatgctgggccagccgggctccacccctctggacttattcaagttctatgtggaggagttgaaggcacgattccatgatgaaaagaagatcattaaggacatccttaaggtgaacacggcctttgaggacttcgcccacgtcataagctttgacaagagggctgccgcactggacgcaggcaacatcaagctgaccttcaatagtctgctggagaaagcagaggcacgggagagggagcgggagaaggaggaggcacgcaggatgcggcgcagggaagctgcctttcgaagcatgctgaggcaggctgtgcctgctctggagctaggcactgcctgggaagaggtccgtgagcgttttgtgtgtgactcagcctttgagcagatcaccctggagtcggagcggatccggctcttccgggagttcctacaggtgctggagcagactgaatgccagcacctccacaccaaaggccgaaagcatggcaggaaaggcaagaagcaccatcacaagcgttcccactcaccctcaggctctgagtcagaagaagaggagctgcccccaccatctctccggccccccaagcggaggaggcggaacccctcagagtcaggctctgagccctcttcctcacttgattcagttgaaagtgggggtgctgcccttggaggacggggctccccttcctcccatcttcttggagcagatcatggccttcggaaagccaagaaaccaaaaaagaaaactaagaagagaagacacaagtcgaatagtcctgagagtgagacagaccctgaggagaaagctggcaaggagagcgatgagaaagaacaagaacaggacaaggacagggagctccaacaggcagagctccctaaccgttccccaggctttggaatcaagaaggagaagacaggctgggacacgtcagaaagtgagctgagtgagggtgagctggagaggcggcggcggacactcctacagcagctggatgatcaccagtgacccaatgagctgttctctgcctcgggtctgtgtgaggccatggctcctgggccaccctcaccgtctgcctcagacttcttccttagtctggtctgtgtccactttttctaaagtaaccccacccccagcacaccattgttggcacctctcaaggttgctcttggtgttcaagggtcccctactccctggactagtgcagtccttgccctcagccccagaccagagatgggtggtatatgccatgtggggtgggtgatgccagtagataaaagtgtgagagaaggggtctccagggaagagtcacaggctgttggacgcagcctgggtggcagagggcagggtcatcaccctctagcatcagtgcctgctcctgcctgccctggccctgaggctccaccacttcttcctccacccaggacctaatgtacgtgtgttttgttttttgttttttaaataacaatatttataacatgg

SEQ ID NO: 172262 - DNA, 3154 bp, Homo sapiens
  Payload ID: 13868
  Gene Symbol: PRPF40B
  Gene Name: PRP40 homolog, pre-mRNA processing factor B
  Uniprot ID: Q6NWY9
  ENST ID: ENST00000380281
  CDS Start-End: 65-2680
gtcggttcccgattctggtccccggcccccagcagcgcctgcccccttcccaccggggccccccatgatgccaccacccttcatgccccctccagggatccccccaccctttcctccgatggggctaccccccatgagtcagagaccaccagctatcccccccatgccacctggcatcctgcccccaatgcttccaccaatgggggcgccaccaccactcacacagataccaggaatggtacctccgatgatgccaggaatgctgatgccagcggtgcctgtcaccgcagcgacggctccgggtgcggacaccgccagctctgctgtggctgggacaggccctccgagggccctatggagtgagcatgtggccccagatgggcgcatctactactacaatgctgacgacaagcagtccgtgtgggagaagcccagcgtgctcaagtccaaggcagagctgctcctgtcccaatgtccctggaaagagtacaagtcggacacaggcaaaccttattactataacaaccagagtaaagagtcccgctggacccggcccaaggatctggatgacctagaggttctagtcaaacaagaggctgcagggaaacagcagcagcagctgccacagacacttcagccacagccacctcagccacagcctgaccccccacctgtgcctcctggccccaccccagtgcccacaggcctcctggaacctgagccaggtgggagtgaagattgtgatgtgttggaggccacccagcccctggaacaggggttcctgcagcagctggaggagggccccagcagttctggacagcatcagccacagcaggaggaggaggaatcaaagccagaaccagagaggtctggcctcagttggagcaaccgggagaaggcaaagcaggcattcaaggaactgctgagggacaaggctgtcccctccaatgcctcatgggaacaggccatgaagatggtggtcaccgacccccgttacagtgccttgcctaaactgagtgagaaaaagcaggcattcaatgcctacaaggcgcagcgggagaaggaggagaaggaggaggcccggctaagggccaaagaggccaagcagaccctgcagcatttcctggagcagcatgaacgcatgacctccaccacccgctaccggcgggcagaacagacctttggggagctggaggtctgggctgtggtccctgagagggatcgaaaagaggtttatgatgatgtcctcttcttcctggccaagaaggagaaggaacaggccaagcagctccggcgccgcaatatccaggccctaaagagcatcctggatgggatgagtagtgtcaacttccaaaccacgtggtcccaggcccagcagtacctcatggataaccccagctttgctcaggaccatcagctgcagaacatggacaaggaagatgcactgatctgttttgaggagcacatccgagctttggagagggaagaggaggaggaacgggagcgggcccggcttcgggagcgacgccaacaacgcaagaatcgggaggccttccagaccttcctggacgagctgcatgagacagggcagctgcactctatgtccacctggatggagctatatccagcagtcagcactgatgtccgctttgccaacatgctgggccagccgggctccacccctctggacttattcaagttctatgtggaggagttgaaggcacgattccatgatgaaaagaagatcattaaggacatccttaaggaccggggcttctgcgtggaggtgaacacggcctttgaggacttcgcccacgtcataagctttgacaagagggctgccgcactggacgcaggcaacatcaagctgaccttcaatagtctgctggagaaagcagaggcacgggagagggagcgggagaaggaggaggcacgcaggatgcggcgcagggaagctgcctttcgaagcatgctgaggcaggctgtgcctgctctggagctaggcactgcctgggaagaggtccgtgagcgttttgtgtgtgactcagcctttgagcagatcaccctggagtcggagcggatccggctcttccgggagttcctacaggtgctggagcagactgaatgccagcacctccacaccaaaggccgaaagcatggcaggaaaggcaagaagcaccatcacaagcgttcccactcaccctcaggctctgagtcagaagaagaggagctgcccccaccatctctccggccccccaagcggaggaggcggaacccctcagagtcaggctctgagccctcttcctcacttgattcagttgaaagtgggggtgctgcccttggaggacggggctccccttcctcccatcttcttggagcagatcatggccttcggaaagccaagaaaccaaaaaagaaaactaagaagagaagacacaagtcgaatagtcctgagagtgagacagaccctgaggagaaagctggcaaggagagcgatgagaaagaacaagaacaggacaaggacagggagctccaacaggcagagctccctaaccgttccccaggctttggaatcaagaaggagaagacaggctgggacacgtcagaaagtgagctgagtgagggtgagctggagaggcggcggcggacactcctacagcagctggatgatcaccagtgacccaatgagctgttctctgcctcgggtctgtgtgaggccatggctcctgggccaccctcaccgtctgcctcagacttcttccttagtctggtctgtgtccactttttctaaagtaaccccacccccagcacaccattgttggcacctctcaaggttgctcttggtgttcaagggtcccctactccctggactagtgcagtccttgccctcagccccagaccagagatgggtggtatatgccatgtggggtgggtgatgccagtagataaaagtgtgagagaaggggtctccagggaagagtcacaggctgttggacgcagcctgggtggcagagggcagggtcatcaccctctagcatcagtgcctgctcctgcctgccctggccctgaggctccaccacttcttcctccacccaggacctaatgtacgtgtgttttgttttttgttttttaaataacaatatttataacatgg

SEQ ID NO: 172263 - DNA, 3307 bp, Homo sapiens
  Payload ID: 13868
  Gene Symbol: PRPF40B
  Gene Name: PRP40 homolog, pre-mRNA processing factor B
  ENST ID: ENST00000548825
  CDS Start-End: 156-2834
ttggggccccgctcgccggcgggagccaccggagccccggccacgaaggggtgcgaccccccgccggccccgccctcccggctgcggcctggccaatcagagcggctcttactggcgggtgggctgagccggcccagctgctcggaggctctggcatgtcggttcccgattctggtccccggcccccagcagcgcctgcccccttcccaccggggccccccatgatgccaccacccttcatgccccctccagggatccccccaccctttcctccgatggggctaccccccatgagtcagagaccaccagctatcccccccatgccacctggcatcctgcccccaatgcttccaccaatgggggcgccaccaccactcacacagataccaggaatggtacctccgatgatgccaggaatgctgatgccagcggtgcctgtcaccgcagcgacggctccgggtgcggacaccgccagctctgctgtggctgggacaggccctccgagggccctatggagtgagcatgtggccccagatgggcgcatctactactacaatgctgacgacaagcagtccgtgtgggagaagcccagcgtgctcaagtccaaggcagagctgctcctgtcccaatgtccctggaaagagtacaagtcggacacaggcaaaccttattactataacaaccagagtaaagagtcccgctggacccggcccaaggatctggatgacctagaggttctagtcaaacaagaggctgcagggaaacagcagcagcagctgccacagacacttcagccacagccacctcagccacagcctgaccccccacctgtgcctcctggccccaccccagtgcccacaggcctcctggaacctgagccaggtgggagtgaagattgtgatgtgttggaggccacccagcccctggaacaggggttcctgcagcagctggaggagggccccagcagttctggacagcatcagccacagcaggaggaggaggaatcaaagccagaaccagagaggtctggcctcagttggagcaaccgggagaaggcaaagcaggcattcaaggaactgctgagggacaaggctgtcccctccaatgcctcatgggaacaggccatgaagatggtggtcaccgacccccgttacagtgccttgcctaaactgagtgagaaaaagcaggcattcaatgcctacaaggcgcagcgggagaaggaggagaaggaggaggcccggctaagggccaaagaggccaagcagaccctgcagcatttcctggagcagcatgaacgcatgacctccaccacccgctaccggcgggcagaacagacctttggggagctggaggtctgggctgtggtccctgagagggatcgaaaagaggtttatgatgatgtcctcttcttcctggccaagaaggagaaggaacaggccaagcagctccggcgccgcaatatccaggccctaaagagcatcctggatgggatgagtagtgtcaacttccaaaccacgtggtcccaggcccagcagtacctcatggataaccccagctttgctcaggaccatcagctgcagaacatggacaaggaagatgcactgatctgttttgaggagcacatccgagctttggagagggaagaggaggaggaacgggagcgggcccggcttcgggagcgacgccaacaacgcaagaatcgggaggccttccagaccttcctggacgagctgcatgagacagggcagctgcactctatgtccacctggatggagctatatccagcagtcagcactgatgtccgctttgccaacatgctgggccagccgggctccacccctctggacttattcaagttctatgtggaggagttgaaggcacgattccatgatgaaaagaagatcattaaggacatccttaaggaccggggcttctgcgtggaggtgaacacggcctttgaggacttcgcccacgtcataagctttgacaagagggctgccgcactggacgcaggcaacatcaagctgaccttcaatagtctgctggagaaagcagaggcacgggagagggagcgggagaaggaggaggcacgcaggatgcggcgcagggaagctgcctttcgaagcatgctgaggcaggctgtgcctgctctggagctaggcactgcctgggaagaggtccgtgagcgttttgtgtgtgactcagcctttgagcagatcaccctggagtcggagcggatccggctcttccgggagttcctacaggtgctggagactgaatgccagcacctccacaccaaaggccgaaagcatggcaggaaaggcaagaagcaccatcacaagcgttcccactcaccctcaggctctgagtcagaagaagaggagctgcccccaccatctctccggccccccaagcggaggaggcggaacccctcagagtcaggctctgagccctcttcctcacttgattcagttgaaagtgggggtgctgcccttggaggacggggctccccttcctcccatcttcttggagcagatcatggccttcggaaagccaagaaaccaaaaaagaaaactaagaagagaagacacaagtcgaatagtcctgagagtgagacagaccctgaggagaaagctggcaaggagagcgatgagaaagaacaagaacaggacaaggacagggagctccaacaggcagagctccctaaccgttccccaggctttggaatcaagaaggagaagacaggctgggacacgtcagaaagtgagctgagtgagggtgagctggagaggcggcggcggacactcctacagcagctggatgatcaccagtgacccaatgagctgttctctgcctcgggtctgtgtgaggccatggctcctgggccaccctcaccgtctgcctcagacttcttccttagtctggtctgtgtccactttttctaaagtaaccccacccccagcacaccattgttggcacctctcaaggttgctcttggtgttcaagggtcccctactccctggactagtgcagtccttgccctcagccccagaccagagatgggtggtatatgccatgtggggtgggtgatgccagtagataaaagtgtgagagaaggggtctccagggaagagtcacaggctgttggacgcagcctgggtggcagagggcagggtcatcaccctctagcatcagtgcctgctcctgcctgccctggccctgaggctccaccacttcttcctccacccaggacctaatgtacgtgtgttttgttttttgttttttaaataacaatatttataacatg

SEQ ID NO: 172264 - DNA, 697 bp, Homo sapiens
  Payload ID: 13868
  Gene Symbol: PRPF40B
  Gene Name: PRP40 homolog, pre-mRNA processing factor B
  ENST ID: ENST00000549547
  CDS Start-End: 1-414
cttaaggaccggggcttctgcgtggaggtgaacacggcctttgaggacttcgcccacgtcataagctttgacaagagggctgccgcactggacgcaggcaacatcaagctgaccttcaatagtctgctggagaaagcagaggcacgggagagggagcgggagaaggaggaggcacgcaggatgcggcgcagggaagctgcctttcgaagcatgctgaggcaggctgtgcctgctctggagctaggcactgcctgggaagaggtccgtgagcgttttgtgtgtgactcagcctttgagcagatcaccctggagtcggagcggatccggctcttccgggagttcctacaggtgctggagactgaatgccagcacctccacaccaaaggccgaaagcatggcaggaaagggctctgagtcagaagaagaggagctgcccccaccatctctccggccccccaagcggaggaggcggaacccctcagagtcaggctctgagccctcttcctcacttgattcagttgaaagtgggggtgctgcccttggaggacggggctccccttcctcccatcttcttggagcagatcatggccttcggaaagccaagaaaccaaaaaagaaaactaagaagagaagacacaagtcgaatagtcctgagagtgagacagaccctgaggagaaagctggcaaggagagcgat

SEQ ID NO: 172265 - DNA, 531 bp, Homo sapiens
  Payload ID: 13868
  Gene Symbol: PRPF40B
  Gene Name: PRP40 homolog, pre-mRNA processing factor B
  ENST ID: ENST00000551063
  CDS Start-End: 514-531
gctaattgaggcgacccggggaggggcgggaccgcggactggatttcgacttccaaattcccacgaggtataggagtctgagggttgcacaggaccttatgcattgtttgactcctccagagcctttagagaaacttctatcaggcccgcctgctaggcactagtcggggagataatgtagccagggagatgtggcggacagaaagggcagagaggctctctgaggagcggatggaggatcgtgggccgctttactgagaaggaagagaccctgcgagaaggagtagtgtcgacttggtcccgtcagccggaccccacctggacggctggggccacttgtggtcgccgggaggtgtcacctctaactcttcgtgtcaggagtttttctacctctccggagttctttggctctcaggaacctagcacggcatcacgcgagtcccggctcagtcggttcccgattctggtccccggcccccagcagcgcctgcccccttcccaccggggccccccatgatgccaccacccttc

SEQ ID NO: 172266 - DNA, 1622 bp, Homo sapiens
  Payload ID: 13869
  Gene Symbol: PRPF40A
  Gene Name: PRP40 pre-mRNA processing factor 40 homolog A
  ENST ID: ENST00000354363
  CDS Start-End: 1-328
actcagatcgcttcttgttggtatgtgtagcggcagtggccgccggcggagcagtctgagcccgacgatgaggccggggacgggagctgagcgtggaggcctcatgatggggcaccctggcatgcattatgccccaatgggaatgcaccctatgggtcagagagcgaatatgcctcctgtacctcatggaatgatgccgcagatgatgccccctatgggagggccaccaatgggacaaatgcctggaatgatgtcgtcagtaatgcctggaatgatgatgtctcatatgtctcaggcttccatgcagcctgccttaccgctaaactaaacggatattcactctgaagtgggataaatgaagatgtggagtttcatgttcatgtagggcaggttttgccactatagtgagttttggtaccatacttgaaaaaagttggctttcagagggttttggtttccagaattgtgggtaaaggattgaggaccttgtgtacacttggtgaccatataacatttaaactactcccgtagtctcggttgctgatctcttttacaatttatagcaagctcggggaactgagaccactaaaagttttgctaagaatatgagtcagaggcttgaggattatacatagcagccaggagtaaatagtatggatgtagcagcaggtacagcatctggtgcaaaatcaatgtggactgaacataaatcacctgatggaaggacttactactacaacactgaaaccaaacagtctacctgggagaaaccagatgatcttaaaacacctgctgagcaactcttatctaaatgcccctggaaggaatacaaatcagattctggaaagccttactattataattctcaaacaaaagaatctcgctgggccaaacctaaagaacttgaggatcttgaaggataccagaataccattgttgctggaagtcttattacaaaatcaaacctgcatgcaatgatcaaagctgaagaaagcagtaagcaagaagagtgcaccacaacatcaacagccccagtccctacaacagaaattccgaccacaatgagcaccatggctgctgccgaagcagcagctgctgttgttgcagcagcagcagcggcagcagcagcagcagctgcagccaatgctaatgcttccacttctgcttctaatactgtcagtggaactgttccagttgttcctgagcctgaagttacttccattgttgctactgttgtagataatgagaatacagtaactatttcaactgaggaacaagcacaacttactagtacccctgctattcaggatcaaagtgtggaagtatccagtaatactggagaagaaacatctaagcaagaaactgtagctgattttactcccaaaaaagaagaggaggagagccaaccagcaaagaaaacatacacttggaatacaaaggaagaggcaaagcaagcttttaaagaattattgaaagaaaagcgggtaccatcgaatgcttcatgggagcaggctatgaaaatgattattaatgatccacgatacagtgctttggcaaagttaagtgaaaaaaagcaagcctttaatgcctataaagtccagacagaaaaagaagaaaaagaa

SEQ ID NO: 172267 - DNA, 8048 bp, Homo sapiens
  Payload ID: 13869
  Gene Symbol: PRPF40A
  Gene Name: PRP40 pre-mRNA processing factor 40 homolog A
  Uniprot ID: O75400
  ENST ID: ENST00000410080
  CDS Start-End: 543-3335
gatcgaaccctctcctccgaacccctcctttcgccttccccgcctcctcccctccgcctcgagcaccgcgcgcgcgcattcggtcccagccaccgctaacactacaggctgcttacccccgccccctccaccctacccctggcggcctcaggtttgtggggcgtacgtaactcgggcggggagggtgaaggtggcagacccccactgccccaccccctacggggtgaggcggtctaagctcgggaagctgggacactgttgtcttcccttcccctggggaagttggtagagttttcccgacggaggactcggcgcagaaacttcctccgtcctcctcctcccccccccccatgcaggcgacgccgagtgaggctgaggctgggggcgaatcgccgcagagctgcgtgtcggcggcgcattctgattggacagcggggaagcccgtcagcctgttggccccgctgatcccgccccgtagcgcagggcagcctttaacctttagccccagtgggcgccagccactcagatcgcttcttgttggtatgtgtagcggcagtggccgccggcggagcagtctgagcccgacgatgaggccggggacgggagctgagcgtggaggcctcatgatggggcaccctggcatgcattatgccccaatgggaatgcaccctatgggtcagagagcgaatatgcctcctgtacctcatggaatgatgccgcagatgatgccccctatgggagggccaccaatgggacaaatgcctggaatgatgtcgtcagtaatgcctggaatgatgatgtctcatatgtctcaggcttccatgcagcctgccttaccgccaggagtaaatagtatggatgtagcagcaggtacagcatctggtgcaaaatcaatgtggactgaacataaatcacctgatggaaggacttactactacaacactgaaaccaaacagtctacctgggagaaaccagatgatcttaaaacacctgctgagcaactcttatctaaatgcccctggaaggaatacaaatcagattctggaaagccttactattataattctcaaacaaaagaatctcgctgggccaaacctaaagaacttgaggatcttgaaggataccagaataccattgttgctggaagtcttattacaaaatcaaacctgcatgcaatgatcaaagctgaagaaagcagtaagcaagaagagtgcaccacaacatcaacagccccagtccctacaacagaaattccgaccacaatgagcaccatggctgctgccgaagcagcagctgctgttgttgcagcagcagcagcggcagcagcagcagcagctgcagccaatgctaatgcttccacttctgcttctaatactgtcagtggaactgttccagttgttcctgagcctgaagttacttccattgttgctactgttgtagataatgagaatacagtaactatttcaactgaggaacaagcacaacttactagtacccctgctattcaggatcaaagtgtggaagtatccagtaatactggagaagaaacatctaagcaagaaactgtagctgattttactcccaaaaaagaagaggaggagagccaaccagcaaagaaaacatacacttggaatacaaaggaagaggcaaagcaagcttttaaagaattattgaaagaaaagcgggtaccatcgaatgcttcatgggagcaggctatgaaaatgattattaatgatccacgatacagtgctttggcaaagttaagtgaaaaaaagcaagcctttaatgcctataaagtccagacagaaaaagaagaaaaagaagaagcaagatcaaagtacaaagaggctaaggaatcctttcagcgttttcttgaaaatcatgagaaaatgacttctacaaccagatacaaaaaagcagagcaaatgtttggagagatggaagtttggaatgcaatatcagaacgtgatcgtcttgaaatctatgaagatgttttgttctttctttcaaaaaaagaaaaggaacaagcaaagcagttgcgaaagagaaattgggaagccttaaaaaacatacttgacaacatggctaatgtaacatactctaccacttggtctgaagcccagcagtatctgatggataatccaacttttgcagaagatgaggagttacaaaatatggacaaagaagatgcattaatttgctttgaagaacacattcgggctttagaaaaggaggaagaagaagaaaaacagaagagtttgctgagagaaaggagacgacagcgaaaaaatagggaatctttccagatatttttagatgaattacatgaacatggacaactgcattctatgtcatcttggatggaattgtatccaactattagttctgatattagattcactaatatgcttggtcagcctggatcaactgcacttgatcttttcaagttttatgttgaggatcttaaagcacgttatcatgacgagaagaagataataaaagacattctaaaggataaaggatttgtagttgaagtaaacactacttttgaagattttgtggcgataatcagttcaactaaaagatcaactacattagatgctggaaatatcaaattggctttcaatagtttactagaaaaggcagaagcccgtgaacgtgaaagagaaaaagaagaggctcggaagatgaaacgaaaagaatctgcatttaagagtatgttaaaacaagctgctcctccgatagaattggatgctgtctgggaagatatccgtgagagatttgtaaaagagccagcatttgaggacataactctagaatctgaaagaaaacgaatatttaaagattttatgcatgtgcttgagcatgaatgtcagcatcatcattcaaagaacaagaaacattctaagaaatctaaaaaacatcataggaaacgttcccgctctcgatcggggtcagattcagatgatgatgatagccattcaaagaaaaaaagacagcgatcagagtctcgttctgcttcagaacattcttctagtgcagagtctgagagaagttataaaaagtcaaaaaagcataagaagaaaagtaagaagaggagacataaatctgactctccagaatccgatgctgagcgagagaaggataaaaaagaaaaagatcgggaaagtgaaaaagacagaactagacaaagatcagaatcaaaacacaaatcgcctaagaaaaagactggaaaggattctggtaattgggatacttctggcagcgaactgagtgaaggggaattggaaaagcgcagaagaacccttttggagcaactggatgatgatcaataaattataccaaatatatgtttacagtatgatttaaagtctgattcagaccagggactctattttaagttcaactgaaataacactgggttttaattatatcacaggaaaaaaaaagtgcatttaagtattgttatcgtggactttataaaagcaaaggaaattgaaagtaacttttgattctgtatcaagaatcatattttcatacagtcataactgtctttctgtgaccctttcacagggcactgtaggatggattaaaggtggcaatttactgataactgcagatgtctctactttgttctaaaatctaagtcatgaggtgatttgatttactttatagaagctggattttgaagatctaatgaaaaattttttgataatatagtagtacaaaaaaagcaccagcaactgataaaaattgcttttttgtgcgctacccaactggttaaagccaatgtgatcttttatggtgaaactcctaagaaacaggtggttttgctggaaacttggtagacccttaattatagtggtgctaatgagcactactgtaatataaagccaccattattttttatcaaacatctgaatacattttacaaaggctattgtgagggcattattttgagcatctattttgaggtgatgtttaaaaaaactttaacatcaaatcaaattgtaaattaatttaaatatattgccttaaggacctactaaagaatgtgccaccagactttaagtgatagttgcaatatccttgtctaaaaaaaaaaaaaaagttgacttaaacattttctttaacagttgtcttttttttctaaattcagtctttctcttgcttttttttccctgctattgaggaagtattttgccttccctactcactgagaagtattgacttcgtggtacacattctaaagcatttctgatttgaatatttttgtacatttttatcaattattaaaccttctcttctagtgtgtactagtatttatttctacttaaactgctcagctctaaagaaattgtatgatcactttaaaggtactaaatccctgaaattttgcttcatcttacccacaccgctagtttactttccttttttaatatttaagaatattataaatcagtgcatttgaggtccctagatttgtttttcacctatgaattttttacagactattttagagaggctgtggtttgaagacagaatactctttacatgctaacttttgaaggttggtaatgtaatttatactattttccttcagtgcaggagattttttaagtaaataagtaaattttagcacctattcttcggtattatctgtgttattcttttaatgtgtacacttgaagagatcctatttcaaagttgggattttgaagaacaaaaagtttttttcttacccatcctagtgagttttgaaagtgggcctgaccagaatgtctctttcccattttgccccgtttgaattaaatataatgtctactctttaaaggctgaaggggtgggtgaggggattgtttctcattttgtctcccaagtcatttttctgctgtgaaatatgaccaggcttgtaggaagactcatcttggagaaaatgtgaagtaatcaaattgcttgagattagtctcctattgtatattagagccaaaacacataataactttggcaacagggagttgtctagactcaattttcagaggtcccattgtagtgagttaatattgctaatcatgtcaatcacttgacatggaagtcagtggcaaatctttaaagtatgcatttgatactggcaaatatatactactgatgtttcacaaaagaatcttagaatctgtagaaaacattaattacttccatgaattatttctaaagtataactttaaagttttgatttttctatttaaataaaaagctattgatgtgttttagcatgtcctcaaaatagattcctgtatttcttacagagataatcttactataaccgcaaatccctacaacacagtataaagtttccctgtagttcacccatgaaaattatttgacttaaaaacaaccatagtagtaagccaattgcaattcaaaatgcaacatccttgccataaaagatgtaacttaagtgactgtgatcctttgtctacctttcaggatcccatcaaatgggatttagttgctagaaagatacttgacagtctgaaggcacaggtgataagattttgttctctgtgaatatttttaaactaataggttatgtttttaaatcttcaatttggtaaaaaactgaaacgtcttggaatattggttctattagagttaaatatggtaaaacaggaaagcgtgtttattttcagataaggggaatttatacttttcattaaagtcttggagtcttaggaaaatgttgagggtttgtcttcccccagtgtcattaatactaatgaactattagatcaaattcacttatacatttaatatcatagttattcaaaatcaggactttaaatatttttttctcccagttcatatttctttgtgcgaaaattgaatttgtatgaaaagttagataattaagctaatcaagtatgaagtatacactcttcctaagtgaatttaaataatgtaatgcttttaaataaaagcagtggtcccaccacatttttttcagcatagtagctggcattttgttatcattagccagagtagcttcagcatataagttattgatgttttccaacttcaaaagtgcattttatgcctcccagtaaatttgataatgatttgtcacagctttgtcatcttttgacttttgcttatgggcctcacttcgtacaactataacatgaaaaaggattgtcctaaagtaagggaatcagttaatggtaggatgaagaaactgtaaaaactcctagaaaaaaacctgtgtgcatttttctggaaagttttcaaactgtgtaattcagttttcattcaattatataatttggttatatgctttaaaaaacatttgtctaaatgttcccggttttcttctggtcttagagtcagctgagtgctggctatgcagccactcgtatttttgcatccagaaaggagtaactccctttatatgaagatttttttttttaagcttagatgctatgtaagagaaaactatttgtaatcacatagtacccagggaggagtgatgaatgcttttttaaaaaaggatatttaagtatattatgtaatttaaatataaattatcaaactaaaaaacttcagcttttaaaactttctaaacaaaatgaagcaaagtacattaattccttctatcttaaatctgagactttttattttcccttgggtatatatttctctcagtgttaggtagatgttaattcaaccatcctacattctctatataaaattacactcattttacatgaaagcaaaataatgtcgttactttcatggaactgtgttctaacaggcttataatctcattctgtgcttctggtaatggcgtataccagtctgatgattcttaccatccttattcttacattactcttccaattgttttgattttaactggtggtcatgtaagttcctcggtggcagggatttatctggttcatttactgttatatatccttgtggaataggacagtgcctggcatataataggcacttttggaatgaatgtaaaatactagttgaaatatgtattcatctggcatccatggtacccatcatctgtattaaagggcttaaaaaagcatcattgcaataaaccatactaacccaccactaaagtcacagtcataattgaagtgcacccaaaataaggtccagtgactgtaccttagcttttacttcagacatgtccaaaacttgtgagaacatacaatttaaagttgaaaactcatcattttgggctatttttgaatagggctgaaatatggtgacatgtcaggcactcagttttttggagctgtcttaaaggtgaggtggaaagtgagagatgattttgctctaattacccacacattctccctaaccctccattttaagacacttagctataatagcttaagactatcaaaactgcttttgtgattctcagtaggatctagttcaaagccatctcagtgctagtgattggtaattgttaatttgatggtaattaccctacttgtaaagttgacattcatactggctaatcctccctgcccctagtcgtggacaatgaaacagtgagtggctggtgaattagatcagattcaaactaagccattccttgatgctattcttcactgctgttccttagggtatctaaatgtgttatttataaacatttttgggggctcctgcctgcaaacttcggtaggtgttggtcttccccacctctacaactgagccaaggacttgttctgaaaggtgagtaataaataagggaacaaggtttctattttctgtgtttgtaattaccagattttcacctctgtttatatattattctgatgtaaaagaacctcatagttatataaaattagaccttttgtaaataaatataatttattagaaaaaatggtatcttttactaaattggatttgtgtcagttttttcctttaagcaccactcaggcagcaagctctatgctgtgagagttgctggaggcccacgttatgttttctcagtgtaattcctctttttcttgataaaaaga

SEQ ID NO: 172268 - DNA, 490 bp, Homo sapiens
  Payload ID: 13869
  Gene Symbol: PRPF40A
  Gene Name: PRP40 pre-mRNA processing factor 40 homolog A
  ENST ID: ENST00000448428
  CDS Start-End: 1-490
agatcgcttcttgttggtatgtgtagcggcagtggccgccggcggagcagtctgagcccgacgatgaggccggggacgggagctgagcgtggaggcctcatgatggggcaccctggcatgcattatgccccaatgggaatgcaccctatgggtcagagagcgaatatgcctcctgtacctcatggaatgatgccgcagatgatgccccctatgggagggccaccaatgggacaaatgcctggaatgatgtcgtcagtaatgcctggaatgatgatgtctcatatgtctcaggcttccatgcagcctgccttaccgcaactcttatctaaatgcccctggaaggaatacaaatcagattctggaaagccttactattataattctcaaacaaaagaatctcgctgggccaaacctaaagaacttgaggatcttgaaggataccagaataccattgttgctggaagtcttattacaaaatcaaacctgcatg

SEQ ID NO: 172269 - DNA, 1043 bp, Homo sapiens
  Payload ID: 13869
  Gene Symbol: PRPF40A
  Gene Name: PRP40 pre-mRNA processing factor 40 homolog A
  ENST ID: ENST00000493468
  CDS Start-End: 1-1041
gagcgtggaggcctcatggtgagtgaaatggagagccatcctccctcgcagggtcctggggacggggagcggagattgtccggctcaagcctctgctccggctcttgggtctctgctgacggcttcctgaggagacggccctcgatggggcaccctggcatgcattatgccccaatgggaatgcaccctatgggtcagagagcgaatatgcctcctgtacctcatggaatgatgccgcagatgatgccccctatgggagggccaccaatgggacaaatgcctggaatgatgtcgtcagtaatgcctggaatgatgatgtctcatatgtctcaggcttccatgcagcctgccttaccgccaggagtaaatagtatggatgtagcagcaggtacagcatctggtgcaaaatcaatgtggactgaacataaatcacctgatggaaggacttactactacaacactgaaaccaaacagtctacctgggagaaaccagatgatcttaaaacacctgctgagcaactcttatctaaatgcccctggaaggaatacaaatcagattctggaaagccttactattataattctcaaacaaaagaatctcgctgggccaaacctaaagaacttgaggatcttgaagcaatgatcaaagctgaagaaagcagtaagcaagaagagtgcaccacaacatcaacagccccagtccctacaacagaaattccgaccacaatgagcaccatggctgctgccgaagcagcagctgctgttgttgcagcagcagcagcggcagcagcagcagcagctgcagccaatgctaatgcttccacttctgcttctaatactgtcagtggaactgttccagttgttcctgagcctgaagttacttccattgttgctactgttgtagataatgagaatacagtaactatttcaactgaggaacaagcacaacttactagtacccctgctattcaggatcaaagtgtggaagtatccagtaatactggagaagaaacatctaagcaagaaactgtagctgagtaagt

SEQ ID NO: 172270 - DNA, 1358 bp, Homo sapiens
  Payload ID: 13869
  Gene Symbol: PRPF40A
  Gene Name: PRP40 pre-mRNA processing factor 40 homolog A
  ENST ID: ENST00000545856
  CDS Start-End: 14-1358
tctgagcccgacgatgaggccggggacgggagctgagcgtggaggcctcatggtgagtgaaatggagagccatcctccctcgcagggtcctggggacggggagcggagattgtccggctcaagcctctgctccggctcttgggtctctgctgacggcttcctgaggagacggccctcgatggggcaccctggcatgcattatgccccaatgggaatgcaccctatgggtcagagagcgaatatgcctcctgtacctcatggaatgatgccgcagatgatgccccctatgggagggccaccaatgggacaaatgcctggaatgatgtcgtcagtaatgcctggaatgatgatgtctcatatgtctcaggcttccatgcagcctgccttaccgccaggagtaaatagtatggatgtagcagcaggtacagcatctggtgcaaaatcaatgtggactgaacataaatcacctgatggaaggacttactactacaacactgaaaccaaacagtctacctgggagaaaccagatgatcttaaaacacctgctgagcaactcttatctaaatgcccctggaaggaatacaaatcagattctggaaagccttactattataattctcaaacaaaagaatctcgctgggccaaacctaaagaacttgaggatcttgaaggataccagaataccattgttgctggaagtcttattacaaaatcaaacctgcatgcaatgatcaaagctgaagaaagcagtaagcaagaagagtgcaccacaacatcaacagccccagtccctacaacagaaattccgaccacaatgagcaccatggctgctgccgaagcagcagctgctgttgttgcagcagcagcagcggcagcagcagcagcagctgcagccaatgctaatgcttccacttctgcttctaatactgtcagtggaactgttccagttgttcctgagcctgaagttacttccattgttgctactgttgtagataatgagaatacagtaactatttcaactgaggaacaagcacaacttactagtacccctgctattcaggatcaaagtgtggaagtatccagtaatactggagaagaaacatctaagcaagaaactgtagctgattttactcccaaaaaagaagaggaggagagccaaccagcaaagaaaacatacacttggaatacaaaggaagaggcaaagcaagcttttaaagaattattgaaagaaaagcgggtaccatcgaatgcttcatgggagcaggctatgaaaatgattattaatgatccacgatacagtgctttggcaaagttaagtgaaaaaaagcaagcctttaatgcctataaagtccagacag

SEQ ID NO: 172271 - DNA, 2043 bp, Homo sapiens
  Payload ID: 13870
  Gene Symbol: PRR5-ARHGAP8
  Gene Name: PRR5-ARHGAP8 readthrough
  ENST ID: ENST00000352766
  CDS Start-End: 1-1932
atgaggactctccgcaggttgaagttcatgagttcgcccagcctcagtgacctgggcaagagagagccggccgccgccgcggacgagcggggcacgcagcagcgccgggcctgcgccaacgccacctggaacagcatccacaacggggtgatcgccgtcttccagcgcaaggggctgcccgaccaggagctcttcagcctcaacgagggcgtccggcagctgttgaagacagagctggggtccttcttcacggagtacctgcagaaccagctgctgacaaaaggcatggtgatccttcgggacaagattcgcttctatgagggacagaagctgctggactcactggcagagacctgggacttcttcttcagtgacgtgctgcccatgctgcaggccatcttctacccggtgcagggcaaggagccatcggtgcgccagctggccctgctgcacttccggaatgccatcaccctcagtgtgaagctagaggatgcgctggcccgggcccatgcccgtgtgccccctgccatcgtgcagatgctgctggtgctgcagggggtacatgagtccaggggcgtgactgaggactacctgcgcctggagacgctggtccagaaggtggtgtcgccatacctgggcacctacggcctccactccagcgaggggcccttcacccattcctgcatcctggagctgcagagagacaaggcggcggcggctgctgtgctgggtgcagtgaggaagaggccctcggtggtgcccatggctggccaggatcctgcgctgagcacgagtcacccgttctacgacgtggccagacatggcattctgcaggtggcaggggatgaccgctttggaagacgtgttgtcacgttcagctgctgccggatgccaccctcccacgagctggaccaccagcggctgctggagtacaagaagaacttgaaggccctctacgtggtgcaccccaccagcttcatcaaggtcctgtggaacatcttgaagcccctcatcagtcacaagtttgggaagaaagtcatctatttcaactacctgagtgagctccacgaacaccttaaatacgaccagctggtcatccctcccgaagttttgcggtacgatgagaagctccagagcctgcacgagggccggacgccgcctcccaccaagacaccaccgccgcggcccccgctgcccacacagcagtttggcgtcagtctgcaatacctcaaagacaaaaatcaaggcgaactcatcccccctgtgctgaggttcacagtgacgtacctgagagagaaaggcctgcgcaccgagggcctgttccggagatccgccagcgtgcagaccgtccgcgagatccagaggctctacaaccaagggaagcccgtgaactttgacgactacggggacattcacatccctgccgtgatcctgaagaccttcctgcgagagctgccccagccgcttctgaccttccaggcctacgagcagattctcgggatcacctgtgtggagagcagcctgcgtgtcactggctgccgccagatcttacggagcctcccagagcacaactacgtcgtcctccgctacctcatgggcttcctgcatgcggtgtcccgggagagcatcttcaacaaaatgaacagctctaacctggcctgtgtcttcgggctgaatttgatctggccatcccagggggtctcctccctgagtgcccttgtgcccctgaacatgttcactgaactgctgatcgagtactatgaaaagatcttcagcaccccggaggcacctggggagcacggcctggcaccatgggaacaggggagcagggcagcccctttgcaggaggctgtgccacggacacaagccacgggcctcaccaagcctaccctacctccgagtcccctgatggcagccagaagacgtctctagtgttgcgaacactctgtatatttcgagctacctcccacacctgtctgtgcacttgtatgttttgtaaacttggcatctgtaaaaataaccagccattagatgaattcagaa

SEQ ID NO: 172272 - DNA, 2013 bp, Homo sapiens
  Payload ID: 13870
  Gene Symbol: PRR5-ARHGAP8
  Gene Name: PRR5-ARHGAP8 readthrough
  ENST ID: ENST00000361473
  CDS Start-End: 243-1937
ccgcgcgcctggcgctccacgctgagcctctccgtgcaatgattaacccggcggggcggccggcgcgggacccgagacggaggcgcggggccggggcgggaccccgcaggaccgctcggcttcctgctctcgccggagtttccgcgtagagggcgcatcgccggcccggggcccttggtgcggcgtggcgcagggcgcggcgtggggcgcgcgtgggcgcggcgcaggcggcccgggtcaccatgaggactctccgcaggttgaagttcatgagttcgcccagcctcagtgacctgggcaagagagagccggccgccgccgcggacgagcggggcacgcagcagcgccgggcctgcgccaacgccacctggaacagcatccacaacggggtgatcgccgtcttccagcgcaaggggctgcccgaccaggagctcttcagcctcaacgagggcgtccggcagctgttgaagacagagctggggtccttcttcacggagtacctgcagaaccagctgctgacaaaaggcatggtgatccttcgggacaagattcgcttctatgaggagctgcagagagacaaggcggcggcggctgctgtgctgggtgcagtgaggaagaggccctcggtggtgcccatggctggccaggatcctgcgctgagcacgagtcacccgttctacgacgtggccagacatggcattctgcaggtggcaggggatgaccgctttggaagacgtgttgtcacgttcagctgctgccggatgccaccctcccacgagctggaccaccagcggctgctggagtatttgaagtacacactggaccaatacgttgagaacgattataccatcgtctatttccactacgggctgaacagccggaacaagccttccctgggctggctccagagcgcatacaaggagttcgataggaagtacaagaagaacttgaaggccctctacgtggtgcaccccaccagcttcatcaaggtcctgtggaacatcttgaagcccctcatcagtcacaagtttgggaagaaagtcatctatttcaactacctgagtgagctccacgaacaccttaaatacgaccagctggtcatccctcccgaagttttgcggtacgatgagaagctccagagcctgcacgagggccggacgccgcctcccaccaagacaccaccgccgcggcccccgctgcccacacagcagtttggcgtcagtctgcaatacctcaaagacaaaaatcaaggcgaactcatcccccctgtgctgaggttcacagtgacgtacctgagagagaaaggcctgcgcaccgagggcctgttccggagatccgccagcgtgcagaccgtccgcgagatccagaggctctacaaccaagggaagcccgtgaactttgacgactacggggacattcacatccctgccgtgatcctgaagaccttcctgcgagagctgccccagccgcttctgaccttccaggcctacgagcagattctcgggatcacctgtgtggagagcagcctgcgtgtcactggctgccgccagatcttacggagcctcccagagcacaactacgtcgtcctccgctacctcatgggcttcctgcatgcggtgtcccgggagagcatcttcaacaaaatgaacagctctaacctggcctgtgtcttcgggctgaatttgatctggccatcccagggggtctcctccctgagtgcccttgtgcccctgaacatgttcactgaactgctgatcgagtactatgaaaagatcttcagcaccccggaggcacctggggagcacggcctggcaccatgggaacaggggagcagggcagcccctttgcaggaggctgtgccacggacacaagccacgggcctcaccaagcctaccctacctccgagtcccctgatggcagccagaagacgtctctagtgttgcgaacactctgtatatttcgagctacctcccacacctgtctgtgcacttgtatgttttgtaaacttggcat

SEQ ID NO: 172273 - DNA, 1590 bp, Homo sapiens
  Payload ID: 13870
  Gene Symbol: PRR5-ARHGAP8
  Gene Name: PRR5-ARHGAP8 readthrough
  ENST ID: ENST00000515632
  CDS Start-End: 1-1514
agctggggtccttcttcacggagtacctgcagaaccagctgctgacaaaaggcatggtgatccttcgggacaagattcgcttctatgaggagctgcagagagacaaggcggcggcggctgctgtgctgggtgcagtgaggaagaggccctcggtggtgcccatggctggccaggatcctgcgctgagcacgagtcacccgttctacgacgtggccagacatggcattctgcaggtggcaggggatgaccgctttggaagacgtgttgtcacgttcagctgctgccggatgccaccctcccacgagctggaccaccagcggctgctggagtatttgaagtacacactggaccaatacgttgagaacgattataccatcgtctatttccactacgggctgaacagccggaacaagccttccctgggctggctccagagcgcatacaaggagttcgataggaagtacaagaagaacttgaaggccctctacgtggtgcaccccaccagcttcatcaaggtcctgtggaacatcttgaagcccctcatcagtcacaagtttgggaagaaagtcatctatttcaactacctgagtgagctccacgaacaccttaaatacgaccagctggtcatccctcccgaagttttgcggtacgatgagaagctccagagcctgcacgagggccggacgccgcctcccaccaagacaccaccgccgcggcccccgctgcccacacagcagtttggcgtcagtctgcaatacctcaaagacaaaaatcaaggcgaactcatcccccctgtgctgaggttcacagtgacgtacctgagagagaaaggcctgcgcaccgagggcctgttccggagatccgccagcgtgcagaccgtccgcgagatccagaggctctacaaccaagggaagcccgtgaactttgacgactacggggacattcacatccctgccgtgatcctgaagaccttcctgcgagagctgccccagccgcttctgaccttccaggcctacgagcagattctcgggatcacctcgctgcccctggcccctctggagctcagcagggagccccatgcccttccaggtgtggagagcagcctgcgtgtcactggctgccgccagatcttacggagcctcccagagcacaactacgtcgtcctccgctacctcatgggcttcctgcatgcggtgtcccgggagagcatcttcaacaaaatgaacagctctaacctggcctgtgtcttcgggctgaatttgatctggccatcccagggggtctcctccctgagtgcccttgtgcccctgaacatgttcactgaactgctgatcgagtactatgaaaagatcttcagcaccccggaggcacctggggagcacggcctggcaccatgggaacaggggagcagggcagcccctttgcaggaggctgtgccacggacacaagccacgggcctcaccaagcctaccctacctccgagtcccctgatggcagccagaagacgtctctagtgttgcgaacactctgtatatttcgagctacctcccacacctgtctgtgcacttgtatgttttgtaaacttggcat

SEQ ID NO: 172274 - DNA, 2997 bp, Homo sapiens
  Payload ID: 13871
  Gene Symbol: PRUNE
  Gene Name: prune exopolyphosphatase
  Uniprot ID: Q86TP1
  ENST ID: ENST00000271620
  CDS Start-End: 157-1518
ggaggccgattcgccgtgtggcgggttcgagtcccgcctcctgactctggcctctagtccctgagtcccgggcgggctgcattcgtcggggaaacctctcctcgaccaggggcacctctactcgaccaggggcgacggcgtactttgggcttcatcatggaggactacctgcagggttgtcgagctgctctgcaggagtcccgacctctacatgttgtgctgggaaatgaagcctgtgatttggactccacagtgtctgctcttgccctggctttttacctagcaaagacaactgaggctgaggaagtctttgtgccagttttaaatataaaacgttctgaactacctctgcgaggtgacattgtcttctttcttcagaaggttcatattccagagagtatcttgatttttcgggatgagattgacctccatgcattataccaggctggccaactcaccctcatccttgtcgaccatcatatcttatccaaaagtgacacagccctagaggaggcagtagcagaggtgctagaccatcgacccatcgagccgaaacactgccctccctgccatgtttcagttgagctggtggggtcctgtgctaccctggtgaccgagagaatcctgcagggggcaccagagatcttggacaggcaaactgcagcccttctgcatggaaccatcatcctggactgtgtcaacatggaccttaaaattggaaaggcaaccccaaaggacagcaaatatgtggagaaactagaggcccttttcccagacctacccaagagaaatgatatatttgattccctacaaaaggcaaagtttgatgtatcaggactgaccactgagcagatgctgagaaaagaccagaagactatctatagacaaggcgtcaaggtggccattagtgcaatatatatggatttggaggcctttctgcagaggtctaacctccttgcagatctccatgctttctgccaggctcacagctatgatgtcctggttgccatgactatctttttcaacactcacaatgagccagtgcggcagttggctattttctgtccccatgtggcactccaaacaacgatctgtgaagtcctggaacgctcccactctccacccctgaagctgacccctgcctcaagtacccaccctaacctccatgcctatcttcaaggcaacacccaggtctctcgaaagaaacttctgcccctgctccaggaagccctgtcagcatattttgactccatgaagatcccttcaggacagcctgagacagcagatgtgtccagggagcaagtggacaaggaattggacagggcaagtaactccctgatttctggcctgagtcaagatgaggaggaccctccgctgcccccgacgcccatgaacagcttggtggatgagtgccctctagatcaggggctgcctaaactctctgctgaggccgtcttcgagaagtgcagtcagatctcactgtcacagtctaccacagcctccctgtccaagaagtgactgttgagaggcgaggaggtagtgggtgaggctacctgactcacttcaaatgcatgttttgagatgtttggagattcagcaattctgtcttcattgctccaggatctggtatactgttctcataaaactgagaggagaaaaaaagtgaaagaaagcagctgctttaagaatggttttccaccttttccccctaatctctaccaatcagacacattttattatttaaatctgcacctctctctattttatttgccaggggcacgatgtgacatatctgcagtcccagcacagtgggacaaaaagaatttagaccccaaaagtgtcctcggcatggatcttgaacagaaccagtatctgtcatggaactgaacattcatcgatggtctccatgtattcatttattcacttgttcattcaagtatttattgaatacctgcctcaagctagagagaaaagagagtgcgctttggaaatttattccagttttcagcctacagcagattatcagctcggtgacttttctttctgccaccatttaggtgatggtgtttgattcagagatggctgaatttctattcttagcttattgtgactgtttcagatctagtttgggaacagattagaggccattgtcttctgtcctgatcaggtggcctggctgtttctttggatccctctgtcccagagccacccagaaccctgactcttgagaatcaagaaaacacccagaaaggccttaatgacctcataggcactcttccaaaaagacaacagaactggaatgagaggcctgggtctgtctcctgccttagcaggcctatcaatttcttgtcaatctctttttttccttgctcacattaaaaggaagcatggagttctaatgctcccataaactatgtattttggcaagacacttcactactccaggtctcactttccccatctgtaaaacagggtttggactaggtgttccctggtattctgtgatctgcctcttgctgccattctttctctcctctgcttctctgtatttttcttctgttatccctgggggtgctcaggttcacttgattgtctgtatttctgtgtggttgtagcaaggactcagcctcatgtagcacgaataggggtgtggttcatggcgtgttgacccagcagagcactccctcccactaacttgttctgcatgtgtagagtctccccattttttttaacgcaaccctttcccctttttcctaccccacagctctgttccatgtaagttgccaacagtttcactgaacagtggggtatgtgatggttttggcatgacatcttcagtatgagggggacagtttgacttcactttgagggtgtgatgtctgtagctatgtggaaggtaaaaatagtggtgtgatcatgaaccaaaggaatttatgttttgtaacttgggtactttattttgcattttgttatactattaaataattttttcctgtt

SEQ ID NO: 172275 - DNA, 2214 bp, Homo sapiens
  Payload ID: 13871
  Gene Symbol: PRUNE
  Gene Name: prune exopolyphosphatase
  Uniprot ID: Q86TP1
  ENST ID: ENST00000368934
  CDS Start-End: 81-737
tcctgcagggggcaccagagatcttggacaggcaaactgcagcccttctgcatggaaccatcatcctggactgtgtcaacatggaccttaaaattggaaaggcaaccccaaaggacagcaaatatgtggagaaactagaggcccttttcccagacctacccaagagaaatgatatatttgattccctacaaaaggcaaagtttgatgtatcaggactgaccactgagcagatgctgagaaaagaccagaagactatctatagacaaggcgtcaaggtggccattagtgcaatatatatggatttggagatctgtgaagtcctggaacgctcccactctccacccctgaagctgacccctgcctcaagtacccaccctaacctccatgcctatcttcaaggcaacacccaggtctctcgaaagaaacttctgcccctgctccaggaagccctgtcagcatattttgactccatgaagatcccttcaggacagcctgagacagcagatgtgtccagggagcaagtggacaaggaattggacagggcaagtaactccctgatttctggcctgagtcaagatgaggaggaccctccgctgcccccgacgcccatgaacagcttggtggatgagtgccctctagatcaggggctgcctaaactctctgctgaggccgtcttcgagaagtgcagtcagatctcactgtcacagtctaccacagcctccctgtccaagaagtgactgttgagaggcgaggaggtagtgggtgaggctacctgactcacttcaaatgcatgttttgagatgtttggagattcagcaattctgtcttcattgctccaggatctggtatactgttctcataaaactgagaggagaaaaaaagtgaaagaaagcagctgctttaagaatggttttccaccttttccccctaatctctaccaatcagacacattttattatttaaatctgcacctctctctattttatttgccaggggcacgatgtgacatatctgcagtcccagcacagtgggacaaaaagaatttagaccccaaaagtgtcctcggcatggatcttgaacagaaccagtatctgtcatggaactgaacattcatcgatggtctccatgtattcatttattcacttgttcattcaagtatttattgaatacctgcctcaagctagagagaaaagagagtgcgctttggaaatttattccagttttcagcctacagcagattatcagctcggtgacttttctttctgccaccatttaggtgatggtgtttgattcagagatggctgaatttctattcttagcttattgtgactgtttcagatctagtttgggaacagattagaggccattgtcttctgtcctgatcaggtggcctggctgtttctttggatccctctgtcccagagccacccagaaccctgactcttgagaatcaagaaaacacccagaaaggccttaatgacctcataggcactcttccaaaaagacaacagaactggaatgagaggcctgggtctgtctcctgccttagcaggcctatcaatttcttgtcaatctctttttttccttgctcacattaaaaggaagcatggagttctaatgctcccataaactatgtattttggcaagacacttcactactccaggtctcactttccccatctgtaaaacagggtttggactaggtgttccctggtattctgtgatctgcctcttgctgccattctttctctcctctgcttctctgtatttttcttctgttatccctgggggtgctcaggttcacttgattgtctgtatttctgtgtggttgtagcaaggactcagcctcatgtagcacgaataggggtgtggttcatggcgtgttgacccagcagagcactccctcccactaacttgttctgcatgtgtagagtctccccattttttttaacgcaaccctttcccctttttcctaccccacagctctgttccatgtaagttgccaacagtttcactgaacagtggggtatgtgatggttttggcatgacatcttcagtatgagggggacagtttgacttcactttgagggtgtgatgtctgtagctatgtggaaggtaaaaatagtggtgtgatcatgaaccaaaggaatttatgttttgtaacttgggtactttattttgcattttgttatactattaaataattttttcctg

SEQ ID NO: 172276 - DNA, 2238 bp, Homo sapiens
  Payload ID: 13871
  Gene Symbol: PRUNE
  Gene Name: prune exopolyphosphatase
  Uniprot ID: Q86TP1
  ENST ID: ENST00000368935
  CDS Start-End: 253-759
ctagtccctgagtcccgggcgggctgcattcgtcggggaaacctctcctcgaccaggggcacctctactcgaccaggggcgacggcgtactttgggcttcatcatggaggactacctgcagggttgtcgagctgctctgcaggagtcccgacctctacatgttgtgctgggaaatgaagcctgtgatttggactccacagtgtctgctcttgccctggctttttacctagcaaaggactgaccactgagcagatgctgagaaaagaccagaagactatctatagacaaggcgtcaaggtggccattagtgcaatatatatggatttggagatctgtgaagtcctggaacgctcccactctccacccctgaagctgacccctgcctcaagtacccaccctaacctccatgcctatcttcaaggcaacacccaggtctctcgaaagaaacttctgcccctgctccaggaagccctgtcagcatattttgactccatgaagatcccttcaggacagcctgagacagcagatgtgtccagggagcaagtggacaaggaattggacagggcaagtaactccctgatttctggcctgagtcaagatgaggaggaccctccgctgcccccgacgcccatgaacagcttggtggatgagtgccctctagatcaggggctgcctaaactctctgctgaggccgtcttcgagaagtgcagtcagatctcactgtcacagtctaccacagcctccctgtccaagaagtgactgttgagaggcgaggaggtagtgggtgaggctacctgactcacttcaaatgcatgttttgagatgtttggagattcagcaattctgtcttcattgctccaggatctggtatactgttctcataaaactgagaggagaaaaaaagtgaaagaaagcagctgctttaagaatggttttccaccttttccccctaatctctaccaatcagacacattttattatttaaatctgcacctctctctattttatttgccaggggcacgatgtgacatatctgcagtcccagcacagtgggacaaaaagaatttagaccccaaaagtgtcctcggcatggatcttgaacagaaccagtatctgtcatggaactgaacattcatcgatggtctccatgtattcatttattcacttgttcattcaagtatttattgaatacctgcctcaagctagagagaaaagagagtgcgctttggaaatttattccagttttcagcctacagcagattatcagctcggtgacttttctttctgccaccatttaggtgatggtgtttgattcagagatggctgaatttctattcttagcttattgtgactgtttcagatctagtttgggaacagattagaggccattgtcttctgtcctgatcaggtggcctggctgtttctttggatccctctgtcccagagccacccagaaccctgactcttgagaatcaagaaaacacccagaaaggccttaatgacctcataggcactcttccaaaaagacaacagaactggaatgagaggcctgggtctgtctcctgccttagcaggcctatcaatttcttgtcaatctctttttttccttgctcacattaaaaggaagcatggagttctaatgctcccataaactatgtattttggcaagacacttcactactccaggtctcactttccccatctgtaaaacagggtttggactaggtgttccctggtattctgtgatctgcctcttgctgccattctttctctcctctgcttctctgtatttttcttctgttatccctgggggtgctcaggttcacttgattgtctgtatttctgtgtggttgtagcaaggactcagcctcatgtagcacgaataggggtgtggttcatggcgtgttgacccagcagagcactccctcccactaacttgttctgcatgtgtagagtctccccattttttttaacgcaaccctttcccctttttcctaccccacagctctgttccatgtaagttgccaacagtttcactgaacagtggggtatgtgatggttttggcatgacatcttcagtatgagggggacagtttgacttcactttgagggtgtgatgtctgtagctatgtggaaggtaaaaatagtggtgtgatcatgaaccaaaggaatttatgttttgtaacttgggtactttattttgcattttgttatactattaaataattttttcctgtt

SEQ ID NO: 172277 - DNA, 2788 bp, Homo sapiens
  Payload ID: 13871
  Gene Symbol: PRUNE
  Gene Name: prune exopolyphosphatase
  Uniprot ID: Q86TP1
  ENST ID: ENST00000368936
  CDS Start-End: 494-1309
cgattcgccgtgtggcgggttcgagtcccgcctcctgactctggcctctagtccctgagtcccgggcgggctgcattcgtcggggaaacctctcctcgaccaggggcacctctactcgaccaggggcgacggcgtactttgggcttcatcatggaggactacctgcagggttgtcgagctgctctgcaggagtcccgacctctacatgttgtgctgggaaatgaagcctgtgatttggactccacagtgtctgctcttgccctggctttttacctagcaaagaagtgacacagccctagaggaggcagtagcagaggtgctagaccatcgacccatcgagccgaaacactgccctccctgccatgtttcagttgagctggtggggtcctgtgctaccctggtgaccgagagaatcctgcagggggcaccagagatcttggacaggcaaactgcagcccttctgcatggaaccatcatcctggactgtgtcaacatggaccttaaaattggaaaggcaaccccaaaggacagcaaatatgtggagaaactagaggcccttttcccagacctacccaagagaaatgatatatttgattccctacaaaaggcaaagtttgatgtatcaggactgaccactgagcagatgctgagaaaagaccagaagactatctatagacaaggcgtcaaggtggccattagtgcaatatatatggatttggaggcctttctgcagaggtctaacctccttgcagatctccatgctttctgccaggctcacagctatgatgtcctggttgccatgactatctttttcaacactcacaatgagccagtgcggcagttggctattttctgtccccatgtggcactccaaacaacgatctgtgaagtcctggaacgctcccactctccacccctgaagctgacccctgcctcaagtacccaccctaacctccatgcctatcttcaaggcaacacccaggtctctcgaaagaaacttctgcccctgctccaggaagccctgtcagcatattttgactccatgaagatcccttcaggacagcctgagacagcagatgtgtccagggagcaagtggacaaggaattggacagggcaagtaactccctgatttctggcctgagtcaagatgaggaggaccctccgctgcccccgacgcccatgaacagcttggtggatgagtgccctctagatcaggggctgcctaaactctctgctgaggccgtcttcgagaagtgcagtcagatctcactgtcacagtctaccacagcctccctgtccaagaagtgactgttgagaggcgaggaggtagtgggtgaggctacctgactcacttcaaatgcatgttttgagatgtttggagattcagcaattctgtcttcattgctccaggatctggtatactgttctcataaaactgagaggagaaaaaaagtgaaagaaagcagctgctttaagaatggttttccaccttttccccctaatctctaccaatcagacacattttattatttaaatctgcacctctctctattttatttgccaggggcacgatgtgacatatctgcagtcccagcacagtgggacaaaaagaatttagaccccaaaagtgtcctcggcatggatcttgaacagaaccagtatctgtcatggaactgaacattcatcgatggtctccatgtattcatttattcacttgttcattcaagtatttattgaatacctgcctcaagctagagagaaaagagagtgcgctttggaaatttattccagttttcagcctacagcagattatcagctcggtgacttttctttctgccaccatttaggtgatggtgtttgattcagagatggctgaatttctattcttagcttattgtgactgtttcagatctagtttgggaacagattagaggccattgtcttctgtcctgatcaggtggcctggctgtttctttggatccctctgtcccagagccacccagaaccctgactcttgagaatcaagaaaacacccagaaaggccttaatgacctcataggcactcttccaaaaagacaacagaactggaatgagaggcctgggtctgtctcctgccttagcaggcctatcaatttcttgtcaatctctttttttccttgctcacattaaaaggaagcatggagttctaatgctcccataaactatgtattttggcaagacacttcactactccaggtctcactttccccatctgtaaaacagggtttggactaggtgttccctggtattctgtgatctgcctcttgctgccattctttctctcctctgcttctctgtatttttcttctgttatccctgggggtgctcaggttcacttgattgtctgtatttctgtgtggttgtagcaaggactcagcctcatgtagcacgaataggggtgtggttcatggcgtgttgacccagcagagcactccctcccactaacttgttctgcatgtgtagagtctccccattttttttaacgcaaccctttcccctttttcctaccccacagctctgttccatgtaagttgccaacagtttcactgaacagtggggtatgtgatggttttggcatgacatcttcagtatgagggggacagtttgacttcactttgagggtgtgatgtctgtagctatgtggaaggtaaaaatagtggtgtgatcatgaaccaaaggaatttatgttttgtaacttgggtactttattttgcattttgttatactattaaataattttttcctgtt

SEQ ID NO: 172278 - DNA, 1850 bp, Homo sapiens
  Payload ID: 13871
  Gene Symbol: PRUNE
  Gene Name: prune exopolyphosphatase
  Uniprot ID: Q86TP1
  ENST ID: ENST00000368937
  CDS Start-End: 221-877
gaggccgattcgccgtgtggcgggttcgagtcccgcctcctgactctggcctctagtccctgagtcccgggcgggctgcattcgtcggggaaacctctcctcgaccaggggcacctctactcgaccaggggcgacggcgtactttgggcttcatcatggaggactacctgcagggttgtcgagctgctctgcaggaaccatcatcctggactgtgtcaacatggaccttaaaattggaaaggcaaccccaaaggacagcaaatatgtggagaaactagaggcccttttcccagacctacccaagagaaatgatatatttgattccctacaaaaggcaaagtttgatgtatcaggactgaccactgagcagatgctgagaaaagaccagaagactatctatagacaaggcgtcaaggtggccattagtgcaatatatatggatttggagatctgtgaagtcctggaacgctcccactctccacccctgaagctgacccctgcctcaagtacccaccctaacctccatgcctatcttcaaggcaacacccaggtctctcgaaagaaacttctgcccctgctccaggaagccctgtcagcatattttgactccatgaagatcccttcaggacagcctgagacagcagatgtgtccagggagcaagtggacaaggaattggacagggcaagtaactccctgatttctggcctgagtcaagatgaggaggaccctccgctgcccccgacgcccatgaacagcttggtggatgagtgccctctagatcaggggctgcctaaactctctgctgaggccgtcttcgagaagtgcagtcagatctcactgtcacagtctaccacagcctccctgtccaagaagtgactgttgagaggcgaggaggtagtgggtgaggctacctgactcacttcaaatgcatgttttgagatgtttggagattcagcaattctgtcttcattgctccaggatctggtatactgttctcataaaactgagaggagaaaaaaagtgaaagaaagcagctgctttaagaatggttttccaccttttccccctaatctctaccaatcagacacattttattatttaaatctgcacctctctctattttatttgccaggggcacgatgtgacatatctgcagtcccagcacagtgggacaaaaagaatttagaccccaaaagtgtcctcggcatggatcttgaacagaaccagtatctgtcatggaactgaacattcatcgatggtctccatgtattcatttattcacttgttcattcaagtatttattgaatacctgcctcaagctagagagaaaagagagtgcgctttggaaatttattccagttttcagcctacagcagattatcagctcggtgacttttctttctgccaccatttaggtgatggtgtttgattcagagatggctgaatttctattcttagcttattgtgactgtttcagatctagtttgggaacagattagaggccattgtcttctgtcctgatcaggtggcctggctgtttctttggatccctctgtcccagagccacccagaaccctgactcttgagaatcaagaaaacacccagaaaggccttaatgacctcataggcactcttccaaaaagacaacagaactggaatgagaggcctgggtctgtctcctgccttagcaggcctatcaatttcttgtcaatctctttttttccttgctcacattaaaaggaagcatggagttctaatgctcccataaactatgtattttggcaagacacttcactactccaggtctcactttccccatctgtaaaacagggtttggactaggtgttcc

SEQ ID NO: 172279 - DNA, 825 bp, Homo sapiens
  Payload ID: 13871
  Gene Symbol: PRUNE
  Gene Name: prune exopolyphosphatase
  ENST ID: ENST00000450884
  CDS Start-End: 407-825
ggaggccgattcgccgtgtggcgggttcgagtcccgcctcctgactctggcctctagtccctgagtcccgggcgggctgcattcgtcggggaaacctctcctcgaccaggggcacctctactcgaccaggggcgacggcgtactttgggcttcatcatggaggactacctgcagggttgtcgagctgctctgcagaagtgacacagccctagaggaggcagtagcagaggtgctagaccatcgacccatcgagccgaaacactgccctccctgccatgtttcagttgagctggtggggtcctgtgctaccctggtgaccgagagaatcctgcagggggcaccagagatcttggacaggcaaactgcagcccttctgcatggaaccatcatcctggactgtgtcaacatggaccttaaaattggaaaggcaaccccaaaggacagcaaatatgtggagaaactagaggcccttttcccagacctacccaagagaaatgatatatttgattccctacaaaaggcaaagtttgatgtatcaggactgaccactgagcagatgctgagaaaagaccagaagactatctatagacaaggcgtcaaggtggccattagtgcaatatatatggatttggaggcctttctgcagaggtctaacctccttgcagatctccatgctttctgccaggctcacagctatgatgtcctggttgccatgactatctttttcaacactcacaatgagccagtgcggcagttggctattttctgtccccatgtggcactccaaacaacgatctgtgaagtcctggaacgctcccactctcc

SEQ ID NO: 172280 - DNA, 845 bp, Homo sapiens
  Payload ID: 13871
  Gene Symbol: PRUNE
  Gene Name: prune exopolyphosphatase
  ENST ID: ENST00000431193
  CDS Start-End: 310-845
ccgattcgccgtgtggcgggttcgagtcccgcctcctgactctggcctctagtccctgagtcccgggcgggctgcattcgtcggggaaacctctcctcgaccaggggcacctctactcgaccaggggcgacggcgtactttgggcttcatcatggaggactacctgcagggttgtcgagctgctctgcaggagtcccgacctctacatgttgtgctgggaaatgaagcctgtgatttggactccacagtgtctgctcttgccctggctttttacctagcaaaggaaccatcatcctggactgtgtcaacatggaccttaaaattggaaaggcaaccccaaaggacagcaaatatgtggagaaactagaggcccttttcccagacctacccaagagaaatgatatatttgattccctacaaaaggcaaagtttgatgtatcaggactgaccactgagcagatgctgagaaaagaccagaagactatctatagacaaggcgtcaaggtggccattagtgcaatatatatggatttggagatctgtgaagtcctggaacgctcccactctccacccctgaagctgacccctgcctcaagtacccaccctaacctccatgcctatcttcaaggcaacacccaggtctctcgaaagaaacttctgcccctgctccaggaagccctgtcagcatattttgactccatgaagatcccttcaggacagcctgagacagcagatgtgtccagggagcaagtggacaaggaattggacagggcaagtaactccctgatttctggcctgagtcaagatgaggaggaccctccgctgcccccgacgcccatgaacag

SEQ ID NO: 172281 - DNA, 2697 bp, Homo sapiens
  Payload ID: 13872
  Gene Symbol: PRUNE2
  Gene Name: prune homolog 2 (Drosophila)
  ENST ID: ENST00000223609
  CDS Start-End: 150-725
atcatgtgaccagaaaatggaggcgaatctgtatttccagttaactgctcagaagagagatgctgaagagctgtagtcgtgcatccttctcaccctccgttagaaagcctcctctcatcctcagaagactactgtcagaggatgtaggaatggacatcccctttgaagagggcgtgctgagtcccagtgctgcagacatgaggcctgaacctcctaattctctggatcttaatgacactcatcctcggagaatcaagctcacagccccaaatatcaatctttctctggaccaaagtgaaggatctattctctctgatgataacttggacagtccagatgaaattgacatcaatgtggatgaacttgatacccccgatgaagcagattcttttgagtacactggccatgaagatcccacagccaacaaagattctggccaagagtcagagtctattccagaatatacggccgaagaggaacgggaggacaaccggctttggaggacagtggtcattggagaacaagagcagcgcattgacatgaaggtcatcgagccctacaggagagtcatttctcacggaggatactatggggacggtctaaatgccatcattgtgtttgccgcctgttttctgccagacagcagtcgggcggattaccactatgtcatggaaaatcttttcctatatgtaataagtactttcacactacagccgcagagctgagcagttcagcagaccgtatgtcccacaatgcctaaaacattgactatgtttacagaaaaagtttgctgacccctgctctagcaaacgcatcctttcctactccaccccaatttgtatttagatagtttctctaacagaacggacaaatgaggctgcaaactaatttatttttgtcaaaaatcaatgttttgacatccacagacagtgaaataaaagaaatggcttgctgaaaaacatgaggagtcctagccacaaaatcactgcttaggttgcaattgccaaaatgaagccttcttagaagcacttctttagtatatacaggtgttggctgaagtccgtgcctcactctgggaaccattcttagtctccagtgtctcctattacaaagaagctggcagaaataaaaatgaaggggtgagagcggttccaccctagtctcatggtggaaaattcattggggagagctgtccaggatatttggagtcctgggtagaaggagcttgtaactactttaaagtcgacatctttgcacaggtgattgagtttctctgacctcattgcttcacctctgtctcctcccgtccttccgcacgtgcccacacacacgcagttcagccctctttcctccataagcctccatcgttttctcttttctcctcttgatcctttcaagcgagtatcttgttgaattgtatgttctgttggatctcctccttcataacatctggcttgttggacagaaaaaccctacagcccaccccctcccacagcccacctccacttttgaaagcccaaattacacctctcccagaacacagtgttgacgtaaatacagttacccaatattcctgtttgttcacctatttgctactttcactcagtagcatcccattttgtaaaatgaattccatggtcaccctgtcacaggaagtaatgaaaaatccagtgttcagtgtagtggtgcaaacctgagggcatagagctgttcatagagggctcttgttatagccaaacagacacagcaacaatctcaccatttatatatatatttttaacttgtccagctcatctatggaaaactactcaggtggtatgctgtttgaagcctcatcttcctacatgaaaattatgggcatttgtcccaatgattttgtttcagctgttctgtaggctgcataaccactctgatatttaggtatctgctattttattatcttaaaagacaaattaatttaattgcatgtgctagggaaaagctaccatgtacattcaccccaagtaaatagaatcctagatgaatcctagaaaaataatccctaagcagataggtagacagaggtaaacattcacatgatttagctctctagctcttgcactctgaacattcttgctttggttctgacttctgggaactgctttgcatttctcctatagatctgtagttaagggaaccaaggggtcattggggcaaaagcattgtttctcaaagctccttgattaagagaaagaacagaaatttgcacagaagatagtgtcaaggagtgagaaagtttgtttgagggcagtagctcagtgtggaagaaaatcctgaagtttctgttgaagccatacaatgttctatggggttactctctaagacattctctgaggtgtgtgaggaagtcactactcctagcctttgttaagatgtaattttaaatattcagttatggtactatgtttgcaactctcgtcttatcacaatgcctcagtagtttgttcccttagaaacatttagatgtgcacaaattaatcttttatatatctaaaggtttttctatcatgcattggattgctcagaataaagtgtctgttagacttcgttttggtaaataaattctccataatgtagattaataatataaaagtctttaatgacacaatatatctatatagcctcactgtataattcagaaataaaaattgattctgc

SEQ ID NO: 172282 - DNA, 1069 bp, Homo sapiens
  Payload ID: 13872
  Gene Symbol: PRUNE2
  Gene Name: prune homolog 2 (Drosophila)
  ENST ID: ENST00000376713
  CDS Start-End: 123-1019
agggagcagtcggtcgctgcgccccggcgggccactttcccgggaccccgctcgtcttccttgggccgagattttccactgcgcccctccgagtacccgggttccaaacccctagccacgacatggaagaatttttgcaacgcgccaaatctaaactgaatcgaagcaaacgcttggagaaggtccatgtggttattgggcctaaatcgtgtgacttggattctctcatttctaccttcacatatgcttactttctagacaaggtcagtccaccaggggttctgtgtttaccagtgctgaacataccaagaactgaattcaactacttcaccgagacgaggtttattttagaagagctaaatatttccgaatcattccacatattccgggatgaaattaacctgcatcagctaaatgatgaagggaagttatcgataacacttgttggcagcagtgtgctggcgagtgaagacaaaactttagaatcagcagttgtcaaagtcattaatccggttgagcagagcgatgccaacgttgagttccgagagtcttcctcttctctcgtgctaaaggagattctccaagaggctcctgagctcatcaccgagcaactggctcatcgcctcagaggtagcattcttttcaagtggatgaccatggaatcagagaagatctcagagaagcaggaggaaattctttctatcctggaagaaaaatttcctaacttgcctccaagagaggacatcatcaacgtcctacaggagacccagttcagtgctcagggtttaagtattgaacagacaatgttgaaagatctaaaggagctgtcagatggagaaataaaagtggccattagtactgtgagcatgaaccttgagatgagcaggattgagcttttccccaagggcacatggctggtgaatagagacgcctttcaatccaggaactctggctccaaatgcatgcctgggaccactgtgctacagtgcaccttaagaagtttacaaagaggaaagtagtggtttgtgagtttaatgtccagtatatataataactatcaactgaattc

SEQ ID NO: 172283 - DNA, 4308 bp, Homo sapiens
  Payload ID: 13872
  Gene Symbol: PRUNE2
  Gene Name: prune homolog 2 (Drosophila)
  ENST ID: ENST00000376717
  CDS Start-End: 53-1114
gaccagaaaatggaggcgaatctgtatttccagttaactgctcagaagagagatgctgaagagctgtagtcgtgcatccttctcaccctccgttagaaagcctcctctcatcctcagaagactactgtcagaggatgtaggaatggacatcccctttgaagagggcgtgctgagtcccagtgctgcagacatgaggcctgaacctcctaattctctggatcttaatgacactcatcctcggagaatcaagctcacagccccaaatatcaatctttctctggaccaaagtgaaggatctattctctctgatgataacttggacagtccagatgaaattgacatcaatgtggatgaacttgatacccccgatgaagcagattcttttgagtacactggccatgaagatcccacagccaacaaagattctggccaagagtcagagtctattccagaatatacggccgaagaggaacgggaggacaaccggctttggaggacagtggtcattggagaacaagagcagcgcattgacatgaaggtcatcgagccctacaggagagtcatttctcacggaggatactatggggacggtctaaatgccatcattgtgtttgccgcctgttttctgccagacagcagtcgggcggattaccactatgtcatggaaaatcttttcctatatgtaataagtactttagagttgatggtagctgaagactatatgattgtgtacttgaatggtgcaaccccaagaaggaggatgccagggctaggctggatgaagaaatgctaccagatgattgacagacggttgaggaagaatttgaaatcattcatcattgttcatccatcttggttcatcagaacaatccttgctgtgacacgaccttttataagttcaaaattcagcagtaaaattaaatatgtcaatagcttatcagaactcagtgggctgatcccaatggattgcatccacattccagagagcatcatcaaactggatgaagaactgagggaagcatcagaggcagctaaaactagctgcctttacaatgatccagaaatgtcttctatggagaaggatattgacttgaagctgaaagaaaagccttagttggccatgctggaagaagaggatgcttttctggttcatggttctgttgaaacatatctacctgaaagagacagggctgatgttacctttttccactttgcactacctggtgccattctaaatttctaaggggaaaaatagaaagtttgtttactcttaagatattttatgaaattgtgtgtactttcctattttgccaattatgtgcctcaaagattttagttgagccttagcaagaaagtaggaccttccatttcaatacttcattaacacggtgtagtgatactttgtcccttagactggtgtttaccagtaagatacctttaatccactgttaagtatgagtggatttgtttccatagattagctggatttccttttggtgattgcattaggtttaaagtacacaggtctcaactctccccaggaaagtttcccctgtttgactccacctttaaaatcctaagcctgactaggacagccacaaaccacacaaggtgtaaaaccatcatcagctaagtgcccgttttgttcttgtttaccagaatctcctttaacttctcaaagggaagccgggctttctaatccacgtcaactttattttagttgtcaaattgggcattatattttatgtaaattggtcttttaacatcattttcctgatgaatgttggtgaccaccacattgtgaaatttaagaatccgtgttgcatgtttggtagctctctgagtttcaggccataaactcagctccagaggttaccttttaagtgccaagaactcaagtgcaaggtggcctactcaaaaatcatttggtagcattcagttattcatgaattcctctctcgcatgcattataaaaagtgatctgctttaaaacaccgtaatctgatcataggcttaaaattaaatatgagtattactttcatgtacaaaatatttcctttatagtcttcatatgccctttaaaatgccaacaagatttcaagtctgtaggcctctagtgaggtggggtggcaaaccacagctaagtctcgctcaccactgcaagctaagaatggtttttacattttgggttggaaaaattttttttgaatatttcatgacacatgaaaattattcaaatgttagtgccgataaataaagtggtactgaaacacagccacacaaacttgtttttgtactgtctacagctactttcacactacagccgcagagctgagcagttcagcagaccgtatgtcccacaatgcctaaaacattgactatgtttacagaaaaagtttgctgacccctgctctagcaaacgcatcctttcctactccaccccaatttgtatttagatagtttctctaacagaacggacaaatgaggctgcaaactaatttatttttgtcaaaaatcaatgttttgacatccacagacagtgaaataaaagaaatggcttgctgaaaaacatgaggagtcctagccacaaaatcactgcttaggttgcaattgccaaaatgaagccttcttagaagcacttctttagtatatacaggtgttggctgaagtccgtgcctcactctgggaaccattcttagtctccagtgtctcctattacaaagaagctggcagaaataaaaatgaaggggtgagagcggttccaccctagtctcatggtggaaaattcattggggagagctgtccaggatatttggagtcctgggtagaaggagcttgtaactactttaaagtcgacatctttgcacaggtgattgagtttctctgacctcattgcttcacctctgtctcctcccgtccttccgcacgtgcccacacacacgcagttcagccctctttcctccataagcctccatcgttttctcttttctcctcttgatcctttcaagcgagtatcttgttgaattgtatgttctgttggatctcctccttcataacatctggcttgttggacagaaaaaccctacagcccaccccctcccacagcccacctccacttttgaaagcccaaattacacctctcccagaacacagtgttgacgtaaatacagttacccaatattcctgtttgttcacctatttgctactttcactcagtagcatcccattttgtaaaatgaattccatggtcaccctgtcacaggaagtaatgaaaaatccagtgttcagtgtagtggtgcaaacctgagggcatagagctgttcatagagggctcttgttatagccaaacagacacagcaacaatctcaccatttatatatatatttttaacttgtccagctcatctatggaaaactactcaggtggtatgctgtttgaagcctcatcttcctacatgaaaattatgggcatttgtcccaatgattttgtttcagctgttctgtaggctgcataaccactctgatatttaggtatctgctattttattatcttaaaagacaaattaatttaattgcatgtgctagggaaaagctaccatgtacattcaccccaagtaaatagaatcctagatgaatcctagaaaaataatccctaagcagataggtagacagaggtaaacattcacatgatttagctctctagctcttgcactctgaacattcttgctttggttctgacttctgggaactgctttgcatttctcctatagatctgtagttaagggaaccaaggggtcattggggcaaaagcattgtttctcaaagctccttgattaagagaaagaacagaaatttgcacagaagatagtgtcaaggagtgagaaagtttgtttgagggcagtagctcagtgtggaagaaaatcctgaagtttctgttgaagccatacaatgttctatggggttactctctaagacattctctgaggtgtgtgaggaagtcactactcctagcctttgttaagatgtaattttaaatattcagttatggtactatgtttgcaactctcgtcttatcacaatgcctcagtagtttgttcccttagaaacatttagatgtgcacaaattaatcttttatatatctaaaggtttttctatcatgcattggattgctcagaataaagtgtctgttagacttcgttttggtaaataaattctccataatgtagattaataatataaaagtctttaatgacacaatatatctatatagcctcactgtataattcagaaataaaaattgattctgca

SEQ ID NO: 172284 - DNA, 12584 bp, Homo sapiens
  Payload ID: 13872
  Gene Symbol: PRUNE2
  Gene Name: prune homolog 2 (Drosophila)
  Uniprot ID: Q8WUY3
  ENST ID: ENST00000376718
  CDS Start-End: 125-9391
ggagggagcagtcggtcgctgcgccccggcgggccactttcccgggaccccgctcgtcttccttgggccgagattttccactgcgcccctccgagtacccgggttccaaacccctagccacgacatggaagaatttttgcaacgcgccaaatctaaactgaatcgaagcaaacgcttggagaaggtccatgtggttattgggcctaaatcgtgtgacttggattctctcatttctaccttcacatatgcttactttctagacaaggtcagtccaccaggggttctgtgtttaccagtgctgaacataccaagaactgaattcaactacttcaccgagacgaggtttattttagaagagctaaatatttccgaatcattccacatattccgggatgaaattaacctgcatcagctaaatgatgaagggaagttatcgataacacttgttggcagcagtgtgctggcgagtgaagacaaaactttagaatcagcagttgtcaaagtcattaatccggttgagcagagcgatgccaacgttgagttccgagagtcttcctcttctctcgtgctaaaggagattctccaagaggctcctgagctcatcaccgagcaactggctcatcgcctcagaggtagcattcttttcaagtggatgaccatggaatcagagaagatctcagagaagcaggaggaaattctttctatcctggaagaaaaatttcctaacttgcctccaagagaggacatcatcaacgtcctacaggagacccagttcagtgctcagggtttaagtattgaacagacaatgttgaaagatctaaaggagctgtcagatggagaaataaaagtggccattagtactgtgagcatgaaccttgagaattgtctatttcacagcaatattaccagtgacttgaaagcatttacagacaagtttggttttgatgtcctcatcctgttctccagctatctgtcagaggagcagcagccgagacgacagattgctgtgtactcagaaaacatggagctgtgcagtcagatttgctgtgagctggaagagtgtcagaacccttgcctagaactggagccctttgactgtggctgtgatgagatcctggtgtaccaacaagaggacccttcagtgacttgtgatcaggtggttctcgttgtcaaggaagtcatcaacaggaggtgtccagagatggtctccaatagccggacatcctcaacagaagccgtggcaggcagtgcccccctctcccaggggtcttctgggattatggaattgtatggttctgacatagagccacaacccagctctgtgaatttcatagagaaccctccagatctcaatgattctaaccaggctcaggtggatgccaatgtagaccttgttagcccagacagcggactggctaccattaggagcagccgctcatccaaggagagctctgttttcctcagtgacgacagccccgtgggagaaggtgctgggcctcaccacacccttctcccagggcttgactcctacagccccatccctgaaggggcggtggcggaggaacatgcatggtctggagaacacggtgagcacttcgacctcttcaattttgacccagcacccatggcttctgggcagtcccagcaatcttctcattctgcagactactccccagcagatgacttcttccccaacagtgacctgtcagaaggacagctccccgctgggcctgaaggacttgatggcatgggaaccaacatgtctaattattcatccagttcacttttgtcaggggctggcaaagatagccttgtggaacatgatgaggagtttgtccagagacaagacagtcccagagataactctgaaagaaatttgagcctgacagattttgtgggagatgaatccccttccccagaaaggctaaaaaatactggaaagaggatcccaccaacacccatgaatagtttagtagaaagctcgccatccactgaagaaccagcctcactctatacagaagatatgacccaaaaagcaactgacacaggtcacatggggccacctcagacccatgcacggtgcagcagctggtggggtggtttggaaattgactccaaaaatattgcagatgcgtggagttccagtgaacaggaatctgttttccagagccctgaatcatggaaagagcataagccaagctccattgataggagagcctcagattctgtatttcaaccaaagagcctcgaatttacaaagtcaggtccctgggagtctgaatttggtcagcctgaactgggtagcaatgatattcaagacaaaaatgaggaaagcttgccgttccagaacctgcccatggagaagtcacctttgccaaatacatctccccaaggaacaaaccacctgatagaagactttgcttctttgtggcattctggtcgctctcccacagccatgcccgagccctggggaaatcctacagatgatggtgaaccagcagctgtggcgccattcccagcctggagtgcatttggtaaagaagatcatgatgaagctttaaaaaatacctggaatttgcacccaacaagcagcaagacaccttctgttagggacccgaatgagtgggccatggcaaaaagtgggtttgccttttcttcttcagaactactggacaattcacccagtgagataaacaatgaagcagctccagaaatctggggcaagaaaaacaatgactccagggatcacatctttgcacctggaaatcccagttctgatctggatcacacatggactaattctaagccaccaaaagaagatcagaatggtttagtggatcctaaaactaggggcaaggtatatgaaaaggtagattcctggaacctttttgaggagaatatgaagaaaggagggtcagatgtcctagttccttgggaagattccttcttatcttacaaatgttctgattacagtgcatccaacctaggagaagattcggtgccttcccccttagataccaattattccacctcagactcttacacatcaccaacatttgctggagacgaaaaggaaactgaacacaagccatttgctaaagaggaaggttttgagtcaaaagatggtaactccacggcagaggagactgacattcctcctcagtcactgcaacagtcatctcgaaatcgaatcagttcaggtcctgggaacctagacatgtgggcttcacctcatacagataacagttctgaaataaataccactcacaacctggatgaaaatgaactcaagacagagcacacagatggtaagaatatctccatggaggatgacgtcggggaaagcagccagtccagttacgacgaccccagcatgatgcaactgtacaatgaaacaaaccgacaactcacacttttgcacagcagcaccaactcccggcagacggcccctgacagtctcgacttgtggaacagagtgattttggaggatactcagtccactgcaacgatctcagatatggacaatgatttggactgggatgactgcagtgggggtgcggcaatccccagtgatggtcaaacagaaggatacatggctgaaggttccgagccggaaacccgatttacagtgagacagctggaaccctggggcttggagtatcaggaagcaaatcaggtagattgggagctccctgcctctgatgagcataccaaggacagtgctcccagtgaacatcacacattgaatgagaaaagtgggcagctaattgcaaacagtatttgggattctgtcatgagagataaagacatgtcatcattcatgttaccaggctcctcacatatcacagattcagagcaaagggaattgcctcctgaaatccccagccattcagcaaatgttaaagacactcattccccagatgcgccagcagcctctggaaccagtgaatcagaggcacttatatctcatcttgacaagcaggacacagagagggaaaccctgcaaagtgatgcagcatccttggcgactaggcttgagaatccagggtattttccacacccagatccatggaaaggtcatggcgatggacaaagtgaaagtgagaaggaagcccagggagccactgacagggggcaccttgatgaagaggaggtgatcgcctctggtgtggagaatgcctcagggatttctgaaaaagggcagagtgaccaggaactgtcttctctggttgcatctgaacatcaggaaatctgcattaaatcaggcaaaatcagctctcttgctgtcactttcagtcctcaaaccgaggaaccagaggaagttttagagtatgaggaggggtcttacaatctagactcccgtgatgtgcaaacagggatgtccgcagataacctgcagccaaaagatacccatgaaaaacacctcatgagtcaaagaaattcaggtgaaactactgagacttcagatgggatgaatttcacaaaatatgtatctgtacctgaaaaggatcttgagaaaactgaagaatgtaactttctagagccagagaacgtgggtggagggccacctcacagagttccccgaagtcttgattttggggacgtccctatagacagtgatgtgcatgtcagcagcacatgttctgagataaccaaaaatcttgacgttaaggggtctgaaaatagccttccaggagccggttcgtctggaaattttgacagagatactatttctagtgagtatactcattcaagtgcatcaagtcctgagttaaatgactcttcagttgcactgtcctcctggggccagcaacccagttctgggtatcaagaagaaaaccaaggcaactggagtgaacagaatcaccaagaatctgaactaattaccactgatggccaagtagaaatagttaccaaagtgaaggatttagagaaaaacagaataaatgagtttgaaaagagctttgatcgcaaaactcctacatttttagagatctggaatgactcagttgatggtgattccttttcctctttatccagtcctgaaacaggcaaatattctgaacattcagggacacatcaggaaagcaatctaattgctagctaccaggagaaaaatgaacatgacatttctgcaactgtgcagccagaggatgccagggtcatttcaacaagctcaggttctgatgatgacagtgtcggtggtgaagagtcaatagaggaagagatccaggtggccaactgccacgttgctgaggatgaatccagagcttgggattcattgaatgaatctaataagttcttggtcacagctgatcctaagtctgaaaatatttatgactacctagacagctcagagccagcagagaatgagaataagtcaaacccattctgtgacaatcaacaaagcagccctgatccctggactttctcaccattaacggagactgaaatgcagattacagcagtggagaaggagaagagatcttctccagaaacagggacaacaggagatgttgcatggcaaatatctcccaaagcttcgttcccaaagaacgaagataattctcaactggaaatgctgggcttctcagctgatagcactgagtggtggaaggcctcaccccaggaagggagactaattgaaagtccatttgaaagggagctgtctgactccagtggtgtgttggagataaattcttcagtacaccaaaatgccagtccctggggagtaccagttcagggtgatattgagcccgtggaaacacactatactaatccttttagtgacaaccatcagtcaccctttctggaaggtaatgggaagaactcccatgagcaactctggaacattcaaccaaggcagccagacccagatgctgacaagttcagccagcttgtaaaattagaccaaattaaagaaaaggactcaagagagcaaacctttgtgtctgctgctggtgatgagctgactcctgaaacacctacccaagagcagtgtcaggacaccatgctgccagtctgtgatcatccggacacagcctttactcacgcagaggaaaatagttgtgttacatctaatgtttcaactaatgaaggtcaagaaacaaatcagtgggaacaagaaaaatcatacctaggtgagatgacaaattcaagcattgccacagaaaattttcctgctgtcagttctcccacccaactgataatgaagccaggctctgaatgggatggctctaccccaagtgaggactcccgaggtacctttgtgccagatattttacatggcaactttcaagagggtgggcagctggcctctgccgcgcctgacttgtggatagatgctaagaagcccttcagtttgaaagcagatggtgagaatcctgatatcctgacgcactgcgaacatgacagcaattctcaggcttccgacagccctgatatatgtcacgattctgaagcaaagcaagagactgagaagcacctcagtgcttgcatgggacctgaagtggaatccagtgagctttgtctcactgagccagagatagatgaagaacccatttatgagcctggacgggagtttgtcccatccaatgcagaactcgattctgaaaacgcaactgtgctgcctccaattggctatcaagcagacataaagggctcctctcagcccgcctctcataaaggttcacctgaaccttctgaaataaacggtgacaacagtacaggtttacaagtatcagaaaaaggagccagcccagatatggcaccaattttggaaccagttgacagaagaatcccaaggattgaaaatgtggcaactagcatttttgtaactcaccaagagccaactccagaaggtgacggttcttggatatcagacagcttttctcctgaaagtcagcctggtgcaagagctttgtttgatggtgatccacatttatccacagagaatcctgccttggttcctgatgctttgctagcctcagacacttgtctggatataagcgaagctgcctttgaccacagtttcagcgatgcctcaggtctcaacacatccacgggaacaatagatgacatgagtaaactgacattatccgaaggccatccggaaacgccagttgatggggacctagggaagcaagatatctgctcatctgaagcctcgtggggtgattttgaatatgatgtaatgggccagaatatcgatgaagatttactgagagagcctgaacacttcctgtatggtggtgaccctcctttggaggaagattctctgaagcagtcgctggcaccgtacacacctccctttgatttgtcttatctcacagaacctgcccagagtgctgaaacaatagaggaagctgggtctccagaggatgaatctctgggatgcagagcagcagagatagtgctttctgcacttcctgatcgaagaagtgagggaaaccaggctgagaccaaaaacagactgcctggatcccagctggctgtgctgcatattcgtgaagaccctgagtccgtttatttgccggtaggagcaggctccaacattttgtctccatcaaacgttgactgggaagtagaaacagataattctgatttaccagcaggtggagacataggaccaccaaatggtgccagcaaggaaatatcagaattggaagaagaaaaaacaattcctaccaaagagcctgagcagataaaatcagaatacaaggaagaaagatgtacagagaagaatgaagatcgtcatgcactacacatggattacatacttgtaaaccgtgaagaaaattcacactcaaagccagagacctgtgaagaaagagaaagcatagctgaattagaattgtatgtaggttccaaagaaacagggctgcagggaactcagttagcaagcttcccagacacatgtcagccagcctccttaaatgaaagaaaaggtctctctgcagagaaaatgtcttctaaaagcgatacgagatcatcttttgaaagccctgcacaagaccagagttggatgttcttgggccatagtgaggttggtgatccatcactggatgccagggactcagggcctgggtggtctggcaagactgtggagccgttctctgaactcggcttgggtgagggtccccagctgcagattctggaagaaatgaagcctctagaatctttggcactagaggaagcctctggtccagtcagccaatcacagaagagtaagagccgaggcagggctggcccggatgcagttacgttgcaggctgtcacccatgacaatgaatgggaaatgctttcaccacagcctgttcagaaaaacatgatccctgacacggaaatggaggaggagacagagttccttgagctcggaaccaggatatcaagaccaaatggactactgtcagaggatgtaggaatggacatcccctttgaagagggcgtgctgagtcccagtgctgcagacatgaggcctgaacctcctaattctctggatcttaatgacactcatcctcggagaatcaagctcacagccccaaatatcaatctttctctggaccaaagtgaaggatctattctctctgatgataacttggacagtccagatgaaattgacatcaatgtggatgaacttgatacccccgatgaagcagattcttttgagtacactggccatgatcccacagccaacaaagattctggccaagagtcagagtctattccagaatatacggccgaagaggaacgggaggacaaccggctttggaggacagtggtcattggagaacaagagcagcgcattgacatgaaggtcatcgagccctacaggagagtcatttctcacggaggatactatggggacggtctaaatgccatcattgtgtttgccgcctgttttctgccagacagcagtcgggcggattaccactatgtcatggaaaatcttttcctatatgtaataagtactttagagttgatggtagctgaagactatatgattgtgtacttgaatggtgcaaccccaagaaggaggatgccagggctaggctggatgaagaaatgctaccagatgattgacagacggttgaggaagaatttgaaatcattcatcattgttcatccatcttggttcatcagaacaatccttgctgtgacacgaccttttataagttcaaaattcagcagtaaaattaaatatgtcaatagcttatcagaactcagtgggctgatcccaatggattgcatccacattccagagagcatcatcaaactggatgaagaactgagggaagcatcagaggcagctaaaactagctgcctttacaatgatccagaaatgtcttctatggagaaggatattgacttgaagctgaaagaaaagccttagttggccatgctggaagaagaggatgcttttctggttcatggttctgttgaaacatatctacctgaaagagacagggctgatgttacctttttccactttgcactacctggtgccattctaaatttctaaggggaaaaatagaaagtttgtttactcttaagatattttatgaaattgtgtgtactttcctattttgccaattatgtgcctcaaagattttagttgagccttagcaagaaagtaggaccttccatttcaatacttcattaacacggtgtagtgatactttgtcccttagactggtgtttaccagtaagatacctttaatccactgttaagtatgagtggatttgtttccatagattagctggatttccttttggtgattgcattaggtttaaagtacacaggtctcaactctccccaggaaagtttcccctgtttgactccacctttaaaatcctaagcctgactaggacagccacaaaccacacaaggtgtaaaaccatcatcagctaagtgcccgttttgttcttgtttaccagaatctcctttaacttctcaaagggaagccgggctttctaatccacgtcaactttattttagttgtcaaattgggcattatattttatgtaaattggtcttttaacatcattttcctgatgaatgttggtgaccaccacattgtgaaatttaagaatccgtgttgcatgtttggtagctctctgagtttcaggccataaactcagctccagaggttaccttttaagtgccaagaactcaagtgcaaggtggcctactcaaaaatcatttggtagcattcagttattcatgaattcctctctcgcatgcattataaaaagtgatctgctttaaaacaccgtaatctgatcataggcttaaaattaaatatgagtattactttcatgtacaaaatatttcctttatagtcttcatatgccctttaaaatgccaacaagatttcaagtctgtaggcctctagtgaggtggggtggcaaaccacagctaagtctcgctcaccactgcaagctaagaatggtttttacattttgggttggaaaaattttttttgaatatttcatgacacatgaaaattattcaaatgttagtgccgataaataaagtggtactgaaacacagccacacaaacttgtttttgtactgtctacagctactttcacactacagccgcagagctgagcagttcagcagaccgtatgtcccacaatgcctaaaacattgactatgtttacagaaaaagtttgctgacccctgctctagcaaacgcatcctttcctactccaccccaatttgtatttagatagtttctctaacagaacggacaaatgaggctgcaaactaatttatttttgtcaaaaatcaatgttttgacatccacagacagtgaaataaaagaaatggcttgctgaaaaacatgaggagtcctagccacaaaatcactgcttaggttgcaattgccaaaatgaagccttcttagaagcacttctttagtatatacaggtgttggctgaagtccgtgcctcactctgggaaccattcttagtctccagtgtctcctattacaaagaagctggcagaaataaaaatgaaggggtgagagcggttccaccctagtctcatggtggaaaattcattggggagagctgtccaggatatttggagtcctgggtagaaggagcttgtaactactttaaagtcgacatctttgcacaggtgattgagtttctctgacctcattgcttcacctctgtctcctcccgtccttccgcacgtgcccacacacacgcagttcagccctctttcctccataagcctccatcgttttctcttttctcctcttgatcctttcaagcgagtatcttgttgaattgtatgttctgttggatctcctccttcataacatctggcttgttggacagaaaaaccctacagcccaccccctcccacagcccacctccacttttgaaagcccaaattacacctctcccagaacacagtgttgacgtaaatacagttacccaatattcctgtttgttcacctatttgctactttcactcagtagcatcccattttgtaaaatgaattccatggtcaccctgtcacaggaagtaatgaaaaatccagtgttcagtgtagtggtgcaaacctgagggcatagagctgttcatagagggctcttgttatagccaaacagacacagcaacaatctcaccatttatatatatatttttaacttgtccagctcatctatggaaaactactcaggtggtatgctgtttgaagcctcatcttcctacatgaaaattatgggcatttgtcccaatgattttgtttcagctgttctgtaggctgcataaccactctgatatttaggtatctgctattttattatcttaaaagacaaattaatttaattgcatgtgctagggaaaagctaccatgtacattcaccccaagtaaatagaatcctagatgaatcctagaaaaataatccctaagcagataggtagacagaggtaaacattcacatgatttagctctctagctcttgcactctgaacattcttgctttggttctgacttctgggaactgctttgcatttctcctatagatctgtagttaagggaaccaaggggtcattggggcaaaagcattgtttctcaaagctccttgattaagagaaagaacagaaatttgcacagaagatagtgtcaaggagtgagaaagtttgtttgagggcagtagctcagtgtggaagaaaatcctgaagtttctgttgaagccatacaatgttctatggggttactctctaagacattctctgaggtgtgtgaggaagtcactactcctagcctttgttaagatgtaattttaaatattcagttatggtactatgtttgcaactctcgtcttatcacaatgcctcagtagtttgttcccttagaaacatttagatgtgcacaaattaatcttttatatatctaaaggtttttctatcatgcattggattgctcagaataaagtgtctgttagacttcgttttggtaaataaattctccataatgtagattaataatataaaagtctttaatgacacaatatatctatatagcctcactgtataattcagaaataaaaattgattctgc

SEQ ID NO: 172285 - DNA, 7434 bp, Homo sapiens
  Payload ID: 13872
  Gene Symbol: PRUNE2
  Gene Name: prune homolog 2 (Drosophila)
  ENST ID: ENST00000426088
  CDS Start-End: 1-7153
tttccagagccctgaatcatggaaagagcataagccaagctccattgataggagagcctcagattctgtatttcaaccaaagagcctcgaatttacaaagtcaggtccctgggagtctgaatttggtcagcctgaactgggtagcaatgatattcaagacaaaaatgaggaaagcttgccgttccagaacctgcccatggagaagtcacctttgccaaatacatctccccaaggaacaaaccacctgatagaagactttgcttctttgtggcattctggtcgctctcccacagccatgcccgagccctggggaaatcctacagatgatggtgaaccagcagctgtggcgccattcccagcctggagtgcatttggtaaagaagatcatgatgaagctttaaaaaatacctggaatttgcacccaacaagcagcaagacaccttctgttagggacccgaatgagtgggccatggcaaaaagtgggtttgccttttcttcttcagaactactggacaattcacccagtgagataaacaatgaagcagctccagaaatctggggcaagaaaaacaatgactccagggatcacatctttgcacctggaaatcccagttctgatctggatcacacatggactaattctaagccaccaaaagaagatcagaatggtttagtggatcctaaaactaggggcaaggtatatgaaaaggtagattcctggaacctttttgaggagaatatgaagaaaggagggtcagatgtcctagttccttgggaagattccttcttatcttacaaatgttctgattacagtgcatccaacctaggagaagattcggtgccttcccccttagataccaattattccacctcagactcttacacatcaccaacatttgctggagacgaaaaggaaactgaacacaagccatttgctaaagaggaaggttttgagtcaaaagatggtaactccacggcagaggagactgacattcctcctcagtcactgcaacagtcatctcgaaatcgaatcagttcaggtcctgggaacctagacatgtgggcttcacctcatacagataacagttctgaaataaataccactcacaacctggatgaaaatgaactcaagacagagcacacagatggtaagaatatctccatggaggatgacgtcggggaaagcagccagtccagttacgacgaccccagcatgatgcaactgtacaatgaaacaaaccgacaactcacacttttgcacagcagcaccaactcccggcagacggcccctgacagtctcgacttgtggaacagagtgattttggaggatactcagtccactgcaacgatctcagatatggacaatgatttggactgggatgactgcagtgggggtgcggcaatccccagtgatggtcaaacagaaggatacatggctgaaggttccgagccggaaacccgatttacagtgagacagctggaaccctggggcttggagtatcaggaagcaaatcaggtagattgggagctccctgcctctgatgagcataccaaggacagtgctcccagtgaacatcacacattgaatgagaaaagtgggcagctaattgcaaacagtatttgggattctgtcatgagagataaagacatgtcatcattcatgttaccaggctcctcacatatcacagattcagagcaaagggaattgcctcctgaaatccccagccattcagcaaatgttaaagacactcattccccagatgcgccagcagcctctggaaccagtgaatcagaggcacttatatctcatcttgacaagcaggacacagagagggaaaccctgcaaagtgatgcagcatccttggcgactaggcttgagaatccagggtattttccacacccagatccatggaaaggtcatggcgatggacaaagtgaaagtgagaaggaagcccagggagccactgacagggggcaccttgatgaagaggaggtgatcgcctctggtgtggagaatgcctcagggatttctgaaaaagggcagagtgaccaggaactgtcttctctggttgcatctgaacatcaggaaatctgcattaaatcaggcaaaatcagctctcttgctgtcactttcagtcctcaaaccgaggaaccagaggaagttttagagtatgaggaggggtcttacaatctagactcccgtgatgtgcaaacagggatgtccgcagataacctgcagccaaaagatacccatgaaaaacacctcatgagtcaaagaaattcaggtgaaactactgagacttcagatgggatgaatttcacaaaatatgtatctgtacctgaaaaggatcttgagaaaactgaagaatgtaactttctagagccagagaacgtgggtggagggccacctcacagagttccccgaagtcttgattttggggacgtccctatagacagtgatgtgcatgtcagcagcacatgttctgagataaccaaaaatcttgacgttaaggggtctgaaaatagccttccaggagccggttcgtctggaaattttgacagagatactatttctagtgagtatactcattcaagtgcatcaagtcctgagttaaatgactcttcagttgcactgtcctcctggggccagcaacccagttctgggtatcaagaagaaaaccaaggcaactggagtgaacagaatcaccaagaatctgaactaattaccactgatggccaagtagaaatagttaccaaagtgaaggatttagagaaaaacagaataaatgagtttgaaaagagctttgatcgcaaaactcctacatttttagagatctggaatgactcagttgatggtgattccttttcctctttatccagtcctgaaacaggcaaatattctgaacattcagggacacatcaggaaagcaatctaattgctagctaccaggagaaaaatgaacatgacatttctgcaactgtgcagccagaggatgccagggtcatttcaacaagctcaggttctgatgatgacagtgtcggtggtgaagagtcaatagaggaagagatccaggtggccaactgccacgttgctgaggatgaatccagagcttgggattcattgaatgaatctaataagttcttggtcacagctgatcctaagtctgaaaatatttatgactacctagacagctcagagccagcagagaatgagaataagtcaaacccattctgtgacaatcaacaaagcagccctgatccctggactttctcaccattaacggagactgaaatgcagattacagcagtggagaaggagaagagatcttctccagaaacagggacaacaggagatgttgcatggcaaatatctcccaaagcttcgttcccaaagaacgaagataattctcaactggaaatgctgggcttctcagctgatagcactgagtggtggaaggcctcaccccaggaagggagactaattgaaagtccatttgaaagggagctgtctgactccagtggtgtgttggagataaattcttcagtacaccaaaatgccagtccctggggagtaccagttcagggtgatattgagcccgtggaaacacactatactaatccttttagtgacaaccatcagtcaccctttctggaaggtaatgggaagaactcccatgagcaactctggaacattcaaccaaggcagccagacccagatgctgacaagttcagccagcttgtaaaattagaccaaattaaagaaaaggactcaagagagcaaacctttgtgtctgctgctggtgatgagctgactcctgaaacacctacccaagagcagtgtcaggacaccatgctgccagtctgtgatcatccggacacagcctttactcacgcagaggaaaatagttgtgttacatctaatgtttcaactaatgaaggtcaagaaacaaatcagtgggaacaagaaaaatcatacctaggtgagatgacaaattcaagcattgccacagaaaattttcctgctgtcagttctcccacccaactgataatgaagccaggctctgaatgggatggctctaccccaagtgaggactcccgaggtacctttgtgccagatattttacatggcaactttcaagagggtgggcagctggcctctgccgcgcctgacttgtggatagatgctaagaagcccttcagtttgaaagcagatggtgagaatcctgatatcctgacgcactgcgaacatgacagcaattctcaggcttccgacagccctgatatatgtcacgattctgaagcaaagcaagagactgagaagcacctcagtgcttgcatgggacctgaagtggaatccagtgagctttgtctcactgagccagagatagatgaagaacccatttatgagcctggacgggagtttgtcccatccaatgcagaactcgattctgaaaacgcaactgtgctgcctccaattggctatcaagcagacataaagggctcctctcagcccgcctctcataaaggttcacctgaaccttctgaaataaacggtgacaacagtacaggtttacaagtatcagaaaaaggagccagcccagatatggcaccaattttggaaccagttgacagaagaatcccaaggattgaaaatgtggcaactagcatttttgtaactcaccaagagccaactccagaaggtgacggttcttggatatcagacagcttttctcctgaaagtcagcctggtgcaagagctttgtttgatggtgatccacatttatccacagagaatcctgccttggttcctgatgctttgctagcctcagacacttgtctggatataagcgaagctgcctttgaccacagtttcagcgatgcctcaggtctcaacacatccacgggaacaatagatgacatgagtaaactgacattatccgaaggccatccggaaacgccagttgatggggacctagggaagcaagatatctgctcatctgaagcctcgtggggtgattttgaatatgatgtaatgggccagaatatcgatgaagatttactgagagagcctgaacacttcctgtatggtggtgaccctcctttggaggaagattctctgaagcagtcgctggcaccgtacacacctccctttgatttgtcttatctcacagaacctgcccagagtgctgaaacaatagaggaagctgggtctccagaggatgaatctctgggatgcagagcagcagagatagtgctttctgcacttcctgatcgaagaagtgagggaaaccaggctgagaccaaaaacagactgcctggatcccagctggctgtgctgcatattcgtgaagaccctgagtccgtttatttgccggtaggagcaggctccaacattttgtctccatcaaacgttgactgggaagtagaaacagataattctgatttaccagcaggtggagacataggaccaccaaatggtgccagcaaggaaatatcagaattggaagaagaaaaaacaattcctaccaaagagcctgagcagataaaatcagaatacaaggaagaaagatgtacagagaagaatgaagatcgtcatgcactacacatggattacatacttgtaaaccgtgaagaaaattcacactcaaagccagagacctgtgaagaaagagaaagcatagctgaattagaattgtatgtaggttccaaagaaacagggctgcagggaactcagttagcaagcttcccagacacatgtcagccagcctccttaaatgaaagaaaaggtctctctgcagagaaaatgtcttctaaaagcgatacgagatcatcttttgaaagccctgcacaagaccagagttggatgttcttgggccatagtgaggttggtgatccatcactggatgccagggactcagggcctgggtggtctggcaagactgtggagccgttctctgaactcggcttgggtgagggtccccagctgcagattctggaagaaatgaagcctctagaatctttggcactagaggaagcctctggtccagtcagccaatcacagaagagtaagagccgaggcagggctggcccggatgcagttacgttgcaggctgtcacccatgacaatgaatgggaaatgctttcaccacagcctgttcagaaaaacatgatccctgacacggaaatggaggaggagacagagttccttgagctcggaaccaggatatcaagaccaaatggactactgtcagaggatgtaggaatggacatcccctttgaagagggcgtgctgagtcccagtgctgcagacatgaggcctgaacctcctaattctctggatcttaatgacactcatcctcggagaatcaagctcacagccccaaatatcaatctttctctggaccaaagtgaaggatctattctctctgatgataacttggacagtccagatgaaattgacatcaatgtggatgaacttgatacccccgatgaagcagattcttttgagtacactggccatgatcccacagccaacaaagattctggccaagagtcagagtctattccagaatatacggccgaagaggaacgggaggacaaccggctttggaggacagtggtcattggagaacaagagcagcgcattgacatgaaggtcatcgagccctacaggagagtcatttctcacggaggagattcaggatactatggggacggtctaaatgccatcattgtgtttgccgcctgttttctgccagacagcagtcgggcggattaccactatgtcatggaaaatcttttcctatatgtaataagtactttagagttgatggtagctgaagactatatgattgtgtacttgaatggtgcaaccccaagaaggaggatgccagggctaggctggatgaagaaatgctaccagatgattgacagacggttgaggaagaatttgaaatcattcatcattgttcatccatcttggttcatcagaacaatccttgctgtgacacgaccttttataagttcaaaattcagcagtaaaattaaatatgtcaatagcttatcagaactcagtgggctgatcccaatggattgcatccacattccagagagcatcatcaatattgacttgaagctgaaagaaaagccttagttggccatgctggaagaagaggatgcttttctggttcatggttctgttgaaacatatctacctgaaagagacagggctgatgttacctttttccactttgcactacctggtgccattctaaatttctaaggggaaaaatagaaagtttgtttactcttaagatattttatgaaattgtgtgtactttcctattttgccaattatgtgcctcaaagattttagttgagccttagcaagaaagtaggaccttccatttcaatacttcattaacacggtgtagt

SEQ ID NO: 172286 - DNA, 903 bp, Homo sapiens
  Payload ID: 13872
  Gene Symbol: PRUNE2
  Gene Name: prune homolog 2 (Drosophila)
  ENST ID: ENST00000424866
  CDS Start-End: 1-783
attgacatcaatgtggatgaacttgatacccccgatgaagcagattcttttgagtacactggccatgatcccacagccaacaaagattctggccaagagtcagagtctattccagaatatacggccgaagaggaacgggaggacaaccggctttggaggacagtggtcattggagaacaagagcagcgcattgacatgaaggtcatcgagccctacaggagagtcatttctcacggaggagattcaggatactatggggacggtctaaatgccatcattgtgtttgccgcctgttttctgccagacagcagtcgggcggattaccactatgtcatggaaaatcttttcctatatgtaataagtactttagagttgatggtagctgaagactatatgattgtgtacttgaatggtgcaaccccaagaaggaggatgccagggctaggctggatgaagaaatgctaccagatgattgacagacggttgaggaagaatttgaaatcattcatcattgttcatccatcttggttcatcagaacaatccttgctgtgacacgaccttttataagttcaaaattcagcagtaaaattaaatatgtcaatagcttatcagaactcagtgggctgatcccaatggattgcatccacattccagagagcatcatcaagtacgatgaagagagatcttataagagaagtgtgagaactagctgcctttacaatgatccagaaatgtcttctatggagaaggatattgacttgaagctgaaagaaaagccttagttggccatgctggaagaagaggatgcttttctggttcatggttctgttgaaacatatctacctgaaagagacagggctgatgttacctttttccactttgcactacctggtgccattcta

SEQ ID NO: 172287 - DNA, 12356 bp, Homo sapiens
  Payload ID: 13872
  Gene Symbol: PRUNE2
  Gene Name: prune homolog 2 (Drosophila)
  ENST ID: ENST00000443509
  CDS Start-End: 79-9267
accccgctcgtcttccttgggccgagattttccactgcgcccctccgagtacccgggttccaaacccctagccacgacatggaagaatttttgcaacgcgccaaatctaaactgaatcgaagcaaacgcttggagaaggtccatgtggttattgggcctaaatcgtgtgacttggattctctcatttctaccttcacatatgcttactttctagacaaggtcagtccaccaggggttctgtgtttaccagtgctgaacataccaagaactgaattcaactacttcaccgagacgaggtttattttagaagagctaaatatttccgaatcattccacatattccgggatgaaattaacctgcatcagctaaatgatgaagggaagttatcgataacacttgttggcagcagtgtgctggcgagtgaagacaaaactttagaatcagcagttgtcaaagtcattaatccggttgagcagagcgatgccaacgttgagttccgagagtcttcctcttctctcgtgctaaaggagattctccaagaggctcctgagctcatcaccgagcaactggctcatcgcctcagaggtagcattcttttcaagtggatgaccatggaatcagagaagatctcagagaagcaggaggaaattctttctatcctggaagaaaaatttcctaacttgcctccaagagaggacatcatcaacgtcctacaggagacccagttcagtgctcagggtttaagtattgaacagacaatgttgaaagatctaaaggagctgtcagatggagaaataaaagtggccattagtactgtgagcatgaaccttgagaattgtctatttcacagcaatattaccagtgacttgaaagcatttacagacaagtttggttttgatgtcctcatcctgttctccagctatctgtcagaggagcagcagccgagacgacagattgctgtgtactcagaaaacatggagctgtgcagtcagatttgctgtgagctggaagagtgtcagaacccttgcctagaactggagccctttgactgtggctgtgatgagatcctggtgtaccaacaagaggacccttcagtgacttgtgatcaggtggttctcgttgtcaaggaagtcatcaacaggaggtgtccagagatggtctccaatagccggacatcctcaacagaagccgtggcaggcagtgcccccctctcccaggggtcttctgggattatggaattgtatggttctgacatagagccacaacccagctctgtgaatttcatagagaaccctccagatctcaatgattctaaccaggctcaggtggatgccaatgtagaccttgttagcccagacagcggactggctaccattaggagcagccgctcatccaaggagagctctgttttcctcagtgacgacagccccgtgggagaaggtgctgggcctcaccacacccttctcccagggcttgactcctacagccccatccctgaaggggcggtggcggaggaacatgcatggtctggagaacacggtgagcacttcgacctcttcaattttgacccagcacccatggcttctgggcagtcccagcaatcttctcattctgcagactactccccagcagatgacttcttccccaacagtgacctgtcagaaggacagctccccgctgggcctgaaggacttgatggcatgggaaccaacatgtctaattattcatccagttcacttttgtcaggggctggcaaagatagccttgtggaacatgatgaggagtttgtccagagacaagacagtcccagagataactctgaaagaaatttgagcctgacagattttgtgggagatgaatccccttccccagaaaggctaaaaaatactggaaagaggatcccaccaacacccatgaatagtttagtagaaagctcgccatccactgaagaaccagcctcactctatacagaagatatgacccaaaaagcaactgacacaggtcacatggggccacctcagacccatgcacggtgcagcagctggtggggtggtttggaaattgactccaaaaatattgcagatgcgtggagttccagtgaacaggaatctgttttccagagccctgaatcatggaaagagcataagccaagctccattgataggagagcctcagattctgtatttcaaccaaagagcctcgaatttacaaagtcaggtccctgggagtctgaatttggtcagcctgaactgggtagcaatgatattcaagacaaaaatgaggaaagcttgccgttccagaacctgcccatggagaagtcacctttgccaaatacatctccccaaggaacaaaccacctgatagaagactttgcttctttgtggcattctggtcgctctcccacagccatgcccgagccctggggaaatcctacagatgatggtgaaccagcagctgtggcgccattcccagcctggagtgcatttggtaaagaagatcatgatgaagctttaaaaaatacctggaatttgcacccaacaagcagcaagacaccttctgttagggacccgaatgagtgggccatggcaaaaagtgggtttgccttttcttcttcagaactactggacaattcacccagtgagataaacaatgaagcagctccagaaatctggggcaagaaaaacaatgactccagggatcacatctttgcacctggaaatcccagttctgatctggatcacacatggactaattctaagccaccaaaagaagatcagaatggtttagtggatcctaaaactaggggcaaggtatatgaaaaggtagattcctggaacctttttgaggagaatatgaagaaaggagggtcagatgtcctagttccttgggaagattccttcttatcttacaaatgttctgattacagtgcatccaacctaggagaagattcggtgccttcccccttagataccaattattccacctcagactcttacacatcaccaacatttgctggagacgaaaaggaaactgaacacaagccatttgctaaagaggaaggttttgagtcaaaagatggtaactccacggcagaggagactgacattcctcctcagtcactgcaacagtcatctcgaaatcgaatcagttcaggtcctgggaacctagacatgtgggcttcacctcatacagataacagttctgaaataaataccactcacaacctggatgaaaatgaactcaagacagagcacacagatggtaagaatatctccatggaggatgacgtcggggaaagcagccagtccagttacgacgaccccagcatgatgcaactgtacaatgaaacaaaccgacaactcacacttttgcacagcagcaccaactcccggcagacggcccctgacagtctcgacttgtggaacagagtgattttggaggatactcagtccactgcaacgatctcagatatggacaatgatttggactgggatgactgcagtgggggtgcggcaatccccagtgatggtcaaacagaaggatacatggctgaaggttccgagccggaaacccgatttacagtgagacagctggaaccctggggcttggagtatcaggaagcaaatcaggtagattgggagctccctgcctctgatgagcataccaaggacagtgctcccagtgaacatcacacattgaatgagaaaagtgggcagctaattgcaaacagtatttgggattctgtcatgagagataaagacatgtcatcattcatgttaccaggctcctcacatatcacagattcagagcaaagggaattgcctcctgaaatccccagccattcagcaaatgttaaagacactcattccccagatgcgccagcagcctctggaaccagtgaatcagaggcacttatatctcatcttgacaagcaggacacagagagggaaaccctgcaaagtgatgcagcatccttggcgactaggcttgagaatccagggtattttccacacccagatccatggaaaggtcatggcgatggacaaagtgaaagtgagaaggaagcccagggagccactgacagggggcaccttgatgaagaggaggtgatcgcctctggtgtggagaatgcctcagggatttctgaaaaagggcagagtgaccaggaactgtcttctctggttgcatctgaacatcaggaaatctgcattaaatcaggcaaaatcagctctcttgctgtcactttcagtcctcaaaccgaggaaccagaggaagttttagagtatgaggaggggtcttacaatctagactcccgtgatgtgcaaacagggatgtccgcagataacctgcagccaaaagatacccatgaaaaacacctcatgagtcaaagaaattcaggtgaaactactgagacttcagatgggatgaatttcacaaaatatgtatctgtacctgaaaaggatcttgagaaaactgaagaatgtaactttctagagccagagaacgtgggtggagggccacctcacagagttccccgaagtcttgattttggggacgtccctatagacagtgatgtgcatgtcagcagcacatgttctgagataaccaaaaatcttgacgttaaggggtctgaaaatagccttccaggagccggttcgtctggaaattttgacagagatactatttctagtgagtatactcattcaagtgcatcaagtcctgagttaaatgactcttcagttgcactgtcctcctggggccagcaacccagttctgggtatcaagaagaaaaccaaggcaactggagtgaacagaatcaccaagaatctgaactaattaccactgatggccaagtagaaatagttaccaaagtgaaggatttagagaaaaacagaataaatgagtttgaaaagagctttgatcgcaaaactcctacatttttagagatctggaatgactcagttgatggtgattccttttcctctttatccagtcctgaaacaggcaaatattctgaacattcagggacacatcaggaaagcaatctaattgctagctaccaggagaaaaatgaacatgacatttctgcaactgtgcagccagaggatgccagggtcatttcaacaagctcaggttctgatgatgacagtgtcggtggtgaagagtcaatagaggaagagatccaggtggccaactgccacgttgctgaggatgaatccagagcttgggattcattgaatgaatctaataagttcttggtcacagctgatcctaagtctgaaaatatttatgactacctagacagctcagagccagcagagaatgagaataagtcaaacccattctgtgacaatcaacaaagcagccctgatccctggactttctcaccattaacggagactgaaatgcagattacagcagtggagaaggagaagagatcttctccagaaacagggacaacaggagatgttgcatggcaaatatctcccaaagcttcgttcccaaagaacgaagataattctcaactggaaatgctgggcttctcagctgatagcactgagtggtggaaggcctcaccccaggaagggagactaattgaaagtccatttgaaagggagctgtctgactccagtggtgtgttggagataaattcttcagtacaccaaaatgccagtccctggggagtaccagttcagggtgatattgagcccgtggaaacacactatactaatccttttagtgacaaccatcagtcaccctttctggaaggtaatgggaagaactcccatgagcaactctggaacattcaaccaaggcagccagacccagatgctgacaagttcagccagcttgtaaaattagaccaaattaaagaaaaggactcaagagagcaaacctttgtgtctgctgctggtgatgagctgactcctgaaacacctacccaagagcagtgtcaggacaccatgctgccagtctgtgatcatccggacacagcctttactcacgcagaggaaaatagttgtgttacatctaatgtttcaactaatgaaggtcaagaaacaaatcagtgggaacaagaaaaatcatacctaggtgagatgacaaattcaagcattgccacagaaaattttcctgctgtcagttctcccacccaactgataatgaagccaggctctgaatgggatggctctaccccaagtgaggactcccgaggtacctttgtgccagatattttacatggcaactttcaagagggtgggcagctggcctctgccgcgcctgacttgtggatagatgctaagaagcccttcagtttgaaagcagatggtgagaatcctgatatcctgacgcactgcgaacatgacagcaattctcaggcttccgacagccctgatatatgtcacgattctgaagcaaagcaagagactgagaagcacctcagtgcttgcatgggacctgaagtggaatccagtgagctttgtctcactgagccagagatagatgaagaacccatttatgagcctggacgggagtttgtcccatccaatgcagaactcgattctgaaaacgcaactgtgctgcctccaattggctatcaagcagacataaagggctcctctcagcccgcctctcataaaggttcacctgaaccttctgaaataaacggtgacaacagtacaggtttacaagtatcagaaaaaggagccagcccagatatggcaccaattttggaaccagttgacagaagaatcccaaggattgaaaatgtggcaactagcatttttgtaactcaccaagagccaactccagaaggtgacggttcttggatatcagacagcttttctcctgaaagtcagcctggtgcaagagctttgtttgatggtgatccacatttatccacagagaatcctgccttggttcctgatgctttgctagcctcagacacttgtctggatataagcgaagctgcctttgaccacagtttcagcgatgcctcaggtctcaacacatccacgggaacaatagatgacatgagtaaactgacattatccgaaggccatccggaaacgccagttgatggggacctagggaagcaagatatctgctcatctgaagcctcgtggggtgattttgaatatgatgtaatgggccagaatatcgatgaagatttactgagagagcctgaacacttcctgtatggtggtgaccctcctttggaggaagattctctgaagcagtcgctggcaccgtacacacctccctttgatttgtcttatctcacagaacctgcccagagtgctgaaacaatagaggaagctgggtctccagaggatgaatctctgggatgcagagcagcagagatagtgctttctgcacttcctgatcgaagaagtgagggaaaccaggctgagaccaaaaacagactgcctggatcccagctggctgtgctgcatattcgtgaagaccctgagtccgtttatttgccggtaggagcaggctccaacattttgtctccatcaaacgttgactgggaagtagaaacagataattctgatttaccagcaggtggagacataggaccaccaaatggtgccagcaaggaaatatcagaattggaagaagaaaaaacaattcctaccaaagagcctgagcagataaaatcagaatacaaggaagaaagatgtacagagaagaatgaagatcgtcatgcactacacatggattacatacttgtaaaccgtgaagaaaattcacactcaaagccagagacctgtgaagaaagagaaagcatagctgaattagaattgtatgtaggttccaaagaaacagggctgcagggaactcagttagcaagcttcccagacacatgtcagccagcctccttaaatgaaagaaaaggtctctctgcagagaaaatgtcttctaaaagcgatacgagatcatcttttgaaagccctgcacaagaccagagttggatgttcttgggccatagtgaggttggtgatccatcactggatgccagggactcagggcctgggtggtctggcaagactgtggagccgttctctgaactcggcttgggtgagggtccccagctgcagattctggaagaaatgaagcctctagaatctttggcactagaggaagcctctggtccagtcagccaatcacagaagagtaagagccgaggcagggctggcccggatgcagttacgttgcaggctgtcacccatgacaatgaatgggaaatgctttcaccacagcctgttcagaaaaacatgatccctgacacggaaatggaggaggagacagagttccttgagctcggaaccaggatatcaagaccaaatggactactgtcagaggatgtaggaatggacatcccctttgaagagggcgtgctgagtcccagtgctgcagacatgaggcctgaacctcctaattctctggatcttaatgacactcatcctcggagaatcaagctcacagccccaaatatcaatctttctctggaccaaagtgaaggatctattctctctgatgataacttggacagtccagatgaaattgacatcaatgtggatgaacttgatacccccgatgaagcagattcttttgagtacactggccatgatcccacagccaacaaagattctggccaagagtcagagtctattccagaatatacggccgaagaggaacgggaggacaaccggctttggaggacagtggtcattggagaacaagagcagcgcattgacatgaaggtcatcgagccctacaggagagtcatttctcacggaggagattcaggatactatggggacggtctaaatgccatcattgtgtttgccgcctgttttctgccagacagcagtcgggcggattaccactatgtcatggaaaatcttttcctatatgtaataagtactttagagttgatggtagctgaagactatatgattgtgtacttgaatggtgcaaccccaagaaggaggatgccagggctaggctggatgaagaaatgctaccagatgattgacagacggttgaggaagaatttgaaatcattcatcattgttcatccatcttggttcatcagaacaatccttgctgtgacacgaccttttataagttcaaaattcagcagtaaaattaaatatgtcaatagcttatcagaactcagtgggctgatcccaatggattgcatccacattccagagagcatcatcaatattgacttgaagctgaaagaaaagccttagttggccatgctggaagaagaggatgcttttctggttcatggttctgttgaaacatatctacctgaaagagacagggctgatgttacctttttccactttgcactacctggtgccattctaaatttctaaggggaaaaatagaaagtttgtttactcttaagatattttatgaaattgtgtgtactttcctattttgccaattatgtgcctcaaagattttagttgagccttagcaagaaagtaggaccttccatttcaatacttcattaacacggtgtagtgatactttgtcccttagactggtgtttaccagtaagatacctttaatccactgttaagtatgagtggatttgtttccatagattagctggatttccttttggtgattgcattaggtttaaagtacacaggtctcaactctccccaggaaagtttcccctgtttgactccacctttaaaatcctaagcctgactaggacagccacaaaccacacaaggtgtaaaaccatcatcagctaagtgcccgttttgttcttgtttaccagaatctcctttaacttctcaaagggaagccgggctttctaatccacgtcaactttattttagttgtcaaattgggcattatattttatgtaaattggtcttttaacatcattttcctgatgaatgttggtgaccaccacattgtgaaatttaagaatccgtgttgcatgtttggtagctctctgagtttcaggccataaactcagctccagaggttaccttttaagtgccaagaactcaagtgcaaggtggcctactcaaaaatcatttggtagcattcagttattcatgaattcctctctcgcatgcattataaaaagtgatctgctttaaaacaccgtaatctgatcataggcttaaaattaaatatgagtattactttcatgtacaaaatatttcctttatagtcttcatatgccctttaaaatgccaacaagatttcaagtctgtaggcctctagtgaggtggggtggcaaaccacagctaagtctcgctcaccactgcaagctaagaatggtttttacattttgggttggaaaaattttttttgaatatttcatgacacatgaaaattattcaaatgttagtgccgataaataaagtggtactgaaacacagccacacaaacttgtttttgtactgtctacagctactttcacactacagccgcagagctgagcagttcagcagaccgtatgtcccacaatgcctaaaacattgactatgtttacagaaaaagtttgctgacccctgctctagcaaacgcatcctttcctactccaccccaatttgtatttagatagtttctctaacagaacggacaaatgaggctgcaaactaatttatttttgtcaaaaatcaatgttttgacatccacagacagtgaaataaaagaaatggcttgctgaaaaacatgaggagtcctagccacaaaatcactgcttaggttgcaattgccaaaatgaagccttcttagaagcacttctttagtatatacaggtgttggctgaagtccgtgcctcactctgggaaccattcttagtctccagtgtctcctattacaaagaagctggcagaaataaaaatgaaggggtgagagcggttccaccctagtctcatggtggaaaattcattggggagagctgtccaggatatttggagtcctgggtagaaggagcttgtaactactttaaagtcgacatctttgcacaggtgattgagtttctctgacctcattgcttcacctctgtctcctcccgtccttccgcacgtgcccacacacacgcagttcagccctctttcctccataagcctccatcgttttctcttttctcctcttgatcctttcaagcgagtatcttgttgaattgtatgttctgttggatctcctccttcataacatctggcttgttggacagaaaaaccctacagcccaccccctcccacagcccacctccacttttgaaagcccaaattacacctctcccagaacacagtgttgacgtaaatacagttacccaatattcctgtttgttcacctatttgctactttcactcagtagcatcccattttgtaaaatgaattccatggtcaccctgtcacaggaagtaatgaaaaatccagtgttcagtgtagtggtgcaaacctgagggcatagagctgttcatagagggctcttgttatagccaaacagacacagcaacaatctcaccatttatatatatatttttaacttgtccagctcatctatggaaaactactcaggtggtatgctgtttgaagcctcatcttcctacatgaaaattatgggcatttgtcccaatgattttgtttcagctgttctgtaggctgcataaccactctgatatttaggtatctgctattttattatcttaaaagacaaattaatttaattgcatgtgctagggaaaagctaccatgtacattcaccccaagtaaatagaatcctagatgaatcctagaaaaataatccctaagcagataggtagacagaggtaaacattcacatgatttagctctctagctcttgcactctgaacattcttgctttggttctgacttctgggaactgctttgcatttctcctatagatctgtagttaagggaaccaaggggtcattggggcaaaagcattgtttctcaaagctccttgattaagagaaagaacagaaatttgcacagaagatagtgtcaaggagtgagaaagtttgtttgagggcagtagctcagtgtggaagaaaatcctgaagtttctgttgaagccatacaatgttctatggggttactctctaagacattctctgaggtgtgtgaggaagtcactactcctagcctttgttaagatgtaattttaaatattcagttatggtactatgtttgcaactctcgtcttatcacaatgcctcagtagtttgttcccttagaaacatttagatgtgcacaaattaatcttttatatatctaaaggtttttctatcatgcattggattgctcagaataaagtgtctgttagacttcgttttgg

SEQ ID NO: 172288 - DNA, 12437 bp, Homo sapiens
  Payload ID: 13872
  Gene Symbol: PRUNE2
  Gene Name: prune homolog 2 (Drosophila)
  ENST ID: ENST00000428286
  CDS Start-End: 1156-9348
accccgctcgtcttccttgggccgagattttccactgcgcccctccgagtacccgggttccaaacccctagccacgacatggaagaatttttgcaacgcgccaaatctaaactgaatcgaagcaaacgcttggagaaggtccatgtggttattgggcctaaatcgtgtgacttggattctctcatttctaccttcacatatgcttactttctagacaaggtcagtccaccaggggttctgtgtttaccagtgctgaacataccaagaactgaattcaactacttcaccgagacgaggtttattttagaagagctaaatatttccgaatcattccacatattccgggatgaaattaacctgcatcagctaaatgatgaagggaagttatcgataacacttgttggcagcagtgtgctggcgagtgaagacaaaactttagaatcagcagttgtcaaagtcattaatccggttgagcagagcgatgccaacgttgagttccgagagtcttcctcttctctcgtgctaaaggagattctccaagaggctcctgagctcatcaccgagcaactggctcatcgcctcagaggtagcattcttttcaagtggatgaccatggaatcagagaagatctcagagaagcaggaggaaattctttctatcctggaagaaaaatttcctaacttgcctccaagagaggacatcatcaacgtcctacaggagacccagttcagtgctcagggtttaagtattgaacagacaatgttgaaagatctaaaggagctgtcagatggagaaataaaagtggccattagtactgtgagcatgaaccttgagaattgtctatttcacagcaatattaccagtgacttgaaagcatttacagacaagtttggttttgatgtcctcatcctgttctccagctatctgtcagaggagcagcagccgagacgacagattgctgtgtactcagaaaacatggagctgtgcagtcagatttgctgtgagctggaagagtgtcagaacccttgcctagaactggagccctttgactgtggctgtgatgagatcctggtgtaccaacaagaggacccttcagtgacttgtgatcaggtggttctcgttgtcaaggaagtcatcaacaggaggtgtccagagatggtctccaatagccggacatcctcaacagaagccgtggcaggcagtgcccccctctcccaggggtcttctgggattatggaattgtatggttctgacatagagccacaacccagctctgtgaatttcatagagaaccctccagatctcaatgattctaaccaggctcaggtggatgccaatgtagaccttgttagcccagacagcggactggctaccattaggagcagccgctcatccaaggagagctctgttttcctcagtgacgacagccccgtgggagaaggtgctgggcctcaccacacccttctcccagggcttgactcctacagccccatccctgaaggggcggtggcggaggaacatgcatggtctggagaacacggtgagcacttcgacctcttcaattttgacccagcacccatggcttctgggcagtcccagcaatcttctcattctgcagactactccccagcagatgacttcttccccaacagtgacctgtcagaaggacagctccccgctgggcctgaaggacttgatggcatgggaaccaacatgtctaattattcatccagttcacttttgtcaggggctggcaaagatagccttgtggaacatgatgaggagtttgtccagagacaagacagtcccagagataactctgaaagaaatttgagcctgacagattttgtgggagatgaatccccttccccagaaaggctaaaaaatactggaaagaggatcccaccaacacccatgaatagtttagtagaaagctcgccatccactgaagaaccagcctcactctatacagaagatatgacccaaaaagcaactgacacaggtcacatggggccacctcagacccatgcacggtgcagcagctggtggggtggtttggaaattgactccaaaaatattgcagatgcgtggagttccagtgaacaggaatctgttttccagagccctgaatcatggaaagagcataagccaagctccattgataggagagcctcagattctgtatttcaaccaaagagcctcgaatttacaaagtcaggtccctgggagtctgaatttggtcagcctgaactgggtagcaatgatattcaagacaaaaatgaggaaagcttgccgttccagaacctgcccatggagaagtcacctttgccaaatacatctccccaaggaacaaaccacctgatagaagactttgcttctttgtggcattctggtcgctctcccacagccatgcccgagccctggggaaatcctacagatgatggtgaaccagcagctgtggcgccattcccagcctggagtgcatttggtaaagaagatcatgatgaagctttaaaaaatacctggaatttgcacccaacaagcagcaagacaccttctgttagggacccgaatgagtgggccatggcaaaaagtgggtttgccttttcttcttcagaactactggacaattcacccagtgagataaacaatgaagcagctccagaaatctggggcaagaaaaacaatgactccagggatcacatctttgcacctggaaatcccagttctgatctggatcacacatggactaattctaagccaccaaaagaagatcagaatggtttagtggatcctaaaactaggggcaaggtatatgaaaaggtagattcctggaacctttttgaggagaatatgaagaaaggagggtcagatgtcctagttccttgggaagattccttcttatcttacaaatgttctgattacagtgcatccaacctaggagaagattcggtgccttcccccttagataccaattattccacctcagactcttacacatcaccaacatttgctggagacgaaaaggaaactgaacacaagccatttgctaaagaggaaggttttgagtcaaaagatggtaactccacggcagaggagactgacattcctcctcagtcactgcaacagtcatctcgaaatcgaatcagttcaggtcctgggaacctagacatgtgggcttcacctcatacagataacagttctgaaataaataccactcacaacctggatgaaaatgaactcaagacagagcacacagatggtaagaatatctccatggaggatgacgtcggggaaagcagccagtccagttacgacgaccccagcatgatgcaactgtacaatgaaacaaaccgacaactcacacttttgcacagcagcaccaactcccggcagacggcccctgacagtctcgacttgtggaacagagtgattttggaggatactcagtccactgcaacgatctcagatatggacaatgatttggactgggatgactgcagtgggggtgcggcaatccccagtgatggtcaaacagaaggatacatggctgaaggttccgagccggaaacccgatttacagtgagacagctggaaccctggggcttggagtatcaggaagcaaatcaggtagattgggagctccctgcctctgatgagcataccaaggacagtgctcccagtgaacatcacacattgaatgagaaaagtgggcagctaattgcaaacagtatttgggattctgtcatgagagataaagacatgtcatcattcatgttaccaggctcctcacatatcacagattcagagcaaagggaattgcctcctgaaatccccagccattcagcaaatgttaaagacactcattccccagatgcgccagcagcctctggaaccagtgaatcagaggcacttatatctcatcttgacaagcaggacacagagagggaaaccctgcaaagtgatgcagcatccttggcgactaggcttgagaatccagggtattttccacacccagatccatggaaaggtcatggcgatggacaaagtgaaagtgagaaggaagcccagggagccactgacagggggcaccttgatgaagaggaggtgatcgcctctggtgtggagaatgcctcagggatttctgaaaaagggcagagtgaccaggaactgtcttctctggttgcatctgaacatcaggaaatctgcattaaatcaggcaaaatcagctctcttgctgtcactttcagtcctcaaaccgaggaaccagaggaagttttagagtatgaggaggggtcttacaatctagactcccgtgatgtgcaaacagggatgtccgcagataacctgcagccaaaagatacccatgaaaaacacctcatgagtcaaagaaattcaggtgaaactactgagacttcagatgggatgaatttcacaaaatatgtatctgtacctgaaaaggatcttgagaaaactgaagaatgtaactttctagagccagagaacgtgggtggagggccacctcacagagttccccgaagtcttgattttggggacgtccctatagacagtgatgtgcatgtcagcagcacatgttctgagataaccaaaaatcttgacgttaaggggtctgaaaatagccttccaggagccggttcgtctggaaattttgacagagatactatttctagtgagtatactcattcaagtgcatcaagtcctgagttaaatgactcttcagttgcactgtcctcctggggccagcaacccagttctgggtatcaagaagaaaaccaaggcaactggagtgaacagaatcaccaagaatctgaactaattaccactgatggccaagtagaaatagttaccaaagtgaaggatttagagaaaaacagaataaatgagtttgaaaagagctttgatcgcaaaactcctacatttttagagatctggaatgactcagttgatggtgattccttttcctctttatccagtcctgaaacaggcaaatattctgaacattcagggacacatcaggaaagcaatctaattgctagctaccaggagaaaaatgaacatgacatttctgcaactgtgcagccagaggatgccagggtcatttcaacaagctcaggttctgatgatgacagtgtcggtggtgaagagtcaatagaggaagagatccaggtggccaactgccacgttgctgaggatgaatccagagcttgggattcattgaatgaatctaataagttcttggtcacagctgatcctaagtctgaaaatatttatgactacctagacagctcagagccagcagagaatgagaataagtcaaacccattctgtgacaatcaacaaagcagccctgatccctggactttctcaccattaacggagactgaaatgcagattacagcagtggagaaggagaagagatcttctccagaaacagggacaacaggagatgttgcatggcaaatatctcccaaagcttcgttcccaaagaacgaagataattctcaactggaaatgctgggcttctcagctgatagcactgagtggtggaaggcctcaccccaggaagggagactaattgaaagtccatttgaaagggagctgtctgactccagtggtgtgttggagataaattcttcagtacaccaaaatgccagtccctggggagtaccagttcagggtgatattgagcccgtggaaacacactatactaatccttttagtgacaaccatcagtcaccctttctggaaggtaatgggaagaactcccatgagcaactctggaacattcaaccaaggcagccagacccagatgctgacaagttcagccagcttgtaaaattagaccaaattaaagaaaaggactcaagagagcaaacctttgtgtctgctgctggtgatgagctgactcctgaaacacctacccaagagcagtgtcaggacaccatgctgccagtctgtgatcatccggacacagcctttactcacgcagaggaaaatagttgtgttacatctaatgtttcaactaatgaaggtcaagaaacaaatcagtgggaacaagaaaaatcatacctaggtgagatgacaaattcaagcattgccacagaaaattttcctgctgtcagttctcccacccaactgataatgaagccaggctctgaatgggatggctctaccccaagtgaggactcccgaggtacctttgtgccagatattttacatggcaactttcaagagggtgggcagctggcctctgccgcgcctgacttgtggatagatgctaagaagcccttcagtttgaaagcagatggtgagaatcctgatatcctgacgcactgcgaacatgacagcaattctcaggcttccgacagccctgatatatgtcacgattctgaagcaaagcaagagactgagaagcacctcagtgcttgcatgggacctgaagtggaatccagtgagctttgtctcactgagccagagatagatgaagaacccatttatgagcctggacgggagtttgtcccatccaatgcagaactcgattctgaaaacgcaactgtgctgcctccaattggctatcaagcagacataaagggctcctctcagcccgcctctcataaaggttcacctgaaccttctgaaataaacggtgacaacagtacaggtttacaagtatcagaaaaaggagccagcccagatatggcaccaattttggaaccagttgacagaagaatcccaaggattgaaaatgtggcaactagcatttttgtaactcaccaagagccaactccagaaggtgacggttcttggatatcagacagcttttctcctgaaagtcagcctggtgcaagagctttgtttgatggtgatccacatttatccacagagaatcctgccttggttcctgatgctttgctagcctcagacacttgtctggatataagcgaagctgcctttgaccacagtttcagcgatgcctcaggtctcaacacatccacgggaacaatagatgacatgagtaaactgacattatccgaaggccatccggaaacgccagttgatggggacctagggaagcaagatatctgctcatctgaagcctcgtggggtgattttgaatatgatgtaatgggccagaatatcgatgaagatttactgagagagcctgaacacttcctgtatggtggtgaccctcctttggaggaagattctctgaagcagtcgctggcaccgtacacacctccctttgatttgtcttatctcacagaacctgcccagagtgctgaaacaatagaggaagctgggtctccagaggatgaatctctgggatgcagagcagcagagatagtgctttctgcacttcctgatcgaagaagtgagggaaaccaggctgagaccaaaaacagactgcctggatcccagctggctgtgctgcatattcgtgaagaccctgagtccgtttatttgccggtaggagcaggctccaacattttgtctccatcaaacgttgactgggaagtagaaacagataattctgatttaccagcaggtggagacataggaccaccaaatggtgccagcaaggaaatatcagaattggaagaagaaaaaacaattcctaccaaagagcctgagcagataaaatcagaatacaaggaagaaagatgtacagagaagaatgaagatcgtcatgcactacacatggattacatacttgtaaaccgtgaagaaaattcacactcaaagccagagacctgtgaagaaagagaaagcatagctgaattagaattgtatgtaggttccaaagaaacagggctgcagggaactcagttagcaagcttcccagacacatgtcagccagcctccttaaatgaaagaaaaggtctctctgcagagaaaatgtcttctaaaagcgatacgagatcatcttttgaaagccctgcacaagaccagagttggatgttcttgggccatagtgaggttggtgatccatcactggatgccagggactcagggcctgggtggtctggcaagactgtggagccgttctctgaactcggcttgggtgagggtccccagctgcagattctggaagaaatgaagcctctagaatctttggcactagaggaagcctctggtccagtcagccaatcacagaagagtaagagccgaggcagggctggcccggatgcagttacgttgcaggctgtcacccatgacaatgaatgggaaatgctttcaccacagcctgttcagaaaaacatgatccctgacacggaaatggaggaggagacagagttccttgagctcggaaccaggatatcaagaccaaatggactactgtcagaggatgtaggaatggacatcccctttgaagagggcgtgctgagtcccagtgctgcagacatgaggcctgaacctcctaattctctggatcttaatgacactcatcctcggagaatcaagctcacagccccaaatatcaatctttctctggaccaaagtgaaggatctattctctctgatgataacttggacagtccagatgaaattgacatcaatgtggatgaacttgatacccccgatgaagcagattcttttgagtacactggccatgaagatcccacagccaacaaagattctggccaagagtcagagtctattccagaatatacggccgaagaggaacgggaggacaaccggctttggaggacagtggtcattggagaacaagagcagcgcattgacatgaaggtcatcgagccctacaggagagtcatttctcacggaggatactatggggacggtctaaatgccatcattgtgtttgccgcctgttttctgccagacagcagtcgggcggattaccactatgtcatggaaaatcttttcctatatgtaataagtactttagagttgatggtagctgaagactatatgattgtgtacttgaatggtgcaaccccaagaaggaggatgccagggctaggctggatgaagaaatgctaccagatgattgacagacggttgaggaagaatttgaaatcattcatcattgttcatccatcttggttcatcagaacaatccttgctgtgacacgaccttttataagttcaaaattcagcagtaaaattaaatatgtcaatagcttatcagaactcagtgggctgatcccaatggattgcatccacattccagagagcatcatcaaactggatgaagaactgagggaagcatcagaggcagctaaaactagctgcctttacaatgatccagaaatgtcttctatggagaaggatattgacttgaagctgaaagaaaagccttagttggccatgctggaagaagaggatgcttttctggttcatggttctgttgaaacatatctacctgaaagagacagggctgatgttacctttttccactttgcactacctggtgccattctaaatttctaaggggaaaaatagaaagtttgtttactcttaagatattttatgaaattgtgtgtactttcctattttgccaattatgtgcctcaaagattttagttgagccttagcaagaaagtaggaccttccatttcaatacttcattaacacggtgtagtgatactttgtcccttagactggtgtttaccagtaagatacctttaatccactgttaagtatgagtggatttgtttccatagattagctggatttccttttggtgattgcattaggtttaaagtacacaggtctcaactctccccaggaaagtttcccctgtttgactccacctttaaaatcctaagcctgactaggacagccacaaaccacacaaggtgtaaaaccatcatcagctaagtgcccgttttgttcttgtttaccagaatctcctttaacttctcaaagggaagccgggctttctaatccacgtcaactttattttagttgtcaaattgggcattatattttatgtaaattggtcttttaacatcattttcctgatgaatgttggtgaccaccacattgtgaaatttaagaatccgtgttgcatgtttggtagctctctgagtttcaggccataaactcagctccagaggttaccttttaagtgccaagaactcaagtgcaaggtggcctactcaaaaatcatttggtagcattcagttattcatgaattcctctctcgcatgcattataaaaagtgatctgctttaaaacaccgtaatctgatcataggcttaaaattaaatatgagtattactttcatgtacaaaatatttcctttatagtcttcatatgccctttaaaatgccaacaagatttcaagtctgtaggcctctagtgaggtggggtggcaaaccacagctaagtctcgctcaccactgcaagctaagaatggtttttacattttgggttggaaaaattttttttgaatatttcatgacacatgaaaattattcaaatgttagtgccgataaataaagtggtactgaaacacagccacacaaacttgtttttgtactgtctacagctactttcacactacagccgcagagctgagcagttcagcagaccgtatgtcccacaatgcctaaaacattgactatgtttacagaaaaagtttgctgacccctgctctagcaaacgcatcctttcctactccaccccaatttgtatttagatagtttctctaacagaacggacaaatgaggctgcaaactaatttatttttgtcaaaaatcaatgttttgacatccacagacagtgaaataaaagaaatggcttgctgaaaaacatgaggagtcctagccacaaaatcactgcttaggttgcaattgccaaaatgaagccttcttagaagcacttctttagtatatacaggtgttggctgaagtccgtgcctcactctgggaaccattcttagtctccagtgtctcctattacaaagaagctggcagaaataaaaatgaaggggtgagagcggttccaccctagtctcatggtggaaaattcattggggagagctgtccaggatatttggagtcctgggtagaaggagcttgtaactactttaaagtcgacatctttgcacaggtgattgagtttctctgacctcattgcttcacctctgtctcctcccgtccttccgcacgtgcccacacacacgcagttcagccctctttcctccataagcctccatcgttttctcttttctcctcttgatcctttcaagcgagtatcttgttgaattgtatgttctgttggatctcctccttcataacatctggcttgttggacagaaaaaccctacagcccaccccctcccacagcccacctccacttttgaaagcccaaattacacctctcccagaacacagtgttgacgtaaatacagttacccaatattcctgtttgttcacctatttgctactttcactcagtagcatcccattttgtaaaatgaattccatggtcaccctgtcacaggaagtaatgaaaaatccagtgttcagtgtagtggtgcaaacctgagggcatagagctgttcatagagggctcttgttatagccaaacagacacagcaacaatctcaccatttatatatatatttttaacttgtccagctcatctatggaaaactactcaggtggtatgctgtttgaagcctcatcttcctacatgaaaattatgggcatttgtcccaatgattttgtttcagctgttctgtaggctgcataaccactctgatatttaggtatctgctattttattatcttaaaagacaaattaatttaattgcatgtgctagggaaaagctaccatgtacattcaccccaagtaaatagaatcctagatgaatcctagaaaaataatccctaagcagataggtagacagaggtaaacattcacatgatttagctctctagctcttgcactctgaacattcttgctttggttctgacttctgggaactgctttgcatttctcctatagatctgtagttaagggaaccaaggggtcattggggcaaaagcattgtttctcaaagctccttgattaagagaaagaacagaaatttgcacagaagatagtgtcaaggagtgagaaagtttgtttgagggcagtagctcagtgtggaagaaaatcctgaagtttctgttgaagccatacaatgttctatggggttactctctaagacattctctgaggtgtgtgaggaagtcactactcctagcctttgttaagatgtaattttaaatattcagttatggtactatgtttgcaactctcgtcttatcacaatgcctcagtagtttgttcccttagaaacatttagatgtgcacaaattaatcttttatatatctaaaggtttttctatcatgcattggattgctcagaataaagtgtctgttagacttcgttttgg

SEQ ID NO: 172289 - DNA, 11512 bp, Homo sapiens
  Payload ID: 13873
  Gene Symbol: PEAK1
  Gene Name: pseudopodium-enriched atypical kinase 1
  Uniprot ID: Q9H792
  ENST ID: ENST00000312493
  CDS Start-End: 280-5520
tgcagtaaacattgctatcttcagaaattaaggaatgagaggcaaggaagaaaggacattcatcttggaaagacccaaagcaccttgaaatttggaaggaatgttttgctagctgctaaaaccacctttgtcaccagaatgaatgaagtgcttcagatttaaataattgatcattcttagaagagctgctgtaacacataggggaagtgaaaactaacagatgaaagttttgtcatgcactgaaagaaaagcattgtctgtgaagttctatttttaaaaatgtctgcttgtaacacctttactgaacatgtttggaaacctggtgaatgcaagaattgctttaaacctaaaagtttgcaccagcttcccccagaccctgagaaggcacccatcacccatggcaatgtgaaaactaatgccaatcacagtaacaaccaccgcatcaggaacacgggcaatttccggcctcctgtggctaaaaaacccactatagctgtgaagcccactatgatagtggcagatgggcaaagtatatgtggtgagcttagcatccaagaacactgtgagaacaaacctgtcatcatagggtggaaccgaaacagagctgccttgagtcagaaaccacttaacaataataatgaagatgatgaaggaattagccatgttcctaagccttatggcaataatgatagtgcaaagaagatgtcagataacaataatggactaactgaagtgttaaaggagatagcaggcttggatactgcccctcagataagaggaaatgaaacaaactccagagaaacattcttgggaagaataaatgattgctataaacgatcattggaaagaaagcttccaccaagttgcatgataggtgggataaaggaaactcagggcaagcatgttattctgagtgggagcacagaagtgattagtaatgaagggggccggttctgttacccagagttttccagtggcgaggagagtgaagaggatgtacttttcagtaacatggaggaggagcacgagagttgggatgagagtgatgaagagctgttggccatggagattcgcatgagagggcaacctcgctttgccaacttcagagcaaacacattgtctcctgttcgattctttgtggacaaaaaatggaataccatccccctgcgaaacaagtctctgcagagaatctgtgctgtggactatgatgacagctatgatgaaatcctgaatggttatgaggaaaattctgtggtctcttatggacaaggaagcattcagagcatggtgtcatctgactccacatcaccagattcttctttaacagaagaatcacgttctgagacagccagtagtttatcccagaagatttgtaatgggggattatctcctggtaacccaggagattctaaggacatgaaggaaattgagcccaattatgaaagtccctctagtaataatcaggataaagattcatcacaggcttccaaaagctcaataaaagttccagagacccacaaagcagtccttgctctccgattagaagagaaagatggcaagattgctgtacaaactgagaaggaagaaagtaaagcctctacagatgttgctgggcaagcagtaaccataaaccttgtccccacagaagagcaagcaaaaccttaccgagttgtgaacctggaacagccattgtgcaagccatatactgtcgtggatgtgtcagcagccatggccagtgagcacctcgagggccctgttaacagccccaagacaaaaagctcatcctctactccaaactctccagttacatcatcttcattgacaccaggacaaataagtgcccatttccaaaaatccagtgcaattcgataccaagaagtatggacttctagcaccagtccacgacaaaagatacctaaagtagaactaattactagtggaactggaccaaatgttcctccaaggaaaaactgtcacaaatcagcacctacatcacccacagctacaaacatttcctccaaaaccatccctgttaagtcacctaatttgtctgaaattaaatttaatagttataacaatgctggtatgccaccttttccaattatcattcatgacgagccaacttatgctcggagttccaaaaatgctatcaaagttcccattgttatcaatccaaatgcatatgacaatctagctatctacaaaagttttctgggaacaagtggagaactctcagtgaaggaaaaaaccacaagtgtaataagccatacttatgaagaaatagaaacagaaagcaaagtgcctgataacaccactagcaaaaccactgactgtcttcaaactaaagggttttcaaacagcacagagcataaaaggggctcagtggctcagaaggttcaagagtttaacaactgtctcaacagaggtcagtcttcaccacagagaagctatagttccagccacagctccccagcaaagatccagagagccactcaagagcctgtggccaaaatagaaggcactcaggagtctcagatggtgggcagcagcagcaccagagagaaagcaagcacagtgctttctcagattgtggcttcaatccaacccccacagtctcctccagaaacacctcaatctggccctaaagcttgcagtgtggaagagctttatgccattcctccagatgctgatgttgctaagagcacacctaagagtacgccagtccggcccaaatctctctttacatctcagcctagtggtgaggctgaagcacctcagaccacagacagtcctaccaccaaagtacagaaagacccatccataaagccagtcaccccctctccctccaaattagtgactagcccccaaagtgagccaccagctccctttcccccgccacgctctacttcttctccttaccatgcaggtaaccttttgcagaggcatttcaccaactggaccaagccaaccagccctaccaggtcaacagaagctgaatcagttttgcactctgaaggcagcaggcgggcagctgatgcaaaacctaagcgctggatatcatttaaaagcttcttccgccgtcggaaaacagatgaggaggatgacaaagagaaagagcgagagaaagggaaactggtgggcctggatggcacagtcattcacatgctgcctcctcctccagttcagcgccatcactggttcacagaggcgaaaggagagtccagtgagaaaccagccattgtcttcatgtacaggtgcgaccctgctcaaggccagctcagtgtggatcagagcaaggctaggacagaccaggcagcagtcatggagaagggtagagcagagaatgcattactacaggactcagagaagaagaggagtcattcttctccatcacagattcctaaaaagattctcagtcacatgacccatgaagtaacagaggatttttctcctcgggatccaagaactgttgttgggaagcaagatggcaggggctgcacttcagtcacaacagcattgtccctacctgaactggaaagggaagatggaaaagaagacatttcagatcctatggacccgaacccttgtagtgcaacatacagcaacttagggcaatctagagcagccatgatacctcccaagcagccacgacagcccaagggagctgtggacgatgccatcgcctttggagggaaaacagaccaagaagcacccaatgcttcccaacctacaccacccccactgccaaagaagatgatcataagagccaatacagagccaatctccaaggacctccaaaaatccatggaaagtagtctttgtgtcatggctaatcccacctatgatatcgaccccaactgggatgccagcagtgctggttcttccatcagctatgaactcaaaggactggacattgagtcttatgactccttggaaaggcctttgcgcaaggagagacctgtcccctcagcagcaaacagcatttccagcttaaccactctcagtattaaggatagattttccaacagcatggaatccctctccagccggcgtgggccctcttgcagacagggccgaggcatccagaagccgcagagacaagcactttatcgaggacttgagaatcgggaggaagtagtgggtaaaatccgaagccttcatacagatgccttgaagaaactggctgttaaatgcgaagaccttttcatggctgggcagaaagaccagctccgttttggagtggacagctggtcagacttcaggctaaccagtgacaaaccatgttgtgaggcaggtgatgcggtttactatactgcttcatatgcaaaagatccacttaataactatgcagtcaagatctgtaagagcaaagctaaagaatctcagcagtattatcacagcttggctgtccggcagagtctggctgtccattttaacattcagcaggactgtggtcatttccttgctgaagtccctaaccgtctgcttccctgggaggatccagatgaccctgaaaaggatgaggatgacatggaagagactgaagaagacgccaaaggagaaacggatgggaaaaacccaaagccctgttctgaagcagcatcatcccagaaagagaatcagggagtcatgagcaagaagcagaggagccacgttgtggtcatcaccagggaggttccatgtcttactgtggctgattttgtgcgagactctctggcccagcatgggaaaagccctgatttgtatgagaggcaggtgtgtctgctgctcttacagctatgctctggtcttgagcacctcaaaccctaccatgtcactcactgcgatctacgcctagagaacctgctacttgtccactaccagcctggggggactgcccaaggctttgggcctgcagagcccagccccacctcatcttatcccactaggcttatagtgagcaacttctctcaggccaagcagaagagccatctggtggaccccgagatcctccgggaccagtctcgccttgccccagagatcataacagctacccagtataaaaagtgtgatgagttccagacaggcatcctcatctatgagatgctgcacctacccaacccctttgatgagaacccagagctgaaggagagggaatacacacgagcagacctgcctcgcatcccattccgctccccctactcccggggtctgcagcagctggccagctgcctcctgaatcccaacccttctgagcggatcctcatttcagacgccaaaggcatcctccagtgtctgctctggggcccccgcgaagatctcttccagactttcaccgcctgccctagcctagtacagaggaacaccctgctccaaaactggctagacatcaagcgaacactgctcatgatcaagtttgctgagaagtccctggacagggaaggtggaatcagccttgaggactggctttgtgctcagtatttggcttttgccactacagactccctcagttgtattgtgaaaattctgcagcaccgttaatgtgtacctggatgatgcttttactacatcttcaccttcttcatgtcacccatgcacttcccctccctagtgctcactccaaattcaaggaaagaagaaaggcaaacctctatccctgtccgtgaacaagtgggtctattcagaaaggttatccactgccccagattgaatgagaagctgagtctgtcttaactttacagaaattcagctgcacaaacttgcagttgccttcccttgaaacaccttctatcctaatagtcccataaatgcaggtaaaaatgaaaatccatattcttgaagggacagcttctttggtatgaactcagccagtgagctgtgtccatttcctccataattctggatatcacctatctttttagcaccaagtatttattctcactagcagtagacagacttaaccagtctctaccacgacccagtagactctgacaacagactcttcctttaaggtgtcaacaactgacttactaggcaggactgccatccttagcatcagcccagttttggttaccagggactatatcttttgttccaggagagagtagaaagaaaaggagagatcccatccttgggtcatagacccattttcattgccattatctgtaagtatgtgcactgcatggaggacagccctaatagtctcccctctgctgccactgcctgattctccactctgtccccacttgccagtgaagtttggatttatcagccacttgtggcccattacagagctgacccaaggtggtgtcaccaatgcctcagcagggtggagtgcagttcagagcttataaatagctggcagggcatgaggagatgattttcttgcatgtgcaattctctaggggccatcaggaaacagagtttaaagtaccctttgattactgtcagaactgtcagcatttgcagttttccccgagcagtaattggccagctcccttctatcagtagccagtgttaactagtttaccaaatgctgtaaacaattgccctgaatgaaatagctgtcagtggagctctaagatctcctttagagggcacagtgaggtgggctgttgggatggccgtaggcaggggagaggaagaaggccactgatgagactgctgacctcctcagaaggttgacctcttctagagagactgcctcccagtgtttaagtggctcattgctccttctgactctgtaaaatggctctggaggacagctcacaggaattctgattgctgaggtgggtgattgagagctgttcaccatgtgtgcagcctgtgctccccttctatggatatgtgtgcaatttttgtatgtatttttttagctgtatattacagtgtttatgttgcaacttcacctgaagcgagtctacagaaaccctcccccttcttcccttggcacatatttgcgctaagagatgagcgttccttccactggggttgtgtgtgtgtgtgtgtgtgtgtgtgtgtgtgtgtgtgtgtgtgtatgtatacacatgttcacctgtgcttgttttattcaaaactgtgagtatgtgtttactttgaccttgaaatcccaagagtcactcgaacaatgtgtgtgtacacttgtgtgcccatgtgtgcgtgcacacgcatgctggaagtagaggccaggcctctagaaaagcaacctgtggcagggttgacagacatgttctctgtgcctagtgagtgagtgagccctgaggcccctcatctaccagtgcagagtttccttaaagccaagactgactgtgcagtattacttacatagcacattagtggccttggaaatttctaaacttttaacatttttaacagcttttcatgtgattcatgtataacaaagaggatcaggaaaggaaaataatgtattttattgtgctcttattacttttttaagtgattgtaatatgtgaggctctatttggagaatgtcccttatcccctggccagcaatataggactcacaggaaagaaggctggttagcccacaaagagtcttgcctcctctagccagagtgcagggctctgctcctaggaatggccatggagtgggcatgctgctgcaggccagcagtctgctcttggtgtcctgtggcatggccgcgccttgccttgaaggttggtgtttggttcatcttagcatagaacatgtgcacataactccttgcctgattatgcactgaagggcagcacacagaccactgaccatgtcagccagcacattcccttaacctcccccacctcccatcttgcaatgtcttgcatattgagatataccttctcaatgtcatgttcgtggtgccttgcccatgtaaatttcaatgttgactatttaatgaggttacatatttaatgctgaatgtttcctggtccctctatttgttatgtctctacttatctttttttttctttctctttttctgttatgatttggatccagtcttcactttaactctatggtataataagcatggacacctccactaccattatcttacagcactggtaaaccaagcacctcttcatatcagatgtttttagtactgtttttatattcagatttgttaagggcaaaagatgaatgcaaactagccagagaaaagcctcaggcttcccagagacaggtggctagattaatttttctctgggtgatggccaaagaatgtgagatagagagggaagggggtgttacaggttagagcagaatagagaaagaaactatatttctaggcaaaaagtactacatgagttggtcttcagaatatttttccaaaaaaatgaaattcagtcagtttaacattatcacaaatatttttcattttaattgtggtaggacctttgaatttgttcatcaactggaaagaaatcctaccctctgtagacacatacacacacatttatatatctatgtgtttgaattgtgactagtatagcactttacattttctcaagtaacaggaagttattgccttcaatattgattggaaattgttttctattgaagtctatactgtagagttttccatttatattgagagtttgaacaattaagctcctattggaacttttccttaagccacatgagcatgaacaatctctgtgacacttgggtgctagagaaacacaacagtggctaaagtagccaagagcaagactgaatgtatagcagagtgccttgttagagtggtaacctagtcttggaagcaattcagtggatgtttcataaagaggactagaacttcaagaagcctcctgtgctggctgaggtgagcccttttggtatatgtacactactgggttgcctagaagccaattcatgaagaataacagcaggatgagaaaaagagtcactgtaacctgtggaacaacaacgtaagaatcaccaacccctaggctgagctagaactggaagccaggaatatggcaatgagtttcaagatttgccctcagaagatgaactgggtgaggtatgggttgaggtgagggcacaagcactcatcctacctaccctgctgctgttgaggagctagaagtaaaacatattggttaggattttaacagttggagtagcctcccattatcagattaagtgggggtcacttttgcttccaaactcagaataagtttgtaaacatgggaaagtctaagccaagagatctaaagctctagaaatattaatgacatttctgggagtaaaactactaaaaattatatcttaaaagtttctagtagtatgaagttcccaggccaggcgcagtggctcacgcctgtaatcccaacactttaggagggcgaggtgggcagatcacctgaggtcaggagtttgagaccagcctggccaacatggtgaaactccatctctactaaaaatacaaaaattagccgggcatgatggcaggcacctgtaatctaagctactcgggaggctgaggcaagagaatctcttgaacccaggaggcaaaggttgcagtgagccaagatcacgccatcgcactccagcctgggagattgagcaacttcgtctcaaaaaaaagtttccaggaaagatctttgggtcctactaagcgtctcaattttgagttatgaatactttggttcagggaagtaacctgacatttggttttgctggaattagggttttcgctagatttgactgcaattaggatttcttctagattttaccagcagtgatctgaaaaagtacaggctagtcacagaaatagagatggatttaggatactacactatatttcaaatgattctagatgtgtaaatatagtatgaacattcttggagaggggtgagacaaactggacttgctgggccaaccctggcatgtttttcattctcctcactagttgacaaggattgaaaattccgctccagcctaatgagtgaacaggatggctgcccacaaaaccaagttattagctttatgtcatcgaagctcatattctcaaaggcccaaagtgctgtgccgagacaaatccaagtgctgctcttgctgaagtgcgcactgaagtccagctgtccgtgcttacagcagtgccaaaagtggggattccatggaccaaaaacggtgccataagggaagccagaagagttgcagtgcaagatcctgggagagattataccaaagaaatcaagcctttttatcctgatgcttctaagatgatgagggtgagctgtgacagatgctgtgggaggggagttcacatacattccatgtcaaggcatttagctgataaatccatcctcagaaaagcacctttttaaaaagaagtccattttgtatattagaagatgatgatgatgatgaagatgaagaaagccctggcagatacaaagttcctcagtatttaaggagaaggatctcttccatgtccccttgacatgactgtggctattgcccaaacctcagcttgagaacatcatataatactgagagcggaagatttttttaaagagatatggtagtttaaataggtttgtttaaagaactcttgggaaatttcttaacaaattgtaattgtttttataaaccttcctacagagttgtgtaccattcatcatcaccatcatttaatatctgtaagtgcccagaaggtacaaggtgctatacagccgttaaacaccccctccctgcaactgtttaaaattagaatagatttttgcatcaaccactgctagaagctttccccacctaggtgggctgcaagggcctgcattcccaacatcccattacatgtttcccactccagaaagtctctgggtttattccagctttttatcttgacgtgtcccattcacccccatggtttggtttggtttggttttgttttttaaatcaagaaagtttcagggaatcaaaagaggtcggacattttttaacctagcagaagtacagagtcatatattttgctacgaatattgttgtagtacagaaaacccactttgcccgttagtgtgtggatagtatgtgtgtgtccgcactcatgataacttgaatgttgaaccagacatagggttcatttttgaaaggttaaaccacactgtttcaggaacttgctccaaatactacttggttatcccttcctttaccagttagaactaaagagtgtgatgtatgaacacactgggttgggattttctgttgaggatatgcagggcattttggcatgaggcaaatacagaagcaagatttcattctacttggtgatttgaatcatgacagtcctcattccaatctctctttaattctctctggccctgcccacactctgtatttgaaaatcttgtttttgctctttccggagcttcacccctctacttacatattgtaaagttgtataaatctatcattgaaaggtcctctctgccagcagtggtgccaccctttggtttgctgtggtactttgctgtgtactccgtggcatcatgttactgtgtaaataaattcattttaatacacact

SEQ ID NO: 172290 - DNA, 19217 bp, Homo sapiens
  Payload ID: 13873
  Gene Symbol: PEAK1
  Gene Name: pseudopodium-enriched atypical kinase 1
  Uniprot ID: Q9H792
  ENST ID: ENST00000560626
  CDS Start-End: 477-5717
ggtggactcggccgcggcgagtagttagttagttgttgttagtcagtgtcagttgctcggcggcggcggccgtggtcaccaggaaggggacgggacggacggtgatggtggtcgccgcggcggcgtgtgcgcccctcaggtatctgcccaaactggaacttatgctgtagacatttctttgtggtttatctaaaaaccaaagtaaacattgctatcttcagaaattaaggaatgagaggcaaggaagaaaggacattcatcttggaaagacccaaagcaccttgaaatttggaaggaatgttttgctagctgctaaaaccacctttgtcaccagaatgaatgaagtgcttcagatttaaataattgatcattcttagaagagctgctgtaacacataggggaagtgaaaactaacagatgaaagttttgtcatgcactgaaagaaaagcattgtctgtgaagttctatttttaaaaatgtctgcttgtaacacctttactgaacatgtttggaaacctggtgaatgcaagaattgctttaaacctaaaagtttgcaccagcttcccccagaccctgagaaggcacccatcacccatggcaatgtgaaaactaatgccaatcacagtaacaaccaccgcatcaggaacacgggcaatttccggcctcctgtggctaaaaaacccactatagctgtgaagcccactatgatagtggcagatgggcaaagtatatgtggtgagcttagcatccaagaacactgtgagaacaaacctgtcatcatagggtggaaccgaaacagagctgccttgagtcagaaaccacttaacaataataatgaagatgatgaaggaattagccatgttcctaagccttatggcaataatgatagtgcaaagaagatgtcagataacaataatggactaactgaagtgttaaaggagatagcaggcttggatactgcccctcagataagaggaaatgaaacaaactccagagaaacattcttgggaagaataaatgattgctataaacgatcattggaaagaaagcttccaccaagttgcatgataggtgggataaaggaaactcagggcaagcatgttattctgagtgggagcacagaagtgattagtaatgaagggggccggttctgttacccagagttttccagtggcgaggagagtgaagaggatgtacttttcagtaacatggaggaggagcacgagagttgggatgagagtgatgaagagctgttggccatggagattcgcatgagagggcaacctcgctttgccaacttcagagcaaacacattgtctcctgttcgattctttgtggacaaaaaatggaataccatccccctgcgaaacaagtctctgcagagaatctgtgctgtggactatgatgacagctatgatgaaatcctgaatggttatgaggaaaattctgtggtctcttatggacaaggaagcattcagagcatggtgtcatctgactccacatcaccagattcttctttaacagaagaatcacgttctgagacagccagtagtttatcccagaagatttgtaatgggggattatctcctggtaacccaggagattctaaggacatgaaggaaattgagcccaattatgaaagtccctctagtaataatcaggataaagattcatcacaggcttccaaaagctcaataaaagttccagagacccacaaagcagtccttgctctccgattagaagagaaagatggcaagattgctgtacaaactgagaaggaagaaagtaaagcctctacagatgttgctgggcaagcagtaaccataaaccttgtccccacagaagagcaagcaaaaccttaccgagttgtgaacctggaacagccattgtgcaagccatatactgtcgtggatgtgtcagcagccatggccagtgagcacctcgagggccctgttaacagccccaagacaaaaagctcatcctctactccaaactctccagttacatcatcttcattgacaccaggacaaataagtgcccatttccaaaaatccagtgcaattcgataccaagaagtatggacttctagcaccagtccacgacaaaagatacctaaagtagaactaattactagtggaactggaccaaatgttcctccaaggaaaaactgtcacaaatcagcacctacatcacccacagctacaaacatttcctccaaaaccatccctgttaagtcacctaatttgtctgaaattaaatttaatagttataacaatgctggtatgccaccttttccaattatcattcatgacgagccaacttatgctcggagttccaaaaatgctatcaaagttcccattgttatcaatccaaatgcatatgacaatctagctatctacaaaagttttctgggaacaagtggagaactctcagtgaaggaaaaaaccacaagtgtaataagccatacttatgaagaaatagaaacagaaagcaaagtgcctgataacaccactagcaaaaccactgactgtcttcaaactaaagggttttcaaacagcacagagcataaaaggggctcagtggctcagaaggttcaagagtttaacaactgtctcaacagaggtcagtcttcaccacagagaagctatagttccagccacagctccccagcaaagatccagagagccactcaagagcctgtggccaaaatagaaggcactcaggagtctcagatggtgggcagcagcagcaccagagagaaagcaagcacagtgctttctcagattgtggcttcaatccaacccccacagtctcctccagaaacacctcaatctggccctaaagcttgcagtgtggaagagctttatgccattcctccagatgctgatgttgctaagagcacacctaagagtacgccagtccggcccaaatctctctttacatctcagcctagtggtgaggctgaagcacctcagaccacagacagtcctaccaccaaagtacagaaagacccatccataaagccagtcaccccctctccctccaaattagtgactagcccccaaagtgagccaccagctccctttcccccgccacgctctacttcttctccttaccatgcaggtaaccttttgcagaggcatttcaccaactggaccaagccaaccagccctaccaggtcaacagaagctgaatcagttttgcactctgaaggcagcaggcgggcagctgatgcaaaacctaagcgctggatatcatttaaaagcttcttccgccgtcggaaaacagatgaggaggatgacaaagagaaagagcgagagaaagggaaactggtgggcctggatggcacagtcattcacatgctgcctcctcctccagttcagcgccatcactggttcacagaggcgaaaggagagtccagtgagaaaccagccattgtcttcatgtacaggtgcgaccctgctcaaggccagctcagtgtggatcagagcaaggctaggacagaccaggcagcagtcatggagaagggtagagcagagaatgcattactacaggactcagagaagaagaggagtcattcttctccatcacagattcctaaaaagattctcagtcacatgacccatgaagtaacagaggatttttctcctcgggatccaagaactgttgttgggaagcaagatggcaggggctgcacttcagtcacaacagcattgtccctacctgaactggaaagggaagatggaaaagaagacatttcagatcctatggacccgaacccttgtagtgcaacatacagcaacttagggcaatctagagcagccatgatacctcccaagcagccacgacagcccaagggagctgtggacgatgccatcgcctttggagggaaaacagaccaagaagcacccaatgcttcccaacctacaccacccccactgccaaagaagatgatcataagagccaatacagagccaatctccaaggacctccaaaaatccatggaaagtagtctttgtgtcatggctaatcccacctatgatatcgaccccaactgggatgccagcagtgctggttcttccatcagctatgaactcaaaggactggacattgagtcttatgactccttggaaaggcctttgcgcaaggagagacctgtcccctcagcagcaaacagcatttccagcttaaccactctcagtattaaggatagattttccaacagcatggaatccctctccagccggcgtgggccctcttgcagacagggccgaggcatccagaagccgcagagacaagcactttatcgaggacttgagaatcgggaggaagtagtgggtaaaatccgaagccttcatacagatgccttgaagaaactggctgttaaatgcgaagaccttttcatggctgggcagaaagaccagctccgttttggagtggacagctggtcagacttcaggctaaccagtgacaaaccatgttgtgaggcaggtgatgcggtttactatactgcttcatatgcaaaagatccacttaataactatgcagtcaagatctgtaagagcaaagctaaagaatctcagcagtattatcacagcttggctgtccggcagagtctggctgtccattttaacattcagcaggactgtggtcatttccttgctgaagtccctaaccgtctgcttccctgggaggatccagatgaccctgaaaaggatgaggatgacatggaagagactgaagaagacgccaaaggagaaacggatgggaaaaacccaaagccctgttctgaagcagcatcatcccagaaagagaatcagggagtcatgagcaagaagcagaggagccacgttgtggtcatcaccagggaggttccatgtcttactgtggctgattttgtgcgagactctctggcccagcatgggaaaagccctgatttgtatgagaggcaggtgtgtctgctgctcttacagctatgctctggtcttgagcacctcaaaccctaccatgtcactcactgcgatctacgcctagagaacctgctacttgtccactaccagcctggggggactgcccaaggctttgggcctgcagagcccagccccacctcatcttatcccactaggcttatagtgagcaacttctctcaggccaagcagaagagccatctggtggaccccgagatcctccgggaccagtctcgccttgccccagagatcataacagctacccagtataaaaagtgtgatgagttccagacaggcatcctcatctatgagatgctgcacctacccaacccctttgatgagaacccagagctgaaggagagggaatacacacgagcagacctgcctcgcatcccattccgctccccctactcccggggtctgcagcagctggccagctgcctcctgaatcccaacccttctgagcggatcctcatttcagacgccaaaggcatcctccagtgtctgctctggggcccccgcgaagatctcttccagactttcaccgcctgccctagcctagtacagaggaacaccctgctccaaaactggctagacatcaagcgaacactgctcatgatcaagtttgctgagaagtccctggacagggaaggtggaatcagccttgaggactggctttgtgctcagtatttggcttttgccactacagactccctcagttgtattgtgaaaattctgcagcaccgttaatgtgtacctggatgatgcttttactacatcttcaccttcttcatgtcacccatgcacttcccctccctagtgctcactccaaattcaaggaaagaagaaaggcaaacctctatccctgtccgtgaacaagtgggtctattcagaaaggttatccactgccccagattgaatgagaagctgagtctgtcttaactttacagaaattcagctgcacaaacttgcagttgccttcccttgaaacaccttctatcctaatagtcccataaatgcaggtaaaaatgaaaatccatattcttgaagggacagcttctttggtatgaactcagccagtgagctgtgtccatttcctccataattctggatatcacctatctttttagcaccaagtatttattctcactagcagtagacagacttaaccagtctctaccacgacccagtagactctgacaacagactcttcctttaaggtgtcaacaactgacttactaggcaggactgccatccttagcatcagcccagttttggttaccagggactatatcttttgttccaggagagagtagaaagaaaaggagagatcccatccttgggtcatagacccattttcattgccattatctgtaagtatgtgcactgcatggaggacagccctaatagtctcccctctgctgccactgcctgattctccactctgtccccacttgccagtgaagtttggatttatcagccacttgtggcccattacagagctgacccaaggtggtgtcaccaatgcctcagcagggtggagtgcagttcagagcttataaatagctggcagggcatgaggagatgattttcttgcatgtgcaattctctaggggccatcaggaaacagagtttaaagtaccctttgattactgtcagaactgtcagcatttgcagttttccccgagcagtaattggccagctcccttctatcagtagccagtgttaactagtttaccaaatgctgtaaacaattgccctgaatgaaatagctgtcagtggagctctaagatctcctttagagggcacagtgaggtgggctgttgggatggccgtaggcaggggagaggaagaaggccactgatgagactgctgacctcctcagaaggttgacctcttctagagagactgcctcccagtgtttaagtggctcattgctccttctgactctgtaaaatggctctggaggacagctcacaggaattctgattgctgaggtgggtgattgagagctgttcaccatgtgtgcagcctgtgctccccttctatggatatgtgtgcaatttttgtatgtatttttttagctgtatattacagtgtttatgttgcaacttcacctgaagcgagtctacagaaaccctcccccttcttcccttggcacatatttgcgctaagagatgagcgttccttccactggggttgtgtgtgtgtgtgtgtgtgtgtgtgtgtgtgtgtgtgtgtgtgtatgtatacacatgttcacctgtgcttgttttattcaaaactgtgagtatgtgtttactttgaccttgaaatcccaagagtcactcgaacaatgtgtgtgtacacttgtgtgcccatgtgtgcgtgcacacgcatgctggaagtagaggccaggcctctagaaaagcaacctgtggcagggttgacagacatgttctctgtgcctagtgagtgagtgagccctgaggcccctcatctaccagtgcagagtttccttaaagccaagactgactgtgcagtattacttacatagcacattagtggccttggaaatttctaaacttttaacatttttaacagcttttcatgtgattcatgtataacaaagaggatcaggaaaggaaaataatgtattttattgtgctcttattacttttttaagtgattgtaatatgtgaggctctatttggagaatgtcccttatcccctggccagcaatataggactcacaggaaagaaggctggttagcccacaaagagtcttgcctcctctagccagagtgcagggctctgctcctaggaatggccatggagtgggcatgctgctgcaggccagcagtctgctcttggtgtcctgtggcatggccgcgccttgccttgaaggttggtgtttggttcatcttagcatagaacatgtgcacataactccttgcctgattatgcactgaagggcagcacacagaccactgaccatgtcagccagcacattcccttaacctcccccacctcccatcttgcaatgtcttgcatattgagatataccttctcaatgtcatgttcgtggtgccttgcccatgtaaatttcaatgttgactatttaatgaggttacatatttaatgctgaatgtttcctggtccctctatttgttatgtctctacttatctttttttttctttctctttttctgttatgatttggatccagtcttcactttaactctatggtataataagcatggacacctccactaccattatcttacagcactggtaaaccaagcacctcttcatatcagatgtttttagtactgtttttatattcagatttgttaagggcaaaagatgaatgcaaactagccagagaaaagcctcaggcttcccagagacaggtggctagattaatttttctctgggtgatggccaaagaatgtgagatagagagggaagggggtgttacaggttagagcagaatagagaaagaaactatatttctaggcaaaaagtactacatgagttggtcttcagaatatttttccaaaaaaatgaaattcagtcagtttaacattatcacaaatatttttcattttaattgtggtaggacctttgaatttgttcatcaactggaaagaaatcctaccctctgtagacacatacacacacatttatatatctatgtgtttgaattgtgactagtatagcactttacattttctcaagtaacaggaagttattgccttcaatattgattggaaattgttttctattgaagtctatactgtagagttttccatttatattgagagtttgaacaattaagctcctattggaacttttccttaagccacatgagcatgaacaatctctgtgacacttgggtgctagagaaacacaacagtggctaaagtagccaagagcaagactgaatgtatagcagagtgccttgttagagtggtaacctagtcttggaagcaattcagtggatgtttcataaagaggactagaacttcaagaagcctcctgtgctggctgaggtgagcccttttggtatatgtacactactgggttgcctagaagccaattcatgaagaataacagcaggatgagaaaaagagtcactgtaacctgtggaacaacaacgtaagaatcaccaacccctaggctgagctagaactggaagccaggaatatggcaatgagtttcaagatttgccctcagaagatgaactgggtgaggtatgggttgaggtgagggcacaagcactcatcctacctaccctgctgctgttgaggagctagaagtaaaacatattggttaggattttaacagttggagtagcctcccattatcagattaagtgggggtcacttttgcttccaaactcagaataagtttgtaaacatgggaaagtctaagccaagagatctaaagctctagaaatattaatgacatttctgggagtaaaactactaaaaattatatcttaaaagtttctagtagtatgaagttcccaggccaggcgcagtggctcacgcctgtaatcccaacactttaggagggcgaggtgggcagatcacctgaggtcaggagtttgagaccagcctggccaacatggtgaaactccatctctactaaaaatacaaaaattagccgggcatgatggcaggcacctgtaatctaagctactcgggaggctgaggcaagagaatctcttgaacccaggaggcaaaggttgcagtgagccaagatcacgccatcgcactccagcctgggagattgagcaacttcgtctcaaaaaaaagtttccaggaaagatctttgggtcctactaagcgtctcaattttgagttatgaatactttggttcagggaagtaacctgacatttggttttgctggaattagggttttcgctagatttgactgcaattaggatttcttctagattttaccagcagtgatctgaaaaagtacaggctagtcacagaaatagagatggatttaggatactacactatatttcaaatgattctagatgtgtaaatatagtatgaacattcttggagaggggtgagacaaactggacttgctgggccaaccctggcatgtttttcattctcctcactagttgacaaggattgaaaattccgctccagcctaatgagtgaacaggatggctgcccacaaaaccaagttattagctttatgtcatcgaagctcatattctcaaaggcccaaagtgctgtgccgagacaaatccaagtgctgctcttgctgaagtgcgcactgaagtccagctgtccgtgcttacagcagtgccaaaagtggggattccatggaccaaaaacggtgccataagggaagccagaagagttgcagtgcaagatcctgggagagattataccaaagaaatcaagcctttttatcctgatgcttctaagatgatgagggtgagctgtgacagatgctgtgggaggggagttcacatacattccatgtcaaggcatttagctgataaatccatcctcagaaaagcacctttttaaaaagaagtccattttgtatattagaagatgatgatgatgatgaagatgaagaaagccctggcagatacaaagttcctcagtatttaaggagaaggatctcttccatgtccccttgacatgactgtggctattgcccaaacctcagcttgagaacatcatataatactgagagcggaagatttttttaaagagatatggtagtttaaataggtttgtttaaagaactcttgggaaatttcttaacaaattgtaattgtttttataaaccttcctacagagttgtgtaccattcatcatcaccatcatttaatatctgtaagtgcccagaaggtacaaggtgctatacagccgttaaacaccccctccctgcaactgtttaaaattagaatagatttttgcatcaaccactgctagaagctttccccacctaggtgggctgcaagggcctgcattcccaacatcccattacatgtttcccactccagaaagtctctgggtttattccagctttttatcttgacgtgtcccattcacccccatggtttggtttggtttggttttgttttttaaatcaagaaagtttcagggaatcaaaagaggtcggacattttttaacctagcagaagtacagagtcatatattttgctacgaatattgttgtagtacagaaaacccactttgcccgttagtgtgtggatagtatgtgtgtgtccgcactcatgataacttgaatgttgaaccagacatagggttcatttttgaaaggttaaaccacactgtttcaggaacttgctccaaatactacttggttatcccttcctttaccagttagaactaaagagtgtgatgtatgaacacactgggttgggattttctgttgaggatatgcagggcattttggcatgaggcaaatacagaagcaagatttcattctacttggtgatttgaatcatgacagtcctcattccaatctctctttaattctctctggccctgcccacactctgtatttgaaaatcttgtttttgctctttccggagcttcacccctctacttacatattgtaaagttgtataaatctatcattgaaaggtcctctctgccagcagtggtgccaccctttggtttgctgtggtactttgctgtgtactccgtggcatcatgttactgtgtaaataaattcattttaatacacactaaaaaacagacaaatgcttgtccttttggcgactcttccacactgacatgctggggagggtttggttgcagacatggttatgtcttgtccccccagggtaggtgccctgtccataacacaggaaatgatggctttcagcctgtgtgtcttctgcactctgggtcctcatcccctgctgacatggattatatttctctttattccctgtctaatctgaggaaatcaggccccaaagagaaagcaaaggcattctgcttttcccagacctcagaaggctgcaggtttgctgtgtgagatcgccctctggtgagcagtcacctgcaggcttcctgggtttgtactgcatgttgagaggcttggttagctggctctggctgaccctctccgtggaaatcagagctattcaggtaatatgagcggggacagggcctggtactgcatcatctgcaagattcgcatgcctttgacacagtgatacacaggggcctcacaaaggcagacaagctaatgtgtggacacttcagcagcgcagaggaggcctcctggcttaagcaggaagagtcagcagtggtagcaacaactgccgcattatgagaggagaatagatgaaaaggcaaacatgtagatcctaaatttagagcagattttagagcaccaaaccctttacagtggacactgtctccaacccggtgtctctgctcttctccactagcaagcactctggaatttgcagatgctgtttttaaggcataccccagaagagtggctgccagacttgaggtttatgttgctgaggagcaacataacagaacccatgttggtgtggacccaaaagctctctgtgtgttgcctgggcccaggaggaagggtcaacagcaagcctgaccagacaatccccagggacacaggccctgcctgctgcagctgtgtagcctgcttgctggagaagagcctagagaacttcccttctagttgtcagcacaacacactggcttctgggggaaaggaagcaaagaaaaaagtaggcagttggggttgggaggtcacagaaacagagcgtaccaggaccgggctgctgtgtgaagctctgctggcctgagtggtcaccgtgtgtgccaggccaggtctcactaatgcaggactccataacaactgattcagtactgactgagtgattaaattaaatattaaaagctgaaggggccactgcccttatacgaaggctgaagtgtaacaaaagctccactgggagttttgcctagacctttcctgggccttgaagcatgacaaaatagcgaaggaattcttaacaggacctgtttaggattaaacaagtttatcgggggtctgaaggaactccccatacctccatgatttagcaggagacaagattaagggtaatcaccccagcacttggacccatttagattaagtaaacttactgaggctccagaggaaggtcttcaagactcagaccttagttatagattgaaagaagttggccggatgtggtggctcacacctgtaatcccagcactttgggaggccgaggtgggcggatcacgaggtcaggagatcgagaccatcctggctaacacggtgaaaccctgtctctactaaaaacacaaaaaagttagccgggcttggtggtgggcacctgtagtcccagctactcaggagggtggggcaggagaatggcgtgaacccaggaggtggagtttgcagtgagccgagattgctccactgcactgcagcctgggtgacagaacaagactccatctcaaaataaataaataaataaatagtcacttatgtctttagatgaatgcacacttacacgtagacatatagcttagaaggtatataagatgtgggaaaccgtaattttgagttgatctggcaataacttcgaggccttctccctgtaactggttacagaaataaaaactcccttctctcccggttcatctgcatctcgttactgggccgcaaaaataagcagcctgacccccagtttggtccagaaacacctggagccctgaaaggatacaggccagtggatggtgggaccagttcaggattgcccaagccagactccaggtgaggtggaacaaggccagaaaaaacactaagtttctattcttcagtgggatcactttgtcctttggtgtaactggagagcctggagataaattatcctattccccttccccatcacatcacccagcgtgggattcattcctgagaattccattagtggtcctcagtgatgccatcctgtctgactctgggttgtccggaggtgatgggccactgacagttggatggggcctttggcagctccatgcctgcagagtgttgtctttcaacctaagccacagagaatcttgatttctttcctgcccggagtgaattggtgtggggagctctccattgcctggggttgtaagtgtgtaccttctgctccaggaactctttgcctcctctccaaggcctagcaaattatgcttccttataagtgagttcgcactctcttctacaagggaaagaacttcattagtgccataggagccaagaactgcagttggcagatcacaagttgttgttaagagcagctcaaggcaattacagctgaaacttaaaaactggatttcacactgggtgggggggtaggagggaatttgttgccaagatccagttctctcaaatttgcaaacctctaaaaggaaataggctttttggacacaaactgacttccttgagatcccagataaacctctgtacaggtatgtgcgcgcacgcgcgcacacacacacacacacacacacacacacacacacacacaccaactaatggctcccttgccctctgggagctgcatggaagcaaccagaaagctgagtgataatgctgtgagggcttctgaggaatctgcaattataaggaccagggtcctctagagaagtaactctcatgcaggaagtggggggtatagggacttgggttttccccaccaggaccacccaatgctcaccagcccacacttgagctggagtcaaagatagagcaaaaaactccaagcctatggttcatctttgcccagggttgggggatgggaggcaaattgtacctcaggtaaagagaatgtggagggataaagtcaccaggccccccagggaggggcaaagttgaatgccttgaagagctgagatgctcctcttccagggtgaaggagtctgtctctagaaagccagccctgggggtgctttcccatgaactagcttaacagcttaattttatcttcacaatctggtgaggtggtttctagaattatccccattttacccttgtgaaaacaagtcagagagggtttgtttgccccagatccttagtaagggaactacgatttgtcatccagcaaccgtactccacctcccagcttcctggagtgagggacagtcctccctcactctctagctgtcaccccagtatcatcagtggcttcttggtgtccaaagaagaaaaatccaattgctgagtctgtgtcctccacctctcatgcttattgctgaccagatgttgcagcagctccactctccaggctggcctgggagacatgcattgaaattctctgcacccgcatcgttcctgttctttttctctctgttcttcagggccccattcagccaagaagcttttgggatgatagccatctgaaatcaccaactcactccccagcttcagctcctggcctggtgtgtgtgtgtgtctgtgtgtgtgcacctcccttctcgtgagctcctccagggaggccatggctttagctgctctgcctgctgtccttggtgtctgactcaactaacaggaagagaggaggaagagaaccacccctggctgctccactgggccaggccctggtccaggctttcccacacattaacctcatttgctctccactacagccattttacagatgaggaaactcagagtgggtaagaaacttgcctaaagctgcatagctggtaagtggtagagctgagattcaaacctaggcttgaagccagttctccccaccaccatacgagtctttgtctattggcttgtttttgtgccagcggataggcccaggcctatgggtgtttgctccaattgtgacagactggggtagccaaggagtgcttcctgatgtgggcagagagtgtgagtgagaagaaagcgctggctaggctgagcagtcagatctgtagcttccctgtagggccagcacctttccctgtcagaccttcactgaactcctatgggatcgccaggccaacacaaggcattagcactggccgtctttgagacatttcctctcaaggcccctgagcagacttgcctgtttgctctccatcttccctacagaggggcctcccaggactgcttctggaaccacaaaggcaactaagtggccaacagctgccacagagcaactgacaaccttcttttcctttttgtctttttctttctttttggttaataatctgctttccattcacctaccccctccactcccaccctgtcatggtaaatcagggttgtaaagtcctcaacccctaagagctccatgcttgagcaaatatatacaagacatacgcatatagctgtagggttccactctcttacaaaaattagatcttattgtgtacaatactctgcaaattgcttttcttacttaacaatatatatcattggccaggtgtggtggctcacgcatataatcccagcactttgggaggatcacttgagctcaaaagttagaccagcctgggcaacatgttgaaactccatctctacaaaaaaatacaaaaattagccaggtgtggtagcatacacctgtggtcccagctattcaggaagctgaggagggaggatcactcgagcccaggaggtcgaggccacagtgagccgtgaactgcactccagcctggggaacaaagtgagatcctgtctcaaaacaaaaacaaaaacaaaagcaaaaaaatcatggacaaagtatttcttaaaaggtagcttctcgcactaaaaataatagcattacataacatacatatatacaaattttattattattatttccacttcttcaggcgttcagtcacatagggatgactaaacaacaaaatatgagaaactactgagaagtataaaagatgcacagatacagagatgaactatcaggttgtctcaaattttagtgaaatttgaattttaaatctcaatgggttttttttctggagtgaaaaactttacaaaatggttttcagagtcagttggaggaacgaatacatgaaaaacccagaaatttttgaaattgaaggcataattgagcatatgaaaaagctatgatcaataaaacagtgtgatacaggtacaagaaaaaacagatcaatgtaatagaataggtaacctaaaaatagtatcagtatgaaactagtatatgtaatataggataagtaagacatcactatatgagaagggaaggaagtttatccaatgtgctggtacaattggttagctatttggaaaatattaatcttcatactataagctaatacaaatccaaacagatcaaacagagttacatgccacaaaggaaagaaaaatctcaagaactagaagaatgccaagtcaatgcatgttttatctcttgttgagaaaggactttgtaagctaagagacggtggaaggtgtctgaaagggaaagatcaataggtttgactaaaggtgataaacctttgtccatggaaaacagcagaaacaaaattgaaaagtaaataacccagaaaaaagatttcaacacatataacagacataggattaaaattctgagttataaagagctgatacaaatcattaggaacataaaacactaatagatgagaacagagaagtcacagaagaacccaaatgtttaagctttctagaaacaagagaaataacctaaggtggcatatctaaaaaaaaattttaacagctttttctgattgattataaaaataatgcctgtttacagtagaaaatgtggaaggtaaaattgacccactaggtcaccatctagaaatgaccaccattaacatttactgtatatcctgcaactgttgtttactctgcctttttctttttaaattaagatcatattgttggcatctcattttccacctatcaaattaacaaagctttttttttaaagcttatactccatgctggtgacagggtatacagttcagtcaatgttggtgcaattgaattggatggaaaggggcttgattcatcctgtcctggggtgttgggcaagggctgaccccagtagtcagcatggtggtgggtaatagagatttcagatctccaaggtcaaagtgacagagtcaccaggggagcttttcaaaaggaaagaccacccaagtccagtgactccaagaccccctcctccccagggtccttcagctattctgagcttgtaaggggcctctctgcctgaatctggatttagctccaggttccacctctgacaaactgtgtcctcagccattctctgagccttggttttgatggggattcctacctcacagggtcattgtcaggatgaaaggacacagtctagcaagtgtatttagtccactgccaggcaatagtaagtgctcaaatattgttgatcaaaaaggcaaactctgagtgggtatttactttctgtttttataaccaaggactcatcgggggatttttgctgaacaaagatactgtgaattcaaatctcggcctcgtaagaatcagaaaactgcttgcagcttttgagtggcaatttctccagctttccaaatatctcctggctgaatttcagaaagcctggttaacagtcgtttctctgaacacctcctacctgccgatggtgacatagcacatcagaggcagaaatgggtccatgcctctgaatccaagcctgccttcctccctacacaacctggaccctttattgggggagagtcaggcacagtggtaaactgacaagggacagggctgcgatgggaagtggggggtgaggatgaaagcagctgttgagggcccctctagctctgggccggtgtgctctttagagggtgtctgtgtcccgaagcaccccctccctccctcagcaaggggctggcccaggccctcacccttcctcggagcctgctgcccacatcagagccctcatttcagctcccctcatgacactgccttgcataataaatgcttcagttgaatgtactttattttggggaaagtcattaaactccttttgtggaaacattttaattgaattagattgttttctgattgtaatagatgttaattaattgagtgggccgagtgtccttggatgtagctggcttctctcagtttaattaggaggtgaatgtggacttatttctttttgctatgagtctgtggtttaaatttatcttttcagctaataaagtgatcaggcg

SEQ ID NO: 172291 - DNA, 4644 bp, Homo sapiens
  Payload ID: 13873
  Gene Symbol: PEAK1
  Gene Name: pseudopodium-enriched atypical kinase 1
  ENST ID: ENST00000558305
  CDS Start-End: 537-3686
agttagttagttgttgttagtcagtgtcagttgctcggcggcggcggccgtggtcaccaggaaggggacgggacggacggtgatggtggtcgccgcggcggcgtgtgcgcccctcaggtatctgcccaaactggaacttatgctgtagacatttctttgtggtttatctaaaaaccaaaggaaaagaatacttgagatccatttgtaaggaaagaaaaggaagcaacaacataatgcccagagttggagccaattaaaccagtaaacattgctatcttcagaaattaaggaatgagaggcaaggaagaaaggacattcatcttggaaagacccaaagcaccttgaaatttggaaggaatgttttgctagctgctaaaaccacctttgtcaccagaatgaatgaagtgcttcagatttaaataattgatcattcttagaagagctgctgtaacacataggggaagtgaaaactaacagatgaaagttttgtcatgcactgaaagaaaagcattgtctgtgaagttctatttttaaaaatgtctgcttgtaacacctttactgaacatgtttggaaacctggtgaatgcaagaattgctttaaacctaaaagtttgcaccagcttcccccagaccctgagaaggcacccatcacccatggcaatgtgaaaactaatgccaatcacagtaacaaccaccgcatcaggaacacgggcaatttccggcctcctgtggctaaaaaacccactatagctgtgaagcccactatgatagtggcagatgggcaaagtatatgtggtgagcttagcatccaagaacactgtgagaacaaacctgtcatcatagggtggaaccgaaacagagctgccttgagtcagaaaccacttaacaataataatgaagatgatgaaggaattagccatgttcctaagccttatggcaataatgatagtgcaaagaagatgtcagataacaataatggactaactgaagtgttaaaggagatagcaggcttggatactgcccctcagataagaggaaatgaaacaaactccagagaaacattcttgggaagaataaatgattgctataaacgatcattggaaagaaagcttccaccaagttgcatgataggtgggataaaggaaactcagggcaagcatgttattctgagtgggagcacagaagtgattagtaatgaagggggccggttctgttacccagagttttccagtggcgaggagagtgaagaggatgtacttttcagtaacatggaggaggagcacgagagttgggatgagagtgatgaagagctgttggccatggagattcgcatgagagggcaacctcgctttgccaacttcagagcaaacacattgtctcctgttcgattctttgtggacaaaaaatggaataccatccccctgcgaaacaagtctctgcagagaatctgtgctgtggactatgatgacagctatgatgaaatcctgaatggttatgaggaaaattctgtggtctcttatggacaaggaagcattcagagcatggtgtcatctgactccacatcaccagattcttctttaacagaagaatcacgttctgagacagccagtagtttatcccagaagatttgtaatgggggattatctcctggtaacccaggagattctaaggacatgaaggaaattgagcccaattatgaaagtccctctagtaataatcaggataaagattcatcacaggcttccaaaagctcaataaaagttccagagacccacaaagcagtccttgctctccgattagaagagaaagatggcaagattgctgtacaaactgagaaggaagaaagtaaagcctctacagatgttgctgggcaagcagtaaccataaaccttgtccccacagaagagcaagcaaaaccttaccgagttgtgaacctggaacagccattgtgcaagccatatactgtcgtggatgtgtcagcagccatggccagtgagcacctcgagggccctgttaacagccccaagacaaaaagctcatcctctactccaaactctccagttacatcatcttcattgacaccaggacaaataagtgcccatttccaaaaatccagtgcaattcgataccaagaagtatggacttctagcaccagtccacgacaaaagatacctaaagtagaactaattactagtggaactggaccaaatgttcctccaaggaaaaactgtcacaaatcagcacctacatcacccacagctacaaacatttcctccaaaaccatccctgttaagtcacctaatttgtctgaaattaaatttaatagttataacaatgctggtatgccaccttttccaattatcattcatgacgagccaacttatgctcggagttccaaaaatgctatcaaagttcccattgttatcaatccaaatgcatatgacaatctagctatctacaaaagttttctgggaacaagtggagaactctcagtgaaggaaaaaaccacaagtgtaataagccatacttatgaagaaatagaaacagaaagcaaagtgcctgataacaccactagcaaaaccactgactgtcttcaaactaaagggttttcaaacagcacagagcataaaaggggctcagtggctcagaaggttcaagagtttaacaactgtctcaacagaggtcagtcttcaccacagagaagctatagttccagccacagctccccagcaaagatccagagagccactcaagagcctgtggccaaaatagaaggcactcaggagtctcagatggtgggcagcagcagcaccagagagaaagcaagcacagtgctttctcagattgtggcttcaatccaacccccacagtctcctccagaaacacctcaatctggccctaaagcttgcagtgtggaagagctttatgccattcctccagatgctgatgttgctaagagcacacctaagagtacgccagtccggcccaaatctctctttacatctcagcctagtggtgaggctgaagcacctcagaccacagacagtcctaccaccaaagtacagaaagacccatccataaagccagtcaccccctctccctccaaattagtgactagcccccaaagtgagccaccagctccctttcccccgccacgctctacttcttctccttaccatgcaggtaaccttttgcagaggcatttcaccaactggaccaagccaaccagccctaccaggtcaacagaagctgaatcagttttgcactctgaaggcagcaggcgggcagctgatgcaaaacctaagcgctggatatcatttaaaagcttcttccgccgtcggaaaacagatgaggaggatgacaaagagaaagagcgagagaaagggaaactggtgggcctggatggcacagtcattcacatgctgcctcctcctccagttcagcgccatcactggttcacagaggcgaaaggagagtccagtgagaaaccagccattgtcttcatgtacaggtgcgaccctgctcaaggccagctcagtgtggatcagagcaaggctaggacagaccaggcagcagtcatggagaagggtagagcagagaatgcattactacaggactcagagaagaagaggagtcattcttctccatcacagattcctaaaaagattctcaggtatgtaaaatagactggaagaatatgggaattttttaacacattttcaggtgctaagttttttatatcttttaagattgcataagaaccatttctgtttgtaagtagcactctgtggccatcatctatctttataactgcattccaagattagaatagtattaaagtgatcttactgcactgaacaaggtttatagccctggatctttggcttaagtagcctactgcattctggtgaatgcagaggaactttagcatagaaaagcaaatccataacaccttaatagcaataaataatgtgttgttttggaatgtgatggtagtgtgaggaagaaacaggatcaaatgaataaatggtggtactgttctttccctcactgtaaatgaaataaagctcttccagcaattctttttgttttttatgaaggtgttatctctatatgcattacttattttaagggaatatttgtttttttattgctgtctctttctgtcctccttccaagtgttgtggaaaaaaatggagggtggtaagcaagcaatttatagttatttagcatgtgggtgaaataggagaagttgagtattgagactgagacccagtagtataatattcagttcagctagacagattgcatacccaaatcagttctctaggcattcattttcttgaataccttaataactatttattgatcacctattctgtgcaaggtatataataaatatttatctcaaatccttataaatttgctatattcttcagatgaggaaactgaaaacccgggaagttaagaattgaacagagtcacaaagctagtgcttttcagagctggaattcaaacctcgatctctcattctaaagcatgtatcctccttataattttgcattcttaaacacaagatcaataaaaattgttatattctcacttgtaatcattcacataaatacatatgtttaggaagcctaa

SEQ ID NO: 172292 - DNA, 558 bp, Homo sapiens
  Payload ID: 13873
  Gene Symbol: PEAK1
  Gene Name: pseudopodium-enriched atypical kinase 1
  ENST ID: ENST00000565820
  CDS Start-End: 379-558
atagttgcatatggccgcatattttgggaatatttttcttgtttgcatgtcttcatgatgttttcccaaaacgttgtaacattgtcaagaaataaaacagaaagtaaacattgctatcttcagaaattaaggaatgagaggcaaggaagaaaggacattcatcttggaaagacccaaagcaccttgaaatttggaaggaatgttttgctagctgctaaaaccacctttgtcaccagaatgaatgaagtgcttcagatttaaataattgatcattcttagaagagctgctgtaacacataggggaagtgaaaactaacagatgaaagttttgtcatgcactgaaagaaaagcattgtctgtgaagttctatttttaaaaatgtctgcttgtaacacctttactgaacatgtttggaaacctggtgaatgcaagaattgctttaaacctaaaagtttgcaccagcttcccccagaccctgagaaggcacccatcacccatggcaatgtgaaaactaatgccaatcacagtaacaaccaccgcatcaggaacacgggcaat

SEQ ID NO: 172293 - DNA, 2323 bp, Homo sapiens
  Payload ID: 13873
  Gene Symbol: PEAK1
  Gene Name: pseudopodium-enriched atypical kinase 1
  ENST ID: ENST00000564328
  CDS Start-End: 355-2323
agtgtcagttgctcggcggcggcggccgtggtcaccaggaaggggacgggacggacggtgatggtggtcgccgcggcggcgtgtgcgcccctcaggtatctgcccaaactggaacttatgctgtagacatttctttgtggtttatctaaaaaccaaaggaaaagaatacttgagatccatttgtaaggaaagaaaaggaagcaacaacataatgcccagagttggagccaattaaaccagattgatcattcttagaagagctgctgtaacacataggggaagtgaaaactaacagatgaaagttttgtcatgcactgaaagaaaagcattgtctgtgaagttctatttttaaaaatgtctgcttgtaacacctttactgaacatgtttggaaacctggtgaatgcaagaattgctttaaacctaaaagtttgcaccagcttcccccagaccctgagaaggcacccatcacccatggcaatgtgaaaactaatgccaatcacagtaacaaccaccgcatcaggaacacgggcaatttccggcctcctgtggctaaaaaacccactatagctgtgaagcccactatgatagtggcagatgggcaaagtatatgtggtgagcttagcatccaagaacactgtgagaacaaacctgtcatcatagggtggaaccgaaacagagctgccttgagtcagaaaccacttaacaataataatgaagatgatgaaggaattagccatgttcctaagccttatggcaataatgatagtgcaaagaagatgtcagataacaataatggactaactgaagtgttaaaggagatagcaggcttggatactgcccctcagataagaggaaatgaaacaaactccagagaaacattcttgggaagaataaatgattgctataaacgatcattggaaagaaagcttccaccaagttgcatgataggtgggataaaggaaactcagggcaagcatgttattctgagtgggagcacagaagtgattagtaatgaagggggccggttctgttacccagagttttccagtggcgaggagagtgaagaggatgtacttttcagtaacatggaggaggagcacgagagttgggatgagagtgatgaagagctgttggccatggagattcgcatgagagggcaacctcgctttgccaacttcagagcaaacacattgtctcctgttcgattctttgtggacaaaaaatggaataccatccccctgcgaaacaagtctctgcagagaatctgtgctgtggactatgatgacagctatgatgaaatcctgaatggttatgaggaaaattctgtggtctcttatggacaaggaagcattcagagcatggtgtcatctgactccacatcaccagattcttctttaacagaagaatcacgttctgagacagccagtagtttatcccagaagatttgtaatgggggattatctcctggtaacccaggagattctaaggacatgaaggaaattgagcccaattatgaaagtccctctagtaataatcaggataaagattcatcacaggcttccaaaagctcaataaaagttccagagacccacaaagcagtccttgctctccgattagaagagaaagatggcaagattgctgtacaaactgagaaggaagaaagtaaagcctctacagatgttgctgggcaagcagtaaccataaaccttgtccccacagaagagcaagcaaaaccttaccgagttgtgaacctggaacagccattgtgcaagccatatactgtcgtggatgtgtcagcagccatggccagtgagcacctcgagggccctgttaacagccccaagacaaaaagctcatcctctactccaaactctccagttacatcatcttcattgacaccaggacaaataagtgcccatttccaaaaatccagtgcaattcgataccaagaagtatggacttctagcaccagtccacgacaaaagatacctaaagtagaactaattactagtggaactggaccaaatgttcctccaaggaaaaactgtcacaaatcagcacctacatcacccacagctacaaacatttcctccaaaaccatccctgttaagtcacctaatttgtctgaaattaaatttaatagttataacaatgctggtatgccaccttttccaattatcattcatgacgagccaacttatgctcggagttccaaaaatgctatcaaagttcccattgttatcaatccaaatgcatatgacaatctagctatctacaaaagttttctgggaacaagtggagaactctcagtgaaggaaaaaa

SEQ ID NO: 172294 - DNA, 2140 bp, Homo sapiens
  Payload ID: 13874
  Gene Symbol: PUDP
  Gene Name: pseudouridine 5'-phosphatase
  Uniprot ID: Q08623
  ENST ID: ENST00000381077
  CDS Start-End: 78-764
ctcagtgcgcgtgcgcggggcgggcgggtgcgcgcgcacttcctcctcgcccccacccagacccagaaggcgccaccatggcggcgcccccgcagcccgtcacccacctcatctttgacatggacggacttcttctggatactgaacggctgtattcagtggtgtttcaagaaatatgtaatcgctatgacaagaaatacagctgggatgtaaagtccctggttatgggtaagaaggcattagaggcggcacagattataatagacgtcttgcagctcccgatgtccaaagaggagctggtggaagaaagccaaacgaagttaaaggaagtgttccccacggctgcgctcatgccaggggcggagaaactcatcatccacctgcggaaacatggcatcccctttgcactggccaccagctcggggtccgcgtcgttcgatatgaagacaagccgccacaaggagttcttcagcttgttttcccacattgtgctgggagatgaccccgaagtgcagcatggcaagccagacccggacatcttcctagcttgtgccaagaggttctctccccctcctgctatggagaagtgccttgtctttgaagatgctcccaatggggtggaggcggccctggcagctgggatgcaggtggtcatggttcctgacggaaacttgagccgagatctgacaacaaaggccaccctggtgctgaattccctgcaggacttccagcccgagctgtttggtttgccctcctatgagtgagagggagggcctcagtcttccgcccccagcccactctcatggtccacactgctgggggaaagggaaaggaaatcagcaactcttcaatcccaacctgcgctgtgattttagcctcctgagattggagtttccatcccatgttggtttgtcccagtctaacgtgttgataaaatgtgacttgacggttgagacaaaaaatacagtagagacagaaacgaagcccagaacaaagatgaaacttgaattaccatctcagaagtcaagctgatggagtatgtgataaagtgaatgtacatgtatatacacacacacctccatatatacatgtgtgtatcagtttggtaatatgcaggtaggcattacatgcatatgtatgtagacatatgcatgcatgtatatgtaaaatatatacttttccaagacaaaatggaacatcacttctctcttctagtttttctgaacactggctgggaaatgtaaactgtgtatgcatataagtatatgctttatgtatgcatatgtatgtagatatgtttatatctatcgtctgcatcactctcctcagtgttgatgtcaacatgcaatgacaactgataaagcgagatggtagttctgcctggtttgcagtctgagtgggaaagtcctgtttttgatgagcactccttgttagctaacatttaaattctttttgtgacctcagaatgtctctggatctttcctcattgactgactctgtgccacgtcatccatagtttattgttagtatgaacacaactgtaacatttacctggtatctacatccttacctgcattggaaaatgtttgctacctcacaacaaccatttgcctcctttaagaacactgatgggctgcactttttggatagaaatagaatttgatttcagaatgtatgcttggtgagtctcagtgcccaggaacacttttggaataatttatcagacattgaacttctgtgattaatcgcttttatagatttactcagtctttaaaattcgtctctgatttgccagagaaaaacggtggtagccatggaaatcgggagtgaaggagcactgcttcattgtggctcagcccttcctaggggcctctgccctttgatgtccttgagctactcttcagctctggaagttgtggacaaaccgtaggaatgtatgtgtgcgtgtggtggagtgattgtctgtgaatgacaggccctggctattgattgatgttgcatcaatttagcaaattcatttcctcattcttgatggcctgaatatatgtctgcacttttaatgctcctcttaaccagttgtaacatcttaccatttccctaacaaattgaattagtttaataaaatcttttgacacatgtt

SEQ ID NO: 172295 - DNA, 1334 bp, Homo sapiens
  Payload ID: 13874
  Gene Symbol: PUDP
  Gene Name: pseudouridine 5'-phosphatase
  Uniprot ID: Q08623
  ENST ID: ENST00000424830
  CDS Start-End: 46-801
cgcgcacttcctcctcgcccccacccagacccagaaggcgccaccatggcggcgcccccgcagcccgtcacccacctcatctttgacatggacggacttcttctgggttatacaggaagcatagtggcagctgcttcgggggagtcctcaagaggcttacaatcacggtggacggatactgaacggctgtattcagtggtgtttcaagaaatatgtaatcgctatgacaagaaatacagctgggatgtaaagtccctggttatgggtaagaaggcattagaggcggcacagattataatagacgtcttgcagctcccgatgtccaaagaggagctggtggaagaaagccaaacgaagttaaaggaagtgttccccacggctgcgctcatgccaggggcggagaaactcatcatccacctgcggaaacatggcatcccctttgcactggccaccagctcggggtccgcgtcgttcgatatgaagacaagccgccacaaggagttcttcagcttgttttcccacattgtgctgggagatgaccccgaagtgcagcatggcaagccagacccggacatcttcctagcttgtgccaagaggttctctccccctcctgctatggagaagtgccttgtctttgaagatgctcccaatggggtggaggcggccctggcagctgggatgcaggtggtcatggttcctgacggaaacttgagccgagatctgacaacaaaggccaccctggtgctgaattccctgcaggacttccagcccgagctgtttggtttgccctcctatgagtgagagggagggcctcagtcttccgcccccagcccactctcatggtccacactgctgggggaaagggaaaggaaatcagcaactcttcaatcccaacctgcgctgtgattttagcctcctgagattggagtttccatcccatgttggtttgtcccagtctaacgtgttgataaaatgtgacttgacggttgagacaaaaaatacagtagagacagaaacgaagcccagaacaaagatgaaacttgaattaccatctcagaagtcaagctgatggagtatgtgataaagtgaatgtacatgtatatacacacacacctccatatatacatgtgtgtatcagtttggtaatatgcaggtaggcattacatgcatatgtatgtagacatatgcatgcatgtatatgtaaaatatatacttttccaagacaaaatggaacatcacttctctcttctagtttttctgaacactggctgggaaatgtaaactgtgtatgcatataagtatatgctttatgtatgcatatgtatgtagatatg

SEQ ID NO: 172296 - DNA, 1376 bp, Homo sapiens
  Payload ID: 13874
  Gene Symbol: PUDP
  Gene Name: pseudouridine 5'-phosphatase
  Uniprot ID: Q08623
  ENST ID: ENST00000412827
  CDS Start-End: 41-598
acttcctcctcgcccccacccagacccagaaggcgccaccatggcggcgcccccgcagcccgtcacccacctcatctttgacatggacggacttcttctggatactgaacggctgtattcagtggtgtttcaagaaatatgtaatcgctatgacaagaaatacagctgggatgtaaagtccctggttatgggggcggagaaactcatcatccacctgcggaaacatggcatcccctttgcactggccaccagctcggggtccgcgtcgttcgatatgaagacaagccgccacaaggagttcttcagcttgttttcccacattgtgctgggagatgaccccgaagtgcagcatggcaagccagacccggacatcttcctagcttgtgccaagaggttctctccccctcctgctatggagaagtgccttgtctttgaagatgctcccaatggggtggaggcggccctggcagctgggatgcaggtggtcatggttcctgacggaaacttgagccgagatctgacaacaaaggccaccctggtgctgaattccctgcaggacttccagcccgagctgtttggtttgccctcctatgagtgagagggagggcctcagtcttccgcccccagcccactctcatggtccacactgctgggggaaagggaaaggaaatcagcaactcttcaatcccaacctgcgctgtgattttagcctcctgagattggagtttccatcccatgttggtttgtcccagtctaacgtgttgataaaatgtgacttgacggttgagacaaaaaatacagtagagacagaaacgaagcccagaacaaagatgaaacttgaattaccatctcagaagtcaagctgatggagtatgtgataaagtgaatgtacatgtatatacacacacacctccatatatacatgtgtgtatcagtttggtaatatgcaggtaggcattacatgcatatgtatgtagacatatgcatgcatgtatatgtaaaatatatacttttccaagacaaaatggaacatcacttctctcttctagtttttctgaacactggctgggaaatgtaaactgtgtatgcatataagtatatgctttatgtatgcatatgtatgtagatatgtttatatctatcgtctgcatcactctcctcagtgttgatgtcaacatgcaatgacaactgataaagcgagatggtagttctgcctggtttgcagtctgagtgggaaagtcctgtttttgatgagcactccttgttagctaacatttaaattctttttgtgacctcagaatgtctctggatctttcctcattgactgactctgtgccacgtcatccatagtttattgttagtatgaacacaactgt

SEQ ID NO: 172297 - DNA, 586 bp, Homo sapiens
  Payload ID: 13874
  Gene Symbol: PUDP
  Gene Name: pseudouridine 5'-phosphatase
  ENST ID: ENST00000486446
  CDS Start-End: 13-586
gaaggcgccaccatggcggcgcccccgcagcccgtcacccacctcatctttgacatggacggacttcttctggatactgaacggctgtattcagtggtgtttcaagaaatatgtaatcgctatgacaagaaatacagctgggatgtaaagtccctggttatgggtaagaaggcattagaggcggcacagattataatagacgtcttgcagctcccgatgtccaaagaggagctggtggaagaaagccaaacgaagttaaaggaagtgttccccacggctgcgctcatgccaggggcggagaaactcatcatccacctgcggaaacatggcatcccctttgcactggccaccagctcggggtccgcgtcgttcgatatgaagacaagccgccacaaggagttcttcagcttgttttcccacattgtgctgggagatgaccccgaagtgcagcatggcaagccagacccggacatcttcctagcttgtgccaagaggttctctccccctcctgctatggagaagagctccatccatagacctcgtctgctcaccgcacagaaatgccagggctgccgggatcccttct

SEQ ID NO: 172298 - DNA, 825 bp, Homo sapiens
  Payload ID: 13874
  Gene Symbol: PUDP
  Gene Name: pseudouridine 5'-phosphatase
  Uniprot ID: Q08623
  ENST ID: ENST00000540122
  CDS Start-End: 78-704
ctcagtgcgcgtgcgcggggcgggcgggtgcgcgcgcacttcctcctcgcccccacccagacccagaaggcgccaccatggcggcgcccccgcagcccgtcacccacctcatctttgacatggacggacttcttctggatactgaacggctgtattcagtggtgtttcaagaaatatgtaatcgctatgacaagaaatacagctgggatgtaaagtccctggttatgggtaagaaggcattagaggcggcacagattataatagacgtcttgcagctcccgatgtccaaagaggagctggtggaagaaagccaaacgaagttaaaggaagtgttccccacggctgcgctcatgccaggggcggagaaactcatcatccacctgcggaaacatggcatcccctttgcactggccaccagctcggggtccgcgtcgttcgatatgaagacaagccgccacaaggagttcttcagcttgttttcccacattgtgctgggagatgaccccgaagtgcagcatggcaagccagacccggacatcttcctagcttgtgccaagaggttctctccccctcctgctatggagaagagctccatccatagacctcgtctgctcaccgcacagaaatgccagggctgccgggatcccttctcagcgctcctccttctgtgtaatcaactgcttctctgctctgatgacacctgaccgcacctccagctcacagccacagtgcatggagaccccgagccttctacttgggtgtcccacgatggcctcaaacccaacttgtcacaaaagctacctctccttcctgccaccaaaatgg

SEQ ID NO: 172299 - DNA, 1206 bp, Homo sapiens
  Payload ID: 13875
  Gene Symbol: PUS1
  Gene Name: pseudouridylate synthase 1
  ENST ID: ENST00000322060
  CDS Start-End: 55-1206
ttccgccttcgcccacgtggtccggctccggctcagtcagccgcctcgccgcgcatggccgggaacgcggagccgccgcccgccggagccgcatgcccccaggaccggaggtcctgcagcggccgggccgggggcgaccgcgtctgggaggacggagaacatccggcgaagaagctcaagagcggtggcgacgaggagcggcgcgagaagccgcccaagcggaagatcgtgctgctcatggcctattcgggcaagggctaccacggcatgcagaggaatgtcgggtcctcacaattcaaaacaattgaagatgacttggtgtccgccctcgtccggtcaggctgtattcctgaaaatcatggtgaggacatgaggaaaatgtccttccagcgctgcgcccggacagacaagggtgtgtccgcagccggccaggtggtatccctgaaggtgtggctgattgacgacattctagaaaagatcaacagccaccttccctctcacattcggattctgggactgaagcgggtcacgggcgggtttaactccaagaacagatgtgatgccaggacctattgctacctgctgcccacgtttgcctttgcgcacaaggaccgggacgttcaggatgagacctaccgcctgagcgccgagacgctgcagcaggtcaacaggctcctggcctgctacaagggcacgcacaacttccacaatttcacctcgcagaaggggccgcaggatcccagtgcctgccgctacatcctggagatgtactgcgaggaaccctttgtgcgggagggcctggagtttgcggtgatcagggtgaagggccagagcttcatgatgcatcagatccggaagatggtcggcctggtggtggccattgtgaagggttatgcccctgagagcgtgctggagcgcagctggggcacagagaaggtggacgtgcccaaggcgcccggactcggcctggtcctggagagggtgcacttcgagaagtacaaccagcgctttggcaacgatgggctgcatgagccgctggactgggcgcaggaggaaggaaaggtcgcagccttcaaggaggagcacatctaccccaccatcatcggcaccgagcgggacgaacgctccatggcccagtggctgagcaccttgcccatccacaacttcagtgccaccgctctcacggcaggtggcacgggcgccaag

SEQ ID NO: 172300 - DNA, 4094 bp, Homo sapiens
  Payload ID: 13875
  Gene Symbol: PUS1
  Gene Name: pseudouridylate synthase 1
  Uniprot ID: Q9Y606
  ENST ID: ENST00000376649
  CDS Start-End: 501-1784
gtgcagtcggtcgttccacttccgccttcgcccacgtggtccggctccggctcagtcagccgcgtcgcgaatggggcaggagcgagcctctctggtcccgacgcgggtggcccgggtctcctcgactcctgaggaaagcccaccgggcggggcgggaggtgaagaggctggggaagtcagaggttaacctgggcgtcaggggacgttggagttgatccgtcagggtcccggggcggtctgggggcagtagagacggggcttgggcgcggggcctgagaggtcaggggtcagcaggagtgaggctggggcgtccaggtccgagaggtcaggggtcagctggagaggggctggggcgccggtttcccggaggtcaggggtcagaaggaacagggctgcagcgtcagggtccgagaggttaggggtcggcagaggcggagctggggcactgggggtcaggggtcggggatcagggcggggtcgggtgcactggtagcctgcgcatgggcctccagcttcgcgcgctgttgggagccttcggacggtggaccctgcgcctgggaccgcgtccgtcctgctcgccgcgcatggccgggaacgcggagccgccgcccgccggagccgcatgcccccaggaccggaggtcctgcagcggccgggccgggggcgaccgcgtctgggaggacggagaacatccggcgaagaagctcaagagcggtggcgacgaggagcggcgcgagaagccgcccaagcggaagatcgtgctgctcatggcctattcgggcaagggctaccacggcatgcagaggaatgtcgggtcctcacaattcaaaacaattgaagatgacttggtgtccgccctcgtccggtcaggctgtattcctgaaaatcatggtgaggacatgaggaaaatgtccttccagcgctgcgcccggacagacaagggtgtgtccgcagccggccaggtggtatccctgaaggtgtggctgattgacgacattctagaaaagatcaacagccaccttccctctcacattcggattctgggactgaagcgggtcacgggcgggtttaactccaagaacagatgtgatgccaggacctattgctacctgctgcccacgtttgcctttgcgcacaaggaccgggacgttcaggatgagacctaccgcctgagcgccgagacgctgcagcaggtcaacaggctcctggcctgctacaagggcacgcacaacttccacaatttcacctcgcagaaggggccgcaggatcccagtgcctgccgctacatcctggagatgtactgcgaggaaccctttgtgcgggagggcctggagtttgcggtgatcagggtgaagggccagagcttcatgatgcatcagatccggaagatggtcggcctggtggtggccattgtgaagggttatgcccctgagagcgtgctggagcgcagctggggcacagagaaggtggacgtgcccaaggcgcccggactcggcctggtcctggagagggtgcacttcgagaagtacaaccagcgctttggcaacgatgggctgcatgagccgctggactgggcgcaggaggaaggaaaggtcgcagccttcaaggaggagcacatctaccccaccatcatcggcaccgagcgggacgaacgctccatggcccagtggctgagcaccttgcccatccacaacttcagtgccaccgctctcacggcaggtggcacgggcgccaaggtgcccagtcccctggaaggcagtgaaggggacggagacactgactgaggcgatgggagctgcccaccagagtgcctctgagcagctcacagtgtgtgcccagatgtgccacccctgtgggcagcaagaagctgggatcgctgcagccatgttttcccggccatgccggcgttgtaacctcaggaccttcccttgtaggaacagcctttctcgaatctgttttcagctcttgcattgcatagatgaacctcagcatgtaaagaactatttttttaaagaagtgattttcttattaaacaagtacaaattttgcttagtcaatccttggtttgcctttttcttagtcttttttaacatttttttcgtccacagagatgagcacagcatggtgtcccgttgagaacagatacggctgaacaaaagagaaaggcccaggaggttggctcagcctgtaatcccagcacttgggaggctgaggtgggcagatcgcttgagtacaggagttccagaccagcctgggtaaaatggtgaaaccgcgtctctgcaaaagattagctgggcatggcggcatgccctgtagttcagctgctcaggaggctgaggtgggaggattgcctgagtctggagaagtcgaggctgccctgattgccactgcactcaaaaaaaaaaaaaacaacaacaaccaaaaaaactggccaggcgtggtggctcatgcctgtaatcccaacacttcgggaggctgaggcaggtggattacttgaggtcgggagtttgagaccagcctgaccagcatggagaaaccccgtctctactaaaaatacaaaaattagctgggcgcgatggtgggcgcctgtaatcccagctacttgggaggctgaggcaggagaatcgcttgaacctgggaggtggagattgcagtgagccaagattgcgccactgcactccagcctgggtgagagagccaaactccgtcaaaaaaaaaacaacaaaaaaacccagcatcctgcactctgcagggtggtcccgaggcagggctgtggagggcactgaagcaggggccccgctgacctgccgcatccccgagaggggtggcagccacgggctcctcttcctagacagccccatgcgtgcagcctttgccctggttgcaggtcggtactcgcctcagcactgtcccggtgccaggcaggtgggggttggggcagagggcagaaggaaagggtgcatcgcggaacaggcccttagtggagcttactggaagaccccaccagccgctgctgcacgtcattggtcacaggtgcatccagcggcccttcgtagctgcaagggaggctggggaagactgcttttgaagtggcgcttagcgtggaacaaaacacactgcgttagccaggagcaggggatccttggctggcgggctgccaggagcccagggaggggctcagcggaggaagtgccgtgcatacacgtggcctcccagcctgcagcccgtgggcgcacgtgaccaatgcacgagtgcctgatgccccagcggtgcacacaactaatgcgcatgcgcctgacgtgccaacaatgcatgtgactaatgcgcagtcgcctgtcgccccagcagtgcgtgagtgacatgtgcacgtgcccatgatgcggtggacaccgtgtgtgagaagtggggcaggacaggtgggattgggagatgcttcaggcagtgagctcctagggcgtggggtgcccaagagagtggagctggttttagggattttggccagaggagcagtggggctcactgcttcgggagccagggagtgcaggtgtgaggcccactgggctttgggtttgagggatggatgagctgggccgttaactggaacgggagacagggaaaggaatgggtttggagaacaagcaggagcttggttctaagcatgttaattttacctgggatagacaggactttattttttatttttattttgtttgagacggagtctcgctgtgttgcccagcctggagtgcagtggcgcgatctcggctcactgcaacctgcgcctcccgggctcaagcgattctccttcctcagcctccagagtagctgagagtacaggtgcccgctgccacgcccggctgatttttgtatttttggtagagacagggtttcaccatgttggtcaggctggtctcaaactcctaagctcaggtgatccacccgccttggcctcccaaagtgctgggattacaggcgtgagccaccgtgcccggcctgggtgacccatttaaatcacttttgatgatcctggggtatgtgacattttaaaataatatgtatatatggaaggaaataaaaaactataaaaaagggaa

SEQ ID NO: 172301 - DNA, 1664 bp, Homo sapiens
  Payload ID: 13875
  Gene Symbol: PUS1
  Gene Name: pseudouridylate synthase 1
  Uniprot ID: Q9Y606
  ENST ID: ENST00000443358
  CDS Start-End: 192-1391
agttttgtccgcgctcggccgccgtgcagtcggtcgttccacttccgccttcgcccacgtggtccggctccggctcagtcagccgcgtcgcgaatggggcaggagcgagcctctctggtcccgacgcgggtggcccgggtctcctcgactcctgaggaaagcccaccgggcggggcgggagctcgccgcgcatggccgggaacgcggagccgccgcccgccggagccgcatgcccccaggaccggaggtcctgcagcggccgggccgggggcgaccgcgtctgggaggacggagaacatccggcgaagaagctcaagagcggtggcgacgaggagcggcgcgagaagccgcccaagcggaagatcgtgctgctcatggcctattcgggcaagggctaccacggcatgcagaggaatgtcgggtcctcacaattcaaaacaattgaagatgacttggtgtccgccctcgtccggtcaggctgtattcctgaaaatcatggtgaggacatgaggaaaatgtccttccagcgctgcgcccggacagacaagggtgtgtccgcagccggccaggtggtatccctgaaggtgtggctgattgacgacattctagaaaagatcaacagccaccttccctctcacattcggattctgggactgaagcgggtcacgggcgggtttaactccaagaacagatgtgatgccaggacctattgctacctgctgcccacgtttgcctttgcgcacaaggaccgggacgttcaggatgagacctaccgcctgagcgccgagacgctgcagcaggtcaacaggctcctggcctgctacaagggcacgcacaacttccacaatttcacctcgcagaaggggccgcaggatcccagtgcctgccgctacatcctggagatgtactgcgaggaaccctttgtgcgggagggcctggagtttgcggtgatcagggtgaagggccagagcttcatgatgcatcagatccggaagatggtcggcctggtggtggccattgtgaagggttatgcccctgagagcgtgctggagcgcagctggggcacagagaaggtggacgtgcccaaggcgcccggactcggcctggtcctggagagggtgcacttcgagaagtacaaccagcgctttggcaacgatgggctgcatgagccgctggactgggcgcaggaggaaggaaaggtcgcagccttcaaggaggagcacatctaccccaccatcatcggcaccgagcgggacgaacgctccatggcccagtggctgagcaccttgcccatccacaacttcagtgccaccgctctcacggcaggtggcacgggcgccaaggtgcccagtcccctggaaggcagtgaaggggacggagacactgactgaggcgatgggagctgcccaccagagtgcctctgagcagctcacagtgtgtgcccagatgtgccacccctgtgggcagcaagaagctgggatcgctgcagccatgttttcccggccatgccggcgttgtaacctcaggaccttcccttgtaggaacagcctttctcgaatctgttttcagctcttgcattgcatagatgaacctcagcatgtaaagaactatttttttaaagaagtgattttcttattaaacaagtacaaattttgcttagtcaa

SEQ ID NO: 172302 - DNA, 577 bp, Homo sapiens
  Payload ID: 13875
  Gene Symbol: PUS1
  Gene Name: pseudouridylate synthase 1
  ENST ID: ENST00000456665
  CDS Start-End: 109-577
agcctctctggtcccgacgcgggtggcccgggtctcctcgactcctgaggaaagcccaccgggcggggcgggaggtgaagaggctggggaagtcagagctcgccgcgcatggccgggaacgcggagccgccgcccgccggagccgcatgcccccaggaccggaggtcctgcagcggccgggccgggggcgaccgcgtctgggaggacggagaacatccggcgaagaagctcaagagcggtggcgacgaggagcggcgcgagaagccgcccaagcggaagatcgtgctgctcatggcctattcgggcaagggctaccacggcatgcagaggaatgtcgggtcctcacaattcaaaacaattgaagatgacttggtgtccgccctcgtccggtcaggctgtattcctgaaaatcatggtgaggacatgaggaaaatgtccttccagcgctgcgcccggacagacaagagtcaggatctcattctgttgcccaggctggagtgcagtggcatgatcatggctcactgcagtctcaaactgctgggctcaagcaatcctcctgcctcagcctcccgagtag

SEQ ID NO: 172303 - DNA, 2151 bp, Homo sapiens
  Payload ID: 13875
  Gene Symbol: PUS1
  Gene Name: pseudouridylate synthase 1
  ENST ID: ENST00000542167
  CDS Start-End: 754-1878
agtcagccgcgtcgcgaatggggcaggagcgagcctctctggtcccgacgcgggtggcccgggtctcctcgactcctgaggaaagcccaccgggcggggcgggaggtgaagaggctggggaagtcagaggttaacctgggcgtcaggggacgttggagttgatccgtcagggtcccggggcggtctgggggcagtagagacggggcttgggcgcggggcctgagaggtcaggggtcacctcctgagtcactgggattaaaagcatacctaattatttatttatttatttatttttgagacagagttttcctctgtcacctaggctggagtgcagtggtacattatcagttcactgcaacctccacttcccaggttcaagcgattctcctgcctcaagagcccggcaccacgcccggctaatttttgtatttttagtagagacagagtttcaccatgttggccagactggtctcgaactcctgatctcaagtgatccaccctcctcggcctcccaaagtgctgggattacaggtgtgagccactgcacctggccatagattactttatagtcaatgttttttttttaaagtataggtagcacccacggcactgattttgtaactgacagattgtggaagtaggtgtatgcacaggttcaatcaaacctgtgttttgattccattccacactacccaccccctagcatggagcagcccggccccagggtgagtgagcagaaaacagtgttttcacatgagcgtggcagctcacacttgtaatctcagcacttcaggaggccagaggagtaagcggccaggagttcgagaccagcctgggcaacatcatggcgacctctgtctgcaaaatataaaatctgtttttgtctcctttttccagaggaatgtcgggtcctcacaattcaaaacaattgaagatgacttggtgtccgccctcgtccggtcaggctgtattcctgaaaatcatggtgaggacatgaggaaaatgtccttccagcgctgcgcccggacagacaagggtgtgtccgcagccggccaggtggtatccctgaaggtgtggctgattgacgacattctagaaaagatcaacagccaccttccctctcacattcggattctgggactgaagcgggtcacgggcgggtttaactccaagaacagatgtgatgccaggacctattgctacctgctgcccacgtttgcctttgcgcacaaggaccgggacgttcaggatgagacctaccgcctgagcgccgagacgctgcagcaggtcaacaggctcctggcctgctacaagggcacgcacaacttccacaatttcacctcgcagaaggggccgcaggatcccagtgcctgccgctacatcctggagatgtactgcgaggaaccctttgtgcgggagggcctggagtttgcggtgatcagggtgaagggccagagcttcatgatgcatcagatccggaagatggtcggcctggtggtggccattgtgaagggttatgcccctgagagcgtgctggagcgcagctggggcacagagaaggtggacgtgcccaaggcgcccggactcggcctggtcctggagagggtgcacttcgagaagtacaaccagcgctttggcaacgatgggctgcatgagccgctggactgggcgcaggaggaaggaaaggtcgcagccttcaaggaggagcacatctaccccaccatcatcggcaccgagcgggacgaacgctccatggcccagtggctgagcaccttgcccatccacaacttcagtgccaccgctctcacggcaggtggcacgggcgccaaggtgcccagtcccctggaaggcagtgaaggggacggagacactgactgaggcgatgggagctgcccaccagagtgcctctgagcagctcacagtgtgtgcccagatgtgccacccctgtgggcagcaagaagctgggatcgctgcagccatgttttcccggccatgccggcgttgtaacctcaggaccttcccttgtaggaacagcctttctcgaatctgttttcagctcttgcattgcatagatgaacctcagcatgtaaagaactatttttttaaagaagtgattttcttattaaacaagtacaaattttgcttagtcaa

SEQ ID NO: 172304 - DNA, 642 bp, Homo sapiens
  Payload ID: 13875
  Gene Symbol: PUS1
  Gene Name: pseudouridylate synthase 1
  ENST ID: ENST00000537484
  CDS Start-End: 43-642
tggaccctgcgcctgggaccgcgtccgtcctgctcgccgcgcatggccgggaacgcggagccgccgcccgccggagccgcatgcccccaggaccggaggtcctgcagcggccgggccgggggcgaccgcgtctgggaggacggagaacatccggcgaagaagctcaagagcggtggcgacgaggagcggcgcgagaagccgcccaagcggaagatcgtgctgctcatggcctattcgggcaagggctaccacggcatgcagaggaatgtcgggtcctcacaattcaaaacaattgaagatgacttggtgtccgccctcgtccggtcaggctgtattcctgaaaatcatggtgaggacatgaggaaaatgtccttccagcgctgcgcccggacagacaagagtcaggatctcattctgttgcccaggctggagtgcagtggcatgatcatggctcactgcagtctcaaactgctgggctcaagcaatcctcctgcctcagcctcccgagtaggactgaagcgggtcacgggcgggtttaactccaagaacagatgtgatgccaggacctattgctacctgctgcccacgtttgcctttgcgcacaaggaccgggacgttcaggatgagacctaccgcctgagc

SEQ ID NO: 172305 - DNA, 631 bp, Homo sapiens
  Payload ID: 13875
  Gene Symbol: PUS1
  Gene Name: pseudouridylate synthase 1
  ENST ID: ENST00000538037
  CDS Start-End: 172-631
ccgcgtcgcgaatggggcaggagcgagcctctctggtcccgacgcgggtggcccgggtctcctcgactcctgaggaaagcccaccgggcggggcgggagcttcgcgcgctgttgggagccttcggacggtggaccctgcgcctgggaccgcgtccgtcctgctcgccgcgcatggccgggaacgcggagccgccgcccgccggagccgcatgcccccaggaccggaggtcctgcagcggccgggccgggggcgaccgcgtctgggaggacggagaacatccggcgaagaagctcaagagcggtggcgacgaggagcggcgcgagaagccgcccaagcggaagatcgtgctgctcatggcctattcgggcaagggctaccacggcatgcagaggaatgtcgggtcctcacaattcaaaacaattgaagatgacttggtgtccgccctcgtccggtcaggctgtattcctgaaaatcatggtgaggacatgaggaaaatgtccttccagcgctgcgcccggacagacaagggtgtgtccgcagccggccaggtggtatccctgaaggtgtggctgattgacgacattctagaaaagatcaacagccaccttccctctcacattcggattctgg

SEQ ID NO: 172306 - DNA, 838 bp, Homo sapiens
  Payload ID: 13875
  Gene Symbol: PUS1
  Gene Name: pseudouridylate synthase 1
  ENST ID: ENST00000535067
  CDS Start-End: 163-567
cttcggacggtggaccctgcgcctgggaccgcgtccgtcctggtaatgaccgcgacgccgggcgaccccgctatgcccgcccagcccagcccaccccagtccaccccgcgcggtgccgagcgggcccccgctcacgccgcccttctccgcagctcgccgcgcatggccgggaacgcggagccgccgcccgccggagccgcatgcccccaggaccggaggtcctgcagcggccgggccgggggcgaccgcgtctgggaggacggagaacatccggcgaagaagctcaagagcggtggcgacgaggagcggcgcgagaagccgcccaagcggaagatcgtgctgctcatggcctattcgggcaagggctaccacggcatgcagaggaatgtcgggtcctcacaattcaaaacaattgaagatgacttggtgtccgccctcgtccggtcaggctgtattcctgaaaatcatggtgaggacatgaggaaaatgtccttccagcgctgcgcccggacagacaaggtgcccagtcccctggaaggcagtgaaggggacggagacactgactgaggcgatgggagctgcccaccagagtgcctctgagcagctcacagtgtgtgcccagatgtgccacccctgtgggcagcaagaagctgggatcgctgcagccatgttttcccggccatgccggcgttgtaacctcaggaccttcccttgtaggaacagcctttctcgaatctgttttcagctcttgcattgcatagatgaacctcagcatgtaaagaactatttttttaaagaagtgattttcttattaaacaagtacaaattttgcttagtc

SEQ ID NO: 172307 - DNA, 687 bp, Homo sapiens
  Payload ID: 13875
  Gene Symbol: PUS1
  Gene Name: pseudouridylate synthase 1
  ENST ID: ENST00000544213
  CDS Start-End: 135-687
gaggtcaggggtcagaaggaacagggctgcagcgtcagggtccgagaggttaggggtcggcagaggcggagctggggcactgggggtcaggggtcggggatcagggcggggtcgggtgcactggtagcctgcgcatgggcctccagcttcgcgcgctgttgggagccttcggacggtggaccctgcgcctgggaccgcgtccgtcctgctcgccgcgcatggccgggaacgcggagccgccgcccgccggagccgcatgcccccaggaccggaggtcctgcagcggccgggccgggggcgaccgcgtctgggaggacggagaacatccggcgaagaagctcaagagcggtggcgacgaggagcggcgcgagaagccgcccaagcggaagatcgtgctgctcatggcctattcgggcaagggctaccacggcatgcagaggaatgtcgggtcctcacaattcaaaacaattgaagatgacttggtgtccgccctcgtccggtcaggctgtattcctgaaaatcatggtgaggacatgaggaaaatgtccttccagcgctgcgcccggacagacaagagtcaggatctcattctgttgcccaggctggagtgcagtggcatgatcatggctcactgcagtctcaaactgctgggctcaagcaatcctcctgcctcagcctcccgagtag

SEQ ID NO: 172308 - DNA, 2278 bp, Homo sapiens
  Payload ID: 13876
  Gene Symbol: PUS10
  Gene Name: pseudouridylate synthase 10
  Uniprot ID: Q3MIT2
  ENST ID: ENST00000316752
  CDS Start-End: 263-1852
gagactttgctccctgtcgatgccgtggctggacaaatgccgctctcaactgctacagaccaaagtctacgctttaaagatagagaagccattctgtcaaagtgaaaacagaagcggtaggtaggaagccgcccccctttctttcaagcacagagacccagagagacgcccaggagctcccgaaaaaaacgttgctgattagagctgccgggtcagaaacagctgtgagacactaaagtccccactgttataattattcaatatgttcccactgactgaggaaaacaagcatgtggcccagttgttgctcaatactggtacttgtccaagatgtatcttcagattctgtggtgtggattttcatgcaccttacaaacttccatacaaggagttgctcaatgaactacagaaatttctggaaactgaaaaagatgaattaattttggaagttatgaacccacctcccaagaaaattcgactgcaagaactggaagatagtattgataatctaagtcaaaatggagagggaaggatctctgttagtcatgttggaagcactgcttccaagaactcaaatttaaatgtatgtaatgtatgcctaggaattcttcaagaattctgtgagaaagatttcattaaaaaggtgtgccaaaaggttgaggcctctgggtttgaattcaccagcttggtattttcagtctccttcccaccacaactatctgtaagagagcatgctgcatggttgctggtaaaacaggaaatgggaaagcagagtctgtcgctgggaagagatgatatagttcagctaaaagaagcctacaaatggataactcaccccctgttttcagaggaactgggtgttcccattgatggaaagagcttgtttgaagtgagtgtggtctttgctcacccagaaacagttgaggattgccacttcctagctgcgatatgcccagattgttttaagccagccaaaaacaaacagtctgtattcactagaatggcagttatgaaagccttgaataagataaaggaagaggatttccttaagcagtttccttgtcctccaaactcaccaaaggctgtatgcgctgttcttgaaattgaatgtgctcatggtgctgtttttgtggctgggagatataataaatactccaggaatctaccacaaactccttggataattgatggagaaaggaagctggaatcttcagtggaagaattaatttcagatcatctgttggcagtatttaaagcagagagttttaatttttcatcctctggaagagaagatgtagatgtgagaacattaggaaatggaaggccctttgcaattgagctggtgaatcctcatagagtacatttcacttcacaagaaattaaggaacttcagcagaaaattaataactcatctaacaaaatccaagtacgtgacttgcagcttgtcacaagagaggcaataggacatatgaaagaaggtgaagaagaaaagacaaagacctacagtgccttaatttggacaaataaagcgatacagaagaaagacattgaattcctaaatgacataaaggacttaaaaatcgaccagaaaacacctttgcgcgtccttcaccgaaggcccctggctgtgcgagctcgcgtcattcacttcatggagacacagtacgtggatgagcaccacttccgcctccacttgaaaactcaggctggcacctacattaaagagtttgtacatggagacttcgggagaaccaagccaaacattgggtccctgatgaatgtgactgcagacattctggagctggatgttgagtctgtagatgttgactggccacctgctctggatgactagctttcaaatttggagacaaagagtatggttttcctggcatgatgtggacatccatggagcacatgccgtaaaatggctgtttacccaccataacggtgtcttgaaaactatttggatcatgttgatctatataattgttaatttgttgtaacatctcaggatctatatatgtgtatattttgtgttaaattgttccaaggatgtcttaggatttttctcattccctctttcacccccacaaaccaaactatgaataatgaaataattctccttaattctttcatttagagaggtgcacaaacaggacacattctctgttaacctaagaagctgtaatttcagcaagatttccctccacaagagatataccacctttaaaatcatgttctaatttttgtaaattatctgaataaaagttatatctag

SEQ ID NO: 172309 - DNA, 1227 bp, Homo sapiens
  Payload ID: 13876
  Gene Symbol: PUS10
  Gene Name: pseudouridylate synthase 10
  ENST ID: ENST00000398658
  CDS Start-End: 61-249
ggggttaaatctcaggctccggcgtctggggagaaggtgaggcggttataattattcaatatgttcccactgactgaggaaaacaagcatgtggcccagttgttgctcaatactggtacttgtccaagatgtatcttcagattctgtggtgtggattttcatgcaccttacaaacttccatacaagatgaagaaactgagatacagagaggttaagcaacctgcccaaagttacacagctattaagtgagcaagctaggatttgaacagtctgactgaattcaaaacctaggatttggaactagaagacatggatttgaatcccagttccaccactttccagcttcagtttactcctctgtaaatgggaatgatgataatacccacctcacaggactttaagggacaatacctaataaagtacgtggaaacactttgaaaaccagaaattggctgggtgcggtggctcacgcctgtaatcctagcactttgggaggccgaggcgggtggatcacgaggtcaggggttcaagaccagcctggccaagatgatgaaaccctgtctctactaaaaatacaaatattagctgggcgccatggcaggtgcctgtgatcccagctacttgggaggctgaggcaggagaattgcttgaacccaggggtggggggtgcggaggttgcagtgagccgagatcatgccactgcactctagcctgggcaacagtgtgagactccgtctgaaaattaaaaaaacaaaaacaaaaaaccagaaatggtacttgtgctatgatgatttaaatatgtgtatattcatttatacacaatatgactgtaaagtaataagactggttttgtgtaaccctgcttacacatttttttcagacacactgtaacctattatctattatatgttattaggttttaaatttatattatattaagagactgagtgttatcaactttcgtttgtttcattttatgtaaggcaatatacaagaatatttggacagctttttggaaatgttcataaattttgatctgttctattcatgtaactatgtatgtacatgcacatctgtatatgcactatgttatatctatattatagatcttaggtaacaacaaacatatttgtgtgagtcaaaatgtacctgtatatgtatgtatgtatgtatatttctctgttaaagcaggagagctaatttctcaataaaatggatttaaatttg

SEQ ID NO: 172310 - DNA, 1820 bp, Homo sapiens
  Payload ID: 13876
  Gene Symbol: PUS10
  Gene Name: pseudouridylate synthase 10
  Uniprot ID: Q3MIT2
  ENST ID: ENST00000407787
  CDS Start-End: 61-1650
ggggttaaatctcaggctccggcgtctggggagaaggtgaggcggttataattattcaatatgttcccactgactgaggaaaacaagcatgtggcccagttgttgctcaatactggtacttgtccaagatgtatcttcagattctgtggtgtggattttcatgcaccttacaaacttccatacaaggagttgctcaatgaactacagaaatttctggaaactgaaaaagatgaattaattttggaagttatgaacccacctcccaagaaaattcgactgcaagaactggaagatagtattgataatctaagtcaaaatggagagggaaggatctctgttagtcatgttggaagcactgcttccaagaactcaaatttaaatgtatgtaatgtatgcctaggaattcttcaagaattctgtgagaaagatttcattaaaaaggtgtgccaaaaggttgaggcctctgggtttgaattcaccagcttggtattttcagtctccttcccaccacaactatctgtaagagagcatgctgcatggttgctggtaaaacaggaaatgggaaagcagagtctgtcgctgggaagagatgatatagttcagctaaaagaagcctacaaatggataactcaccccctgttttcagaggaactgggtgttcccattgatggaaagagcttgtttgaagtgagtgtggtctttgctcacccagaaacagttgaggattgccacttcctagctgcgatatgcccagattgttttaagccagccaaaaacaaacagtctgtattcactagaatggcagttatgaaagccttgaataagataaaggaagaggatttccttaagcagtttccttgtcctccaaactcaccaaaggctgtatgcgctgttcttgaaattgaatgtgctcatggtgctgtttttgtggctgggagatataataaatactccaggaatctaccacaaactccttggataattgatggagaaaggaagctggaatcttcagtggaagaattaatttcagatcatctgttggcagtatttaaagcagagagttttaatttttcatcctctggaagagaagatgtagatgtgagaacattaggaaatggaaggccctttgcaattgagctggtgaatcctcatagagtacatttcacttcacaagaaattaaggaacttcagcagaaaattaataactcatctaacaaaatccaagtacgtgacttgcagcttgtcacaagagaggcaataggacatatgaaagaaggtgaagaagaaaagacaaagacctacagtgccttaatttggacaaataaagcgatacagaagaaagacattgaattcctaaatgacataaaggacttaaaaatcgaccagaaaacacctttgcgcgtccttcaccgaaggcccctggctgtgcgagctcgcgtcattcacttcatggagacacagtacgtggatgagcaccacttccgcctccacttgaaaactcaggctggcacctacattaaagagtttgtacatggagacttcgggagaaccaagccaaacattgggtccctgatgaatgtgactgcagacattctggagctggatgttgagtctgtagatgttgactggccacctgctctggatgactagctttcaaatttggagacaaagagtatggttttcctggcatgatgtggacatccatggagcacatgccgtaaaatggctgtttacccaccataacggtgtcttgaaaactatttggatcatgttgatctatataattgttaatttgttgtaacatctcaggatctatatat

SEQ ID NO: 172311 - DNA, 571 bp, Homo sapiens
  Payload ID: 13876
  Gene Symbol: PUS10
  Gene Name: pseudouridylate synthase 10
  ENST ID: ENST00000421319
  CDS Start-End: 211-571
agtcgggctgggagtaaagccgcacgcactccttcgctcgtgggggaggtagggtgaggtggcaaaccaggcagtttttcggatttcctctacaaacaagaagggagaagctcacttagtcctagcgagagcgggctggtacttttgttctaaaacgcacgtttcctcggggaacagaattgctagacgcaatagttataattattcaatatgttcccactgactgaggaaaacaagcatgtggcccagttgttgctcaatactggtacttgtccaagatgtatcttcagattctgtggtgtggattttcatgcaccttacaaacttccatacaaggagttgctcaatgaactacagaaatttctggaaactgaaaaagatgaattaattttggaagttatgaacccacctcccaagaaaattcgactgcaagaactggaagatagtattgataatctaagtcaaaatggagagggaaggatctctgttagtcatgttggaagcactgcttccaagaactcaaatttaaatgtatgtaatgtatgcctaggaattcttcaagaattctgtg

SEQ ID NO: 172312 - DNA, 658 bp, Homo sapiens
  Payload ID: 13876
  Gene Symbol: PUS10
  Gene Name: pseudouridylate synthase 10
  ENST ID: ENST00000430495
  CDS Start-End: 65-253
ggggttaaatctcaggctccggcgtctggggagaaggtgaggcgggtagttataattattcaatatgttcccactgactgaggaaaacaagcatgtggcccagttgttgctcaatactggtacttgtccaagatgtatcttcagattctgtggtgtggattttcatgcaccttacaaacttccatacaagatgaagaaactgagatacagagaggttaagcaacctgcccaaagttacacagctattaagtgagcaagctaggatttgaacagtctgactgaattcaaaacctaggatttggaactagaagacatggatttgaatcccagttccaccactttccagcttcagtttactcctctgtaaatgggaatgatgataatacccacctcacaggactttaagggacaatacctaataaagagttgctcaatgaactacagaaatttctggaaactgaaaaagatgaattaattttggaagttatgaacccacctcccaagaaaattcgactgcaagaactggaagatagtattgataatctaagtcaaaatggagagggaaggatctctgttagtcatgttggaagcactgcttccaagaactcaaatttaaatgtatgtaatgtatgcctaggaattcttcaagaattctgtg

SEQ ID NO: 172313 - DNA, 1843 bp, Homo sapiens
  Payload ID: 13877
  Gene Symbol: PUS3
  Gene Name: pseudouridylate synthase 3
  Uniprot ID: Q9BZE2
  ENST ID: ENST00000227474
  CDS Start-End: 99-1544
gcacagtgacagcttcctttctcggaaacgcggcgcggccggctgccggaaaacagggcagacctgtatggttcgtttattcctggggttgtcatatcatggcttataatgacacagacagaaaccagactgagaagctcctaaaaagagtacgagaactggagcaagaggtgcaaagacttaaaaaggaacaggccaaaaataaggaggactcaaacattagagaaaattcagcaggagctggaaaaactaagcgtgcatttgatttcagtgctcatggccgaagacacgtagccctaagaatagcctatatgggctggggataccagggctttgctagtcaggaaaacacaaataataccattgaagagaaactgtttgaagctctaaccaagactcgactagtagaaagcagacagacatccaactatcaccgatgtgggagaacagataaaggagttagtgcctttggacaggtgatctcacttgaccttcgctctcagtttccaaggggcagggattccgaggactttaatgtaaaagaggaggctaatgctgctgctgaagagatccgttatacccacattctcaatcgggtactccctccagacatccgtatattggcctgggcccctgtagaaccaagcttcagtgctaggttcagctgccttgagcggacttaccgctattttttccctcgtgctgatttagatattgtaaccatggattatgcagctcagaagtatgttggcacccatgatttcaggaacttgtgtaaaatggatgtagccaacggtgtgattaattttcagaggactattctatctgctcaagtacagctagtgggccagagcccaggtgaggggagatggcaagaacctttccagttatgtcagtttgaagtgactggccaggcattcctttatcatcaagtccgatgtatgatggctatcctctttctgattggccaaggaatggagaagccagagattattgatgagctgctgaatatagagaaaaatccccaaaagcctcaatatagtatggctgtagaatttcctctagtcttatatgactgtaagtttgaaaatgtcaagtggatctatgaccaggaggctcaggagttcaatattacccacctacaacaactgtgggctaatcatgctgtcaaaactcacatgttgtatagtatgctacaaggactggacactgttccagtaccctgtggaataggaccaaagatggatggaatgacagaatggggaaatgttaagccctctgtcataaagcagaccagtgcctttgtagaaggagtgaagatgcgcacatataagcccctcatggaccgtcctaaatgccaaggactggaatcccggatccagcattttgtacgtaggggacgaattgagcacccacatttattccatgaggaagaaacaaaagccaaaagggactgtaatgacacactagaggaagagaatactaatttggagacaccaacgaagagggtctgtgttgacacagaaattaaaagcatcatttaaccatagacaatttgccaggatctaggaaccacctaatggtaggtggacagaaaaggaaaaaaaaaaaaatttacttgcaagtactaggaattcagatgatcagctcttaaaagaaaaaaaaaagcaaaaagactaaagccctattaaggaagttattgctttaataagaaatttcaaatattctcttatcccggtccaaaaggattaagcgattaaagaacgtaaaatggagatgtatttacatacacctggaaacctgtgccttgtattcaaattcattaaagcctaatcctgcaagt

SEQ ID NO: 172314 - DNA, 605 bp, Homo sapiens
  Payload ID: 13877
  Gene Symbol: PUS3
  Gene Name: pseudouridylate synthase 3
  ENST ID: ENST00000534158
  CDS Start-End: 99-605
gcacagtgacagcttcctttctcggaaacgcggcgcggccggctgccggaaaacagggcagacctgtatggttcgtttattcctggggttgtcatatcatggcttataatgacacagacagaaaccagactgagaagctcctaaaaagagtacgagaactggagcaagaggtgcaaagacttaaaaaggaacaggccaaaaataaggaggactcaaacattagagaaaattcagcaggagctggaaaaactaagcgtgcatttgatttcagtgctcatggccgaagacacgtagccctaagaatagcctatatgggctggggataccagggctttgctagtcaggaaaacacaaataataccattgaagagaaactgtttgaagctctaaccaagactcgactagtagaaagcagacagacatccaactatcaccgatgtgggagaacagataaaggagttagtgcctttggacaggtgatctcacttgaccttcgctctcagtttccaaggggcagggattccgaggactttaatgtaaaagaggaggctaatgctgctgctgaagagatccgttatacccacattctcaatcgggtactccct

SEQ ID NO: 172315 - DNA, 1792 bp, Homo sapiens
  Payload ID: 13877
  Gene Symbol: PUS3
  Gene Name: pseudouridylate synthase 3
  Uniprot ID: Q9BZE2
  ENST ID: ENST00000530811
  CDS Start-End: 47-1492
acagggcagacctgtatggttcgtttattcctggggttgtcatatcatggcttataatgacacagacagaaaccagactgagaagctcctaaaaagagtacgagaactggagcaagaggtgcaaagacttaaaaaggaacaggccaaaaataaggaggactcaaacattagagaaaattcagcaggagctggaaaaactaagcgtgcatttgatttcagtgctcatggccgaagacacgtagccctaagaatagcctatatgggctggggataccagggctttgctagtcaggaaaacacaaataataccattgaagagaaactgtttgaagctctaaccaagactcgactagtagaaagcagacagacatccaactatcaccgatgtgggagaacagataaaggagttagtgcctttggacaggtgatctcacttgaccttcgctctcagtttccaaggggcagggattccgaggactttaatgtaaaagaggaggctaatgctgctgctgaagagatccgttatacccacattctcaatcgggtactccctccagacatccgtatattggcctgggcccctgtagaaccaagcttcagtgctaggttcagctgccttgagcggacttaccgctattttttccctcgtgctgatttagatattgtaaccatggattatgcagctcagaagtatgttggcacccatgatttcaggaacttgtgtaaaatggatgtagccaacggtgtgattaattttcagaggactattctatctgctcaagtacagctagtgggccagagcccaggtgaggggagatggcaagaacctttccagttatgtcagtttgaagtgactggccaggcattcctttatcatcaagtccgatgtatgatggctatcctctttctgattggccaaggaatggagaagccagagattattgatgagctgctgaatatagagaaaaatccccaaaagcctcaatatagtatggctgtagaatttcctctagtcttatatgactgtaagtttgaaaatgtcaagtggatctatgaccaggaggctcaggagttcaatattacccacctacaacaactgtgggctaatcatgctgtcaaaactcacatgttgtatagtatgctacaaggactggacactgttccagtaccctgtggaataggaccaaagatggatggaatgacagaatggggaaatgttaagccctctgtcataaagcagaccagtgcctttgtagaaggagtgaagatgcgcacatataagcccctcatggaccgtcctaaatgccaaggactggaatcccggatccagcattttgtacgtaggggacgaattgagcacccacatttattccatgaggaagaaacaaaagccaaaagggactgtaatgacacactagaggaagagaatactaatttggagacaccaacgaagagggtctgtgttgacacagaaattaaaagcatcatttaaccatagacaatttgccaggatctaggaaccacctaatggtaggtggacagaaaaggaaaaaaaaaaaaatttacttgcaagtactaggaattcagatgatcagctcttaaaagaaaaaaaaaagcaaaaagactaaagccctattaaggaagttattgctttaataagaaatttcaaatattctcttatcccggtccaaaaggattaagcgattaaagaacgtaaaatggagatgtatttacatacacctggaaacctgtgccttgtattcaaattcattaaagcctaatcctgcaagta

SEQ ID NO: 172316 - DNA, 579 bp, Homo sapiens
  Payload ID: 13877
  Gene Symbol: PUS3
  Gene Name: pseudouridylate synthase 3
  ENST ID: ENST00000529801
  CDS Start-End: 265-579
gcacagtgacagcttcctttctcggaaacgcggcgcggccggctgccggaaatagagacggggtttcgccgtgttagccaggatggtctcgatctcctgacctcgtgatccgcccgcctcagcctcccaaagtgctgggattacaggcgtgagccaccgcgcccggcttgttccttcttttgagctctcatcatagcccaggttcaagatcatcttagacagggcagacctgtatggttcgtttattcctggggttgtcatatcatggcttataatgacacagacagaaaccagactgagaagctcctaaaaagagtacgagaactggagcaagaggtgcaaagacttaaaaaggaacaggccaaaaataaggaggactcaaacattagagaaaattcagcaggagctggaaaaactaagcgtgcatttgatttcagtgctcatggccgaagacacgtagccctaagaatagcctatatgggctggggataccagggctttgctagtcaggaaaacacaaataataccattgaagagaaactgtttgaagctctaaccaagactcgactagtagaaagc

SEQ ID NO: 172317 - DNA, 1419 bp, Homo sapiens
  Payload ID: 13877
  Gene Symbol: PUS3
  Gene Name: pseudouridylate synthase 3
  ENST ID: ENST00000613398
  CDS Start-End: 299-1120
gcacagtgacagcttcctttctcggaaacgcggcgcggccggctgccggaaagtgatctcacttgaccttcgctctcagtttccaaggggcagggattccgaggactttaatgtaaaagaggaggctaatgctgctgctgaagagatccgttatacccacattctcaatcgggtactccctccagacatccgtatattggcctgggcccctgtagaaccaagcttcagtgctaggttcagctgccttgagcggacttaccgctattttttccctcgtgctgatttagatattgtaaccatggattatgcagctcagaagtatgttggcacccatgatttcaggaacttgtgtaaaatggatgtagccaacggtgtgattaattttcagaggactattctatctgctcaagtacagctagtgggccagagcccaggtgaggggagatggcaagaacctttccagttatgtcagtttgaagtgactggccaggcattcctttatcatcaagtccgatgtatgatggctatcctctttctgattggccaaggaatggagaagccagagattattgatgagctgctgaatatagagaaaaatccccaaaagcctcaatatagtatggctgtagaatttcctctagtcttatatgactgtaagtttgaaaatgtcaagtggatctatgaccaggaggctcaggagttcaatattacccacctacaacaactgtgggctaatcatgctgtcaaaactcacatgttgtatagtatgctacaaggactggacactgttccagtaccctgtggaataggaccaaagatggatggaatgacagaatggggaaatgttaagccctctgtcataaagcagaccagtgcctttgtagaaggagtgaagatgcgcacatataagcccctcatggaccgtcctaaatgccaaggactggaatcccggatccagcattttgtacgtaggggacgaattgagcacccacatttattccatgaggaagaaacaaaagccaaaagggactgtaatgacacactagaggaagagaatactaatttggagacaccaacgaagagggtctgtgttgacacagaaattaaaagcatcatttaaccatagacaatttgccaggatctaggaaccacctaatggtaggtggacagaaaaggaaaaaaaaaaaaatttacttgcaagtactaggaattcagatgatcagctcttaaaagaaaaaaaaaagcaaaaagactaaagccctattaaggaagttattgctttaataagaaatttcaaatattctcttatcccggtccaaaaggattaagcgattaaagaacgtaaaatggagatgtatttacatacacctggaaacctgtgccttgtattcaaattcattaaagcctaatcctgcaagt

SEQ ID NO: 172318 - DNA, 3480 bp, Homo sapiens
  Payload ID: 13878
  Gene Symbol: PUS7
  Gene Name: pseudouridylate synthase 7 (putative)
  Uniprot ID: Q96PZ0
  ENST ID: ENST00000356362
  CDS Start-End: 216-2201
cgcgtcgctgcgccgcacgtgtgcgagcccggccgccggtgagtcggctggagcgcatctggtcctccgcgcggaaagcgctgcttttgcctggccgccctagccgctggctcatccaagtggccttcgccgctctcttgcgtcccaaccagagcgctggccacctcgccgcccagctcacgccgcgcccgcgctcccaggctccggccttaaagatggagatgacagaaatgactggtgtgtcgctgaaacgtggggcactggttgtcgaagataatgacagtggagtcccagttgaagagacaaaaaaacagaagctgtcggaatgcagtctaaccaaaggtcaagatgggctacagaatgactttctgtccatcagtgaagacgtgcctcggcctcctgacactgtcagtactgggaaaggtggaaagaattctgaggctcagttggaagatgaggaagaagaggaggaagatggactttcagaggagtgcgaggaggaggaatcagagagttttgcagacatgatgaagcatggactcactgaggctgacgtaggcatcaccaagtttgtgagttctcatcaagggttctcgggaatcttaaaagaaagatactccgacttcgttgttcatgaaataggaaaagatggacggatcagccatttgaatgacttgtccattccagtggatgaggaggacccttcagaagacatatttacagttttgacagctgaagaaaagcagcgattggaagagctccagctgttcaaaaataaggaaaccagtgttgccattgaggttatcgaggacaccaaagagaaaagaaccatcatccatcaggctatcaaatctctgtttccaggattagagacaaaaacagaggatagggaggggaagaaatacattgtagcctaccacgcagctgggaaaaaggctttggcaaatccaagaaaacattcttggccaaaatctaggggaagttactgccacttcgtactatataaggaaaacaaagacaccatggatgctattaatgtactctccaaatacttaagagtcaagccaaatatattctcctacatgggaaccaaagataaaagggctataacagttcaagaaattgctgttctcaaaataactgcacaaagacttgcccacctgaataagtgcttgatgaactttaagctagggaatttcagctatcaaaaaaacccactgaaattgggagagcttcaaggaaaccacttcactgttgttctcagaaatataacaggaactgatgaccaagtacagcaagctatgaactctctcaaggagattggatttattaactactatggaatgcaaagatttggaaccacagctgtccctacgtatcaggttggaagagctatactacaaaattcctggacagaagtcatggatttaatattgaaaccccgctctggagctgaaaagggctacttggttaaatgcagagaagaatgggcaaagaccaaagacccaactgctgccctcagaaaactacctgtcaaaaggtgtgtggaagggcagctgcttcgaggactttcaaaatatggaatgaagaatatagtctctgcatttggcataatacccagaaataatcgcttaatgtatattcatagctaccaaagctatgtgtggaataacatggtaagcaagaggatagaagactatggactaaaacctgttccaggggacctcgttctcaaaggagccacagccacctatattgaggaagatgatgttaataattactctatccatgatgtggtaatgcccttgcctggtttcgatgttatctacccaaagcataaaattcaagaagcctacagggaaatgctcacagctgacaatcttgatattgacaacatgagacacaaaattcgagattattccttgtcaggggcctaccgaaagatcattattcgtcctcagaatgttagctgggaagtcgttgcatatgatgatcccaaaattccacttttcaacacagatgtggacaacctagaagggaagacaccaccagtttttgcttctgaaggcaaatacagggctctgaaaatggatttttctctacccccttctacttacgccaccatggccattcgagaagtgctaaaaatggataccagtatcaagaaccagacgcagctgaatacaacctggcttcgctgagcagtaccttgtccacagattagaaaacgtacacaagtgtttgcttcctggctccctgtgcatttttgtcttagttcagactcatatatggatttcaaatctttgtaataaaaattatttgtatttttaagtttttattagcttaaagaaataatttgcaatatttgtacatgtacacaaatcctgaggttcttaattttagctcagaatataaattagtcaaaatacacttcaggtgcttaaatcagagtaaaatgtcagctttacaataataaaaaaaggactttggtttaaagtagcaggtttaggttttgctacattctcaaaagacagcaggagtatttgacacatctgtgatggagtatacaacaatgcattttaagagcaaatgcaacaaaacaaatctggactatggataaataatttgagagctgccacccacaaatataaatacagtactcatgctgactgaaataataagacatctacaaatttataaacaaaaagtgattgtcattatcctgcttatgtactagattcaggcaagcattatagactttttggttgcggtggcttttgcatttatattatcaatgccttgcaggaacgttgcattgataggcccattttatttttttattttttttttcgagacaggatctcactctgtagcacaggctggattgcagtgcaatcctgcaattctcaatcttgcactgcagcctcgacctcccaggctccagtgactctcccacctcagcctcctaagtagctgggagtacaggcgcgcaccaccacgcctagctgatttttgtatttttttgtagagacgggggtttggccatgttgccgaggctaactcctgggattacaggcatgagctgtgctggccgggtttttttttcttgatgtaaacgtgtacagctgttttattagttaaggtctaatttttactctaggtgccttttatgttcagaactctttccactggactggtatttgctcaaaaataaataatggtagagaagaaaactataaaaatggacaaggctttcttctatcagtagcgtttaccctttgtcaccagtggctttggtatttccatgtctggcattgcataaacttctctggtgtgaaaggataaatatgcctttctaaagttgtatatcaaaattgtatcaatttttattttctatgatttctagaaacaaatgtaataaatatttttaaaatctcctttctactggttatgtaaataaatcaaataaatatatcaaaa

SEQ ID NO: 172319 - DNA, 2356 bp, Homo sapiens
  Payload ID: 13878
  Gene Symbol: PUS7
  Gene Name: pseudouridylate synthase 7 (putative)
  Uniprot ID: Q96PZ0
  ENST ID: ENST00000469408
  CDS Start-End: 240-2225
cgcgtcgctgcgccgcacgtgtgcgagcccggccgccggtgagtcggctggagcgcatctggtcctccgcgcggaaagcgctgcttttgcctggccgccctagccgctggctcatccaagtggccttcgccgctctcttgcgtcccaaccagagcgctggccacctcgccgcccagctcacgccgcgcccgcgctcccaggctccgggttttcttaaatgttttcttggagccttaaagatggagatgacagaaatgactggtgtgtcgctgaaacgtggggcactggttgtcgaagataatgacagtggagtcccagttgaagagacaaaaaaacagaagctgtcggaatgcagtctaaccaaaggtcaagatgggctacagaatgactttctgtccatcagtgaagacgtgcctcggcctcctgacactgtcagtactgggaaaggtggaaagaattctgaggctcagttggaagatgaggaagaagaggaggaagatggactttcagaggagtgcgaggaggaggaatcagagagttttgcagacatgatgaagcatggactcactgaggctgacgtaggcatcaccaagtttgtgagttctcatcaagggttctcgggaatcttaaaagaaagatactccgacttcgttgttcatgaaataggaaaagatggacggatcagccatttgaatgacttgtccattccagtggatgaggaggacccttcagaagacatatttacagttttgacagctgaagaaaagcagcgattggaagagctccagctgttcaaaaataaggaaaccagtgttgccattgaggttatcgaggacaccaaagagaaaagaaccatcatccatcaggctatcaaatctctgtttccaggattagagacaaaaacagaggatagggaggggaagaaatacattgtagcctaccacgcagctgggaaaaaggctttggcaaatccaagaaaacattcttggccaaaatctaggggaagttactgccacttcgtactatataaggaaaacaaagacaccatggatgctattaatgtactctccaaatacttaagagtcaagccaaatatattctcctacatgggaaccaaagataaaagggctataacagttcaagaaattgctgttctcaaaataactgcacaaagacttgcccacctgaataagtgcttgatgaactttaagctagggaatttcagctatcaaaaaaacccactgaaattgggagagcttcaaggaaaccacttcactgttgttctcagaaatataacaggaactgatgaccaagtacagcaagctatgaactctctcaaggagattggatttattaactactatggaatgcaaagatttggaaccacagctgtccctacgtatcaggttggaagagctatactacaaaattcctggacagaagtcatggatttaatattgaaaccccgctctggagctgaaaagggctacttggttaaatgcagagaagaatgggcaaagaccaaagacccaactgctgccctcagaaaactacctgtcaaaaggtgtgtggaagggcagctgcttcgaggactttcaaaatatggaatgaagaatatagtctctgcatttggcataatacccagaaataatcgcttaatgtatattcatagctaccaaagctatgtgtggaataacatggtaagcaagaggatagaagactatggactaaaacctgttccaggggacctcgttctcaaaggagccacagccacctatattgaggaagatgatgttaataattactctatccatgatgtggtaatgcccttgcctggtttcgatgttatctacccaaagcataaaattcaagaagcctacagggaaatgctcacagctgacaatcttgatattgacaacatgagacacaaaattcgagattattccttgtcaggggcctaccgaaagatcattattcgtcctcagaatgttagctgggaagtcgttgcatatgatgatcccaaaattccacttttcaacacagatgtggacaacctagaagggaagacaccaccagtttttgcttctgaaggcaaatacagggctctgaaaatggatttttctctacccccttctacttacgccaccatggccattcgagaagtgctaaaaatggataccagtatcaagaaccagacgcagctgaatacaacctggcttcgctgagcagtaccttgtccacagattagaaaacgtacacaagtgtttgcttcctggctccctgtgcatttttgtcttagttcagactcatatatggatttcaaatctttgtaataaaaattatttgtatttttaag

SEQ ID NO: 172320 - DNA, 395 bp, Homo sapiens
  Payload ID: 13878
  Gene Symbol: PUS7
  Gene Name: pseudouridylate synthase 7 (putative)
  ENST ID: ENST00000482157
  CDS Start-End: 1-395
ctcgggaatcttaaaagaaagatactccgacttcgttgttcatgaaataggaaaagatggacggatcagccatttgaatgacttgtccattccagtggatgaggaggttatcgaggacaccaaagagaaaagaaccatcatccatcaggctatcaaatctctgtttccaggattagagacaaaaacagaggatagggaggggaagaaatacattgtagcctaccacgcagctgggaaaaaggctttggcaaatccaagaaaacattcttggccaaaatctaggggaagttactgccacttcgtactatataaggaaaacaaagacaccatggatgctattaatgtactctccaaatacttaagagtcaagccaaatatattctcctacatgggaa

SEQ ID NO: 172321 - DNA, 2436 bp, Homo sapiens
  Payload ID: 13878
  Gene Symbol: PUS7
  Gene Name: pseudouridylate synthase 7 (putative)
  ENST ID: ENST00000481939
  CDS Start-End: 249-1595
gggccgcggcgcgtcgctgcgccgcacgtgtgcgagcccggccgccggtgagtcggctggagcgcatctggtcctccgcgcggaaagcgctgcttttgcctggccgccctagccgctggctcatccaagtggccttcgccgctctcttgcgtcccaaccagagcgctggccacctcgccgcccagctcacgccgcgcccgcgctcccaggctccgggttttcttaaatgttttcttggagccttaaagatggagatgacagaaatgactggtgtgtcgctgaaacgtggggcactggttgtcgaagataatgacagtggagtcccagttgaagagacaaaaaaacagaagctgtcggaatgcagtctaaccaaaggtcaagatgggctacagaatgactttctgtccatcagtgaagacgtgcctcggcctcctgacactgtcagtactgggaaaggtggaaagaattctgaggctcagttggaagatgaggaagaagaggaggaagatggactttcagaggagtgcgaggaggaggaatcagagagttttgcagacatgatgaagcatggactcactgaggctgacgtaggcatcaccaagtttgtgagttctcatcaagggttctcgggaatcttaaaagaaagatactccgacttcgttgttcatgaaataggaaaagatggacggatcagccatttgaatgacttgtccattccagtggatgaggaggacccttcagaagacatatttacagttttgacagctgaagaaaagcagcgattggaagagctccagctgttcaaaaataaggaaaccagtgttgccattgaggttatcgaggacaccaaagagaaaagaaccatcatccatcaggctatcaaatctctgtttccaggattagagacaaaaacagaggatagggaggggaagaaatacattgtagcctaccacgcagctgggaaaaaggctttggcaaatccaagaaaacattcttggccaaaatctaggggaagttactgccacttcgtactatataaggaaaacaaagacaccatggatgctattaatgtactctccaaatacttaagagtcaagccaaatatattctcctacatgggaaccaaagataaaagggctataacagttcaagaaattgctgttctcaaaataactgcacaaagacttgcccacctgaataagtgcttgatgaactttaagctagggaatttcagctatcaaaaaaacccactgaaattgggagagcttcaaggaaaccacttcactgttgttctcagaaatataacaggaactgatgaccaagtacagcaagctatgaactctctcaaggagattggatttattaactactatggaatgcaaagatttggaaccacagctgtccctacgtatcaggttggaagagctatactacaaaattcctggacagaagtcatggatttaatattgaaaccccgctctggagctgaaaagggctacttggttaaatgcagagaagaatgggcaaagaccaaagacccaactgctgccctcagaaaactacctgtcaaaagatacccagaaataatcgcttaatgtatattcatagctaccaaagctatgtgtggaataacatggtaagcaagaggatagaagactatggactaaaacctgttccaggggacctcgttctcaaaggagccacagccacctatattgaggaagatgatgttaataattactctatccatgatgtggtaatgcccttgcctggtttcgatgttatctacccaaagcataaaattcaagaagcctacagggaaatgctcacagctgacaatcttgatattgacaacatgagacacaaaattcgagattattccttgtcaggggcctaccgaaagatcattattcgtcctcagaatgttagctgacggagtttcactagtcacccaggctggagcacaatagcatgatctcggctcactgcaacttctgcctcccaggttcaagcgattctcctgtctcagcttccagagtagctaggattacaggcacctgccaccacacctggataatttttgtatttttagtagaggcagggtttcaccatattggccaggctggtgtcaaactcctgacttcagggaagtcgttgcatatgatgatcccaaaattccacttttcaacacagatgtggacaacctagaagggaagacaccaccagtttttgcttctggtctcaatgaattatggaattataggaaagagccagcaggtggaatcctatccatggagaaaaagaagaggaagttgcacttagcccaacacatggtatgtaataaaggaaatcctggcaactggcaaacccacggtcaacaaaaagagcagggctgtgccaggaagccatctttagggtaattcattaaggaagcat

SEQ ID NO: 172322 - DNA, 13593 bp, Homo sapiens
  Payload ID: 13879
  Gene Symbol: PUS7L
  Gene Name: pseudouridylate synthase 7-like
  Uniprot ID: Q9H0K6
  ENST ID: ENST00000344862
  CDS Start-End: 105-2210
aattacgcccctgtcggaggctgaaacacttaaggcttccgggcatgcgcacagcgttgtgcaaatgaatgccttccactgaaccgaggcactgttatagaagaatggaagaagatacagattatagaatcaggtttagttctttgtgtttctttaatgatcacgttggatttcatggcactataaaaagctcaccaagtgactttattgttattgaaattgatgaacagggacagttagttaataagaccatcgatgagcctattttcaagattagtgaaatacaacttgagccaaataattttcccaaaaaaccaaaactagatcttcaaaatctgtccttagaagatggaagaaaccaagaagttcatactttgattaagtacactgatggtgaccaaaatcatcagtctggttcagaaaaggaagatactatcgttgatggaacttccaaatgtgaagaaaaagctgatgttttaagctcctttttggatgaaaaaactcatgagttactgaataattttgcctgtgatgtaagagagaagtggctttctaaaacagagctaattggactacctcctgaattctcaataggcagaatccttgacaaaaaccagagggctagtttacacagtgccattaggcagaaatttccatttttagtaactgtaggaaaaaacagtgaaattgttgtaaaaccaaatcttgaatataaagaactttgtcatttggtatctgaagaggaagcatttgacttttttaaatatttggatgcaaagaaagaaaattccaaatttacctttaaacctgatacaaacaaagaccacagaaaagctgtccaccattttgtcaacaaaaagtttggaaaccttgtggaaaccaaatctttttctaaaatgaattgcagtgctggtaatccgaatgtggtggtaacagtaagatttcgggaaaaagcacacaaacgtgggaaaaggcctctttctgaatgccaagaaggaaaagttatatatacagcttttaccctacgaaaggaaaacctggaaatgtttgaagcgattggttttttagctatcaaacttggtgttattccttcggattttagttatgcaggccttaaagacaagaaagccatcacctatcaagcaatggttgttagaaaagtgactccagagaggttgaaaaatattgaaaaagaaattgaaaagaaaagaatgaatgtctttaatattcggtctgtagatgattccctgagacttggtcagctcaaaggaaatcactttgatattgtcattagaaatttaaaaaaacaaataaatgattctgcaaacctgagggagagaattatggaagcaatagaaaatgttaagaaaaaaggctttgtgaattactatggaccacagagatttgggaagggaaggaaagttcacacagaccaaattggactagctttgctgaagaatgaaatgatgaaagccataaaattgtttcttacaccagaagacttggatgatcctgtaaatagagcaaagaagtattttcttcaaactgaggatgctaaaggcacactttcattgatgcctgaattcaaagtgcgtgagagagcattgttggaggcattgcaccgctttggcatgaccgaggaaggttgtatccaggcatggttctctttaccccattccatgcgcatattctatgttcacgcatataccagcaaaatttggaatgaggcagtatcttacagacttgaaacctatggagcaagagtagtgcagggtgatttggtctgtttggatgaagacattgatgacgagaatttcccaaatagtaaaattcacctggtaactgaagaggagggatcagctaatatgtatgcaatacatcaggtggttcttccagtacttggatacaatattcagtacccgaagaacaaagtagggcagtggtaccatgacatacttagcagagatggactacagacatgtaggtttaaagtacctactctgaaactgaatataccaggttgctatagacagattttgaaacatccctgtaatctctcataccaactaatggaagatcatgacattgatgtcaaaacgaaaggttcccacattgatgaaacagctttgtctcttttgatctcttttgatcttgatgcttcatgctatgctaccgtttgtctgaaggaaataatgaagcatgacgtttaaaactgatacccttggtataaccatatatatgtcactctttgaaggaaagggggctaaaatgtcttaagcaccttccatgtgttaggaacttcataattgttatctcttttaattttcacagcatcctgagaagttaggatttgatactgtaattttatagaggatatgtaagtgtcagggtccaaatttaaggtccatgtgaccccaaagcctgtgttttttttctattatatgtttcagtgacctttattctgtgtcataaagttacaatcttttaaaaccattaggaatatatataatactgcaagataacatttaagaaaaaaagttgtgaatattcatatcctccagctccttgcttagaacactagtaaaattaggtcgcagtgaagcaaatgttggagagaaagatagatgaagcattttgctaattattattgtccccctttcctgtttttgaaattattgatcagaacaatatacaagggaaatgccatacctctgtttgtgatagataccccagagtagttattacctctttgtgagataagtaatctttgatgaagattgaaatacaatttctcatccaatttttatatcttggcatacgctgaccctcttgaccatttgtaattttttcatattatctaaaacaggtgttagagtcagacagattcattcttagattctagctctgacacttactagtgattttgagtatgttgttgatttttttgtgtgtggttactgatagaatcaagacaattacaacttcataaatgacaaataataggattatctccacattttctgttgctggaggaacaaaacattgtgcccatttgaaaattttaatttttgttggtttaactatcccacattataaatcatccttcaccattttatatcagttaaatatgggtgtgttggggaggaatgactggcatgtagacatgtattgatttaggaagatctgagcatttctttcattgttggtaagatataatgatgaaatttaaaaagcagtatggagcattatatatcagtaatgtgatatatatacttaagccagtttaaccattttgggaaatgttagcattaggaaataaaatccaaaagaaggaagagaagctatatgcaatgcaaaatttgcttattgcaatattttcatatacagacactaaaaacagttttcaaagtccagcattacgtaactaaagtaagtaaaatgatgtgtatcaacttgatggtaaaatatgtagttatttaaaaaagcaatgaacaatttagtttcatgagaaaatgttgccccctaaaagtagaacacatatgttacaactgcaataatactctgaattcatctttcacaaataagagacatgttagcatagtgattaaaagcacagatattggagacaaactaacccagtttgaaccctggcactgccacgtatagcactgcagccttgggaaagttatttaaactcatgggcttcagtttcaacatctgtaaaatgggcatgttaacattgcctacctcataggattactgtgagaattttctaagttaatatatgtaaagcaactttaaaaagtgcctggcacttagttattgttaagtaagtgtctgcagatgcaagtttggaagagaaaagcaaataaatgaaaatcccttcctgttaagatgatggggtatttggattttttttaatactaaaaagttttttttgttatatgttttggcaataaataattctcaatacacaaaattggatattgtagtaccattgattttctttggattactgccatcattttaatgttatattgagaatgaagtgatcctctattaggtagtaaaaaaaatttagaaaaaatgttttattttatatgataaatcgtatcctataaatgtaatcataaaatgagttatatacattattaaatcctagtttttaaaagttttgaatagcaatcagaaaatacgaaagcatgaaaatatatcattgattttactttttttgcctgcagatggcactataattttagacatttattgatttatttagtaaatacttcagcagtgtataaaggaacactaagtttatttcatcaccataaaatgtattgagatatcattcatgtggaatattattttatatgccaataagatgccatgttaaactttttttgtttaaggacttttattattaatagtatgctttggaccaactgatgactagtcacttaggtttttgcagttttgctggggcatttcagaccttcataagcatgatctttggattagttttttttttttcttcacctcattattaggagttaatttatttttaaagtgtcatcttaaactgcaaggatgtcctttaaacatcacatgccaattaaacatgccgaaggagaagctgtgtcatcaaaatgcccacttaacctacccaaacatctcaaacctaccctttgctgaccttctatagccccatttccaaagttttgctttatttttattttttcttccaacttttattttaggtttaggggtacatgtgcaggtttgttacatgggtaaattgcattttgtgggagttctgcatacaaattatttaatcacccagataatgagcatagtacctgataggttgtttttctatcctcatctttctcccaccctccaccctcaagtaggccatggtgcctattgttcccttcttagagtccaagtgtactcaaagttcagctcccacttatgagtaagaacatttggtatttggttttctgttcctgcattaatttgcttacaataatggcctccagctacatccatgttgctggaaagacattattttgttcttttttatgactgtgtagtattatctggtatacatgtactacattttctttatccagtccactgtaatgggcatctaggttggttccatgtctttgctattgtcaatagtgctgtaatgaacataggcgtgcatggtctttatggtagaacaatttatattcctttgggtatataaccaataatgggattgctgggtcaaatggtatgtctgctttaagttctttgagaaatcttcaaactgctttccacagaggctgaactaatttatattcccatcagcagtgtatagcattcccttttctctgcagcctccccaacatctgttattttttgactttttaataacagccattctgactggtgtgagatggtatctcgttgtggttttgatttgcatttccctaatgattagtgatgttcagcattttttcatatgcttttggcccatggatgtcttcttttgagaagtgtctgttcatgtcctttcttccgtttttaatgggataattttttgcttgttaagttcttcatagattctggatatcagacctttgttcatgcatactttgaaaatattctctcccattctgtagattgtcagtttactctgttgatagtttctttggctgtgcagaagctatttagtttaattaggtcccacttgtcaatttttttttttttttagatggagtttccttctgtcacccaggctggagtgcagtggtgcaatctcggctcactgcaacctcctcctcctgggttcaagccattctcctgccccagcctctcaagtagctgggattacaagtggccaccaccacacctggctaatttttgtatttttattagagacggggtttcaccatgttggccaggctggtctcaaactcttgacctcaagtgatctacccacctcggcctcagaaagtgctaggattacaggcatgagccaccatgcccagccttcacttgtcaattattggctttgttccagttgcttttggagtctgtcatgatatctttgttaggtcttttgtccagaatgatatttcctaggttttcttctagggtttttatagttttaggttttacatttacattgttaacccatcttgagttgatttttgtatatggtaaaaagaaggggtccagtttcaatcctcaggatgtggctaaccagttatcccagcaccatttattaaatagggagtcctttccctgttgcttgttattgttgactttaacaaaaatcaagtagctgtaggtgtgtggcctttatttctgggttctctaacctgttccattggtctatgtgtctgtttttgtaccagtaccatgctgttttggttactatagccttgtagtttagtttgatgtcaggttgtgtgatgcctccctcattgctatatttgaattagttttaattgccaaggttgtttgacgctgagctagcagtagtgcctgggagtcggttaggtgaaacaaattgaggtcttttactaatattaaaattaaaacaccttgattttttttttgtgagctgtaaaaaactgaaagtcatgtaacttttgatttaactaacattttctgagtatctattatgtcagtatctcacactttaatccatattcccaccctgtgtggaggtattatcttcccttatttgcagattggaaacatacctgagtagtttactaacctaatcaaggtcaaacaaaatagcgtgtggttgagcttgattatgcttcttaaatcagtactgttttcatctacctaacatttgccttctgagaacaagtttttggatattaacttccatttaggccaggcacggtggctcacgcctgtaatcccaacactttggggaggccaagacgagtggatcacgaggtcaggagttcaagaccagcctggccaagatgctgaaaccctgtctctactaaaaataaaaaaattagctgggctacttgggaggctgaggctggagaatcgcttgaacccgggaggtggaggttgcagtgagccgagattgcccagcctaggtgacagagcgaggctccacctcaaaaaaaaaaaaaaactaaactaaaaattaaaatataacttccatttctaccaacttgatataacttgccattgatttaataggcatattggggcatgtcttgggagagacaagataccttttgattctgagaccaaaatataaagtaaaggggatcccttcaggaaatccccaaatcattttggagttttcccaaagtattttgggatttgtatcataataatatgtaaaatcattatagatcataggaggtgttttagatggtacctggcacaaatatcattgaaaaagcatagtgagaaacttgttctttttcaatatactttcagtcctcacatcaatcattctgtttaaggaaggagaaagctgattgatactatttacatatatcaacattggctgatttacctttttagccaactatgcaggcctcaggctcagaaacatcagcagtcaacaatataatatgtagctagaatgtaataggattgcattgttttattgaatttatcttcccttttatttatggtaatcaattctggcttcctgtttatgtgatggtattatgtttcctttaaaactaaatttaattttaaagaggtagaatcaatttaaaggtattaaataaataatagtatagacatagcagtaattatgataccaatacatgaaggattagagtatgggaaatatactggtacagttgagaatccctgaaatcagagatgggctctaccactgctttaatatgcgactttagtaacccactgattctgttgtagaattcttggacttgaagtactgttagttatcatttttcagtccaggatagtattgcatcaaacaaaattatgaaatatatacaaatttgagacattatgagcagaggcattgatgaccacatgctatatcttaaaattttactgatagttgattttagcaagtcttatgaaacactaagaacaatgtctggtgcctagcaaattctcagtaaatttcagctagtattattacagttagtattactttactatgctccctgataaaatttttataataaaatggttaatgactttccattgaggtctgatctgacttagttttagcataaagtaattacaattcatatttttagaggtttttttttttgtagtagtagaaacaactatttctaaatctggggattcagtagttcattcaaattaggatctttaagagctgtctaggtcaatgttccttaacgttttctacctgggagtaatctttaagagaacaaaaagaaaatgaaactctatataatttaatgcaaagtcttttacattaatgtaagggtaggaaaagaggttggaggaagatatggggaggtaggaaaatgggacttttttcctccatttacttttgatgtttgaatttcaaacatgagtatatttgtgtattattttgcggttaaaaacactgaagattgcataaagatcaaagagggaaatttaagggaattaatgggttatgattgcatttgttcagaatggttttggtggctcatgacaacattttgagagagagagattttaatggcaccaatggcagctaggataactagtttaaagtttagggcctgtgttaatagattttgctttctagtttcagaaagattctcttatagtactgttttaatctgtttttctaagccctctgatttatgtatatttaataggccacaaaataatgtcaaatatatggcataataaccaacaaatatttgaataagtgaaaggtactctacaaaatgctatgggaaagacaaaaataaataatatccctttctttgagggattaacagtgttaatatcccttgttttcatttgatttgaaatgccacttgcaagtggaatatgcagactaaatggtaaagagaaaaacaagcagcatcttttcatttcacttacagctcactgtatgaccaataatatgttacttgacctctcagcactccattctaaatccttaaatgatacttatttagcatttctaagcatcttgagatctcctcttaaaatatgctttgaactattcagtctaaatgctgctttctaaaaagctactagtttaaagaatgggaaatggtgttaatggagttaatcttgtgtaatttcagtgtgggttgtcaagaatacctctaagtaaagaaaatgactctaatcttcttaagcaattcattttctcagcaactttgaggcaggagttaatttactctgcctgtgtacataggccatctcttacaaaagaaaaattttactatggaaagaagtcagaatagccatgaaattatttaaatttagtctttagaacatattacaaaatataagatatattaaattgtcttttttgttagaaactcaactaccaatgtagaaataaaactcctgttgcaaggatggagtttagccatggagtcaaaacaagagctatttggttattttaaaagagaagagatcaaagagctggtcactccttaactaagggtgtttgggcagcaggatagggtgaagagtggagggggttgaactcaattctttatgcttttataccaagcctcccttttctaataagccttactggcatttccttagactagttaagtcaggattctgagtttttcagtacaatagggttttaatctgagctgatcattgtttccaatgcctcccctgtggcaggggaacataaaggactagtgttcttttctaaaaagggaagatggatattttttctataacctttataattccattataataaaatgaatgataggttataataaaatgaattttttgcatatgattttcaaaaggaaactaatttatttttctataaaatatcgcaaaggaatcgaatacatttttattctatgtaaataataatataattttcacatttaggaggcaatagcaaatctgggaagcagttattctaagttggaagagcattatcccaatgcattgaaaacatttgatgactattttttatgtcttctttattttgatgattataataatgttctaactgggtggccttcgtttttcactctagtcagtccatcttgtttactatgtcaattgttctccaaaaagtagaaatgtcattgttttggggccatagaacatttcagaagctttccagtatctatgcagtaacagtccaaacccctcaacataacacatttacacctgcaagtatggccccaaatcttcaagtggcttctgtcactactccatagtacataccctttgttacagctgtttcacaaatacaggttgaatatcccttatctaaaatgtttgggactaaaagtttcagatttcagatatgtttggattttggaatatttgtacatgtataatgagatactcttagagttgggacccaagtctaaacaaaattcatttatgtttcatatataccttatacacataacctgaaggtaatttatttttcccttgggaacactgaatagactatatgttgtgcacctacattttgactgtgacctatcacatgaagtcaggtgtggaattttccatttgtggcatcatgtcagtactcaaaaagttttggattttggattttgaattttcagattagagatgctcagcctaatagcaaatgttcccatgttatacacctcaacctcccattcccattggctggaacatctctgcttatattaaatgtcttttatgtgaaatctgtgttctcatagccttttgtatagttctctaccatctcatggctcacattgtattgtacttatttgattaaatatctggatcatctactgtgaattattcaagagcattgatctttatacctctggcacctatcagtgcctgacatataacagggttaaaaatgctgagtgaatactgcaaatataccttagcaaatttatttgctgaatacacatctcaagaaagttctgaaatagttatttcccctcatagaaagtttagagtattaaaattgggtatctttataatgctttttcttttgtaatactttcatctttgccttttattgaaatattaaatgcattgtagaatttgatttaaaatttagaacaagctgtcaggtatgataactagtctcatttaacaaatgaggattccagggcttgaagaagttaagtagcttcctctagattgtaaagagagtctaacctggccctttttggttttaagggcatgatgataaccacttgctctactgatttctaatggaaagtgcttcagttttccactttgcctagctagtgattatttaatatctgcttatctctgaatttatctgcatatttctaaaactttatgacattaaggaaagttggggaaaattcactttaagtgttgtaatgacaatagctatcaatcattgagtactgtgtactaagcattttatattttatcaacaagtacttacatgtgggataagtactgttattattttcattttatagatgaggacacatatagaatgcagttaggaaactagagaaagagaaaacatggagaattatctggaactaataagacagtaaagtacagatttaagaagttcagtgaatcccaagcagtgtaaattaaaaaactacattgagatacatcatagtgaatatgcaaaacatcaataataaaaagaaaaaccttaaaggcagctttaacagtatactgaatgaccaatatactcagcagccacagaacctctattcttttaaagcatccatgggacatttatagaaattgactatgcactggactataagcatatgcaataaaatttcaaatgactgaaaccatatgagtatattcttttgccacaacacaattaggctagaaatgaacaacaaaaagataacaggaaaatctctatatatcagaaattaagagatgcacttatttattttttgttttttgtgatggagtctcactctatcacccgtgcagtggcacgatcttggctcactgcaacctctgcctcttgggttcaagtgattctcctgtatcagcctcccaaggagctaggattacaggcgtgtgccaccatacccagctaatttttgtatttttattagagatgggatttcaccatgttggccatgctggtctcaaactcctgacctcaaatgatctgccagcctcagcctcccaaaatgctgggattacagatgaagagatacacttctaagtaatctatatgtcaagtaagacaaaatgaaattagaaaatatttttaagtcaatgatattaaaccatactacacatcaaaacttgtgggatgcacttaaagcagcatgtagagggagattatattcataaatgcttatggtagaaaagaaggaagtctgtacattatgtagctatgcacccatctaaagaagttaggaaaatgacatcaagtagaacatcaaaagaaagaaggaaaggataacttaaaacagaaatgaatgaaataaaaccagaatagaagagacgatctacaaatccaaaagttggtttgttgaaaatactagtagagctgacatacttgtggtgagactgatggaaataatgcagttacaactaaccaatatcataattggaaaggaaatcactataggtgctgtaaaaattaaaaagataatagaatattatgaacaattttctgccaatattattgaaagtttagataaaatggaaaattcatttaaaaatataatttgacagtattatgttatgtgaatactataatgataatcctgtaatcattaaatgaaccagtagtttaaaatttttccatatagggaaggtcagggccagatgtgttcaatggttggttctactagacattcaaaaaaataataattcaagtctacacaaactttcctgagattagaaaaaataaagaagagtccccccacctgtttcttactttatgagaccacacctaaaagatagaagactgctttgcaaccaagaaatccttcatgaacacctctttaatcacaagtcctcaactccaaggttagctttatttcaacttttataatacttttcttacttttcttgatagctttaccacccatgtattcattcctaaaaaatacacagttttgtctgattttgaattttatgtgaatggaattgtacatatctgtgtttgtgtcttccttgttttactcaatactgtttctgagatcaatcacattatttgttaatattttgtttaggatttttgcatctctatttcagtgtgtgtttggaatgtaaatttccattctcagactatcttttggcctgaatttggttacatgagtatatgttctaaaaatattacttacactttcaataaattttaaggacttttatattgttatgtatcaaattttttagaatgcaagaataaatattataaaacat

SEQ ID NO: 172323 - DNA, 1873 bp, Homo sapiens
  Payload ID: 13879
  Gene Symbol: PUS7L
  Gene Name: pseudouridylate synthase 7-like
  Uniprot ID: Q9H0K6
  ENST ID: ENST00000431332
  CDS Start-End: 94-1260
aacacttaaggcttccgggcatgcgcacagcgttgtgcaaatgaatgccttccactgaaccgagcttttaccctacgaaaggaaaacctggaaatgtttgaagcgattggttttttagctatcaaacttggtgttattccttcggattttagttatgcaggccttaaagacaagaaagccatcacctatcaagcaatggttgttagaaaagtgactccagagaggttgaaaaatattgaaaaagaaattgaaaagaaaagaatgaatgtctttaatattcggtctgtagatgattccctgagacttggtcagctcaaaggaaatcactttgatattgtcattagaaatttaaaaaaacaaataaatgattctgcaaacctgagggagagaattatggaagcaatagaaaatgttaagaaaaaaggctttgtgaattactatggaccacagagatttgggaagggaaggaaagttcacacagaccaaattggactagctttgctgaagaatgaaatgatgaaagccataaaattgtttcttacaccagaagacttggatgatcctgtaaatagagcaaagaagtattttcttcaaactgaggatgctaaaggcacactttcattgatgcctgaattcaaagtgcgtgagagagcattgttggaggcattgcaccgctttggcatgaccgaggaaggttgtatccaggcatggttctctttaccccattccatgcgcatattctatgttcacgcatataccagcaaaatttggaatgaggcagtatcttacagacttgaaacctatggagcaagagtagtgcagggtgatttggtctgtttggatgaagacattgatgacgagaatttcccaaatagtaaaattcacctggtaactgaagaggagggatcagctaatatgtatgcaatacatcaggtggttcttccagtacttggatacaatattcagtacccgaagaacaaagtagggcagtggtaccatgacatacttagcagagatggactacagacatgtaggtttaaagtacctactctgaaactgaatataccaggttgctatagacagattttgaaacatccctgtaatctctcataccaactaatggaagatcatgacattgatgtcaaaacgaaaggttcccacattgatgaaacagctttgtctcttttgatctcttttgatcttgatgcttcatgctatgctaccgtttgtctgaaggaaataatgaagcatgacgtttaaaactgatacccttggtataaccatatatatgtcactctttgaaggaaagggggctaaaatgtcttaagcaccttccatgtgttaggaacttcataattgttatctcttttaattttcacagcatcctgagaagttaggatttgatactgtaattttatagaggatatgtaagtgtcagggtccaaatttaaggtccatgtgaccccaaagcctgtgttttttttctattatatgtttcagtgacctttattctgtgtcataaagttacaatcttttaaaaccattaggaatatatataatactgcaagataacatttaagaaaaaaagttgtgaatattcatatcctccagctccttgcttagaacactagtaaaattaggtcgcagtgaagcaaatgttggagagaaagatagatgaagcattttgctaattattattgtccccctttcctgtttttgaaattattgatcagaacaatatacaagggaaatgccatacctctgtttgtgatagataccccagagtagttattacctctttgtgagataagtaatctttgatgaagattgaaatacaatttctcatccaatttttatatcttggcatacgctg

SEQ ID NO: 172324 - DNA, 4364 bp, Homo sapiens
  Payload ID: 13879
  Gene Symbol: PUS7L
  Gene Name: pseudouridylate synthase 7-like
  Uniprot ID: Q9H0K6
  ENST ID: ENST00000416848
  CDS Start-End: 490-2595
tgcaaatgaatgccttccactgaaccgaggtagacggggtcgagtttcttgcgcgatggtgggcttgtatgtgtgtgtgtgtgtgtgtgtgtggggggggggggtgacgaggttggcattgaggatccataccctttgcgcccaaagaaaggtgacgtggactagtgtcgtgcctttggacaggcagagtaagaggagggagaagaaacaggtagagctgctggccttgtcggggacacctttggacgtgctggagggcaacgacgccctagttttctgtgaagttaagtagcttctgcaggactgggttcagtatttctagtaccttctcaggatccctcctccgccaacgaattcctcaaccacgggccaagcaaactactcccccgcccactgtcagcagcagtctctgttgaatgggaatactgcaccttcaggcttaacgccacgtgggctcctttgctgtcctccaggcactgttatagaagaatggaagaagatacagattatagaatcaggtttagttctttgtgtttctttaatgatcacgttggatttcatggcactataaaaagctcaccaagtgactttattgttattgaaattgatgaacagggacagttagttaataagaccatcgatgagcctattttcaagattagtgaaatacaacttgagccaaataattttcccaaaaaaccaaaactagatcttcaaaatctgtccttagaagatggaagaaaccaagaagttcatactttgattaagtacactgatggtgaccaaaatcatcagtctggttcagaaaaggaagatactatcgttgatggaacttccaaatgtgaagaaaaagctgatgttttaagctcctttttggatgaaaaaactcatgagttactgaataattttgcctgtgatgtaagagagaagtggctttctaaaacagagctaattggactacctcctgaattctcaataggcagaatccttgacaaaaaccagagggctagtttacacagtgccattaggcagaaatttccatttttagtaactgtaggaaaaaacagtgaaattgttgtaaaaccaaatcttgaatataaagaactttgtcatttggtatctgaagaggaagcatttgacttttttaaatatttggatgcaaagaaagaaaattccaaatttacctttaaacctgatacaaacaaagaccacagaaaagctgtccaccattttgtcaacaaaaagtttggaaaccttgtggaaaccaaatctttttctaaaatgaattgcagtgctggtaatccgaatgtggtggtaacagtaagatttcgggaaaaagcacacaaacgtgggaaaaggcctctttctgaatgccaagaaggaaaagttatatatacagcttttaccctacgaaaggaaaacctggaaatgtttgaagcgattggttttttagctatcaaacttggtgttattccttcggattttagttatgcaggccttaaagacaagaaagccatcacctatcaagcaatggttgttagaaaagtgactccagagaggttgaaaaatattgaaaaagaaattgaaaagaaaagaatgaatgtctttaatattcggtctgtagatgattccctgagacttggtcagctcaaaggaaatcactttgatattgtcattagaaatttaaaaaaacaaataaatgattctgcaaacctgagggagagaattatggaagcaatagaaaatgttaagaaaaaaggctttgtgaattactatggaccacagagatttgggaagggaaggaaagttcacacagaccaaattggactagctttgctgaagaatgaaatgatgaaagccataaaattgtttcttacaccagaagacttggatgatcctgtaaatagagcaaagaagtattttcttcaaactgaggatgctaaaggcacactttcattgatgcctgaattcaaagtgcgtgagagagcattgttggaggcattgcaccgctttggcatgaccgaggaaggttgtatccaggcatggttctctttaccccattccatgcgcatattctatgttcacgcatataccagcaaaatttggaatgaggcagtatcttacagacttgaaacctatggagcaagagtagtgcagggtgatttggtctgtttggatgaagacattgatgacgagaatttcccaaatagtaaaattcacctggtaactgaagaggagggatcagctaatatgtatgcaatacatcaggtggttcttccagtacttggatacaatattcagtacccgaagaacaaagtagggcagtggtaccatgacatacttagcagagatggactacagacatgtaggtttaaagtacctactctgaaactgaatataccaggttgctatagacagattttgaaacatccctgtaatctctcataccaactaatggaagatcatgacattgatgtcaaaacgaaaggttcccacattgatgaaacagctttgtctcttttgatctcttttgatcttgatgcttcatgctatgctaccgtttgtctgaaggaaataatgaagcatgacgtttaaaactgatacccttggtataaccatatatatgtcactctttgaaggaaagggggctaaaatgtcttaagcaccttccatgtgttaggaacttcataattgttatctcttttaattttcacagcatcctgagaagttaggatttgatactgtaattttatagaggatatgtaagtgtcagggtccaaatttaaggtccatgtgaccccaaagcctgtgttttttttctattatatgtttcagtgacctttattctgtgtcataaagttacaatcttttaaaaccattaggaatatatataatactgcaagataacatttaagaaaaaaagttgtgaatattcatatcctccagctccttgcttagaacactagtaaaattaggtcgcagtgaagcaaatgttggagagaaagatagatgaagcattttgctaattattattgtccccctttcctgtttttgaaattattgatcagaacaatatacaagggaaatgccatacctctgtttgtgatagataccccagagtagttattacctctttgtgagataagtaatctttgatgaagattgaaatacaatttctcatccaatttttatatcttggcatacgctgaccctcttgaccatttgtaattttttcatattatctaaaacaggtgttagagtcagacagattcattcttagattctagctctgacacttactagtgattttgagtatgttgttgatttttttgtgtgtggttactgatagaatcaagacaattacaacttcataaatgacaaataataggattatctccacattttctgttgctggaggaacaaaacattgtgcccatttgaaaattttaatttttgttggtttaactatcccacattataaatcatccttcaccattttatatcagttaaatatgggtgtgttggggaggaatgactggcatgtagacatgtattgatttaggaagatctgagcatttctttcattgttggtaagatataatgatgaaatttaaaaagcagtatggagcattatatatcagtaatgtgatatatatacttaagccagtttaaccattttgggaaatgttagcattaggaaataaaatccaaaagaaggaagagaagctatatgcaatgcaaaatttgcttattgcaatattttcatatacagacactaaaaacagttttcaaagtccagcattacgtaactaaagtaagtaaaatgatgtgtatcaacttgatggtaaaatatgtagttatttaaaaaagcaatgaacaatttagtttcatgagaaaatgttgccccctaaaagtagaacacatatgttacaactgcaataatactctgaattcatctttcacaaataagagacatgttagcatagtgattaaaagcacagatattggagacaaactaacccagtttgaaccctggcactgccacgtatagcactgcagccttgggaaagttatttaaactcatgggcttcagtttcaacatctgtaaaatgggcatgttaacattgcctacctcataggattactgtgagaattttctaagttaatatatgtaaagcaactttaaaaagtgcctggcacttagttattgttaagtaagtgtctgcagatgcaagtttggaagagaaaagcaaataaatgaaaatcccttcctgttaagatgatggggtatttggattttttttaatactaaaaagttttttttgttatatgttttggcaataaataattctcaatacacaaaa

SEQ ID NO: 172325 - DNA, 1149 bp, Homo sapiens
  Payload ID: 13879
  Gene Symbol: PUS7L
  Gene Name: pseudouridylate synthase 7-like
  ENST ID: ENST00000553166
  CDS Start-End: 55-1149
acagcgttgtgcaaatgaatgccttccactgaaccgaggcactgttatagaagaatggaagaagatacagattatagaatcaggtttagttctttgtgtttctttaatgatcacgttggatttcatggcactataaaaagctcaccaagtgactttattgttattgaaattgatgaacagggacagttagttaataagaccatcgatgagcctattttcaagattagtgaaatacaacttgagccaaataattttcccaaaaaaccaaaactagatcttcaaaatctgtccttagaagatggaagaaaccaagaagttcatactttgattaagtacactgatggtgaccaaaatcatcagtctggttcagaaaaggaagatactatcgttgatggaacttccaaatgtgaagaaaaagctgatgttttaagctcctttttggatgaaaaaactcatgagttactgaataattttgcctgtgatgtaagagagaagtggctttctaaaacagagctaattggactacctcctgaattctcaataggcagaatccttgacaaaaaccagagggctagtttacacagtgccattaggcagaaatttccatttttagtaactgtaggaaaaaacagtgaaattgttgtaaaaccaaatcttgaatataaagaactttgtcatttggtatctgaagaggaagcatttgacttttttaaatatttggatgcaaagaaagaaaattccaaatttacctttaaacctgatacaaacaaagaccacagaaaagctgtccaccattttgtcaacaaaaagtttggaaaccttgtggaaaccaaatctttttctaaaatgaattgcagtgctggtaatccgaatgtggtggtaacagtaagatttcgggaaaaagcacacaaacgtgggaaaaggcctctttctgaatgccaagaaggaaaagttatatatacagcttttaccctacgaaaggaaaacctggaaatgtttgaagcgattggttttttagctatcaaacttggtgttattccttcggattttagttatgcaggccttaaagacaagaaagccatcacctatcaagcaatggttgttagaaaagtgactccagagaggttgaaaaatattgaaaaagaaatt

SEQ ID NO: 172326 - DNA, 3313 bp, Homo sapiens
  Payload ID: 13879
  Gene Symbol: PUS7L
  Gene Name: pseudouridylate synthase 7-like
  Uniprot ID: Q9H0K6
  ENST ID: ENST00000551923
  CDS Start-End: 90-2195
atgcgcacagcgttgtgcaaatgaatgccttccactgaaccgaggtagacggggtcgagtttcttgcgcgatggcactgttatagaagaatggaagaagatacagattatagaatcaggtttagttctttgtgtttctttaatgatcacgttggatttcatggcactataaaaagctcaccaagtgactttattgttattgaaattgatgaacagggacagttagttaataagaccatcgatgagcctattttcaagattagtgaaatacaacttgagccaaataattttcccaaaaaaccaaaactagatcttcaaaatctgtccttagaagatggaagaaaccaagaagttcatactttgattaagtacactgatggtgaccaaaatcatcagtctggttcagaaaaggaagatactatcgttgatggaacttccaaatgtgaagaaaaagctgatgttttaagctcctttttggatgaaaaaactcatgagttactgaataattttgcctgtgatgtaagagagaagtggctttctaaaacagagctaattggactacctcctgaattctcaataggcagaatccttgacaaaaaccagagggctagtttacacagtgccattaggcagaaatttccatttttagtaactgtaggaaaaaacagtgaaattgttgtaaaaccaaatcttgaatataaagaactttgtcatttggtatctgaagaggaagcatttgacttttttaaatatttggatgcaaagaaagaaaattccaaatttacctttaaacctgatacaaacaaagaccacagaaaagctgtccaccattttgtcaacaaaaagtttggaaaccttgtggaaaccaaatctttttctaaaatgaattgcagtgctggtaatccgaatgtggtggtaacagtaagatttcgggaaaaagcacacaaacgtgggaaaaggcctctttctgaatgccaagaaggaaaagttatatatacagcttttaccctacgaaaggaaaacctggaaatgtttgaagcgattggttttttagctatcaaacttggtgttattccttcggattttagttatgcaggccttaaagacaagaaagccatcacctatcaagcaatggttgttagaaaagtgactccagagaggttgaaaaatattgaaaaagaaattgaaaagaaaagaatgaatgtctttaatattcggtctgtagatgattccctgagacttggtcagctcaaaggaaatcactttgatattgtcattagaaatttaaaaaaacaaataaatgattctgcaaacctgagggagagaattatggaagcaatagaaaatgttaagaaaaaaggctttgtgaattactatggaccacagagatttgggaagggaaggaaagttcacacagaccaaattggactagctttgctgaagaatgaaatgatgaaagccataaaattgtttcttacaccagaagacttggatgatcctgtaaatagagcaaagaagtattttcttcaaactgaggatgctaaaggcacactttcattgatgcctgaattcaaagtgcgtgagagagcattgttggaggcattgcaccgctttggcatgaccgaggaaggttgtatccaggcatggttctctttaccccattccatgcgcatattctatgttcacgcatataccagcaaaatttggaatgaggcagtatcttacagacttgaaacctatggagcaagagtagtgcagggtgatttggtctgtttggatgaagacattgatgacgagaatttcccaaatagtaaaattcacctggtaactgaagaggagggatcagctaatatgtatgcaatacatcaggtggttcttccagtacttggatacaatattcagtacccgaagaacaaagtagggcagtggtaccatgacatacttagcagagatggactacagacatgtaggtttaaagtacctactctgaaactgaatataccaggttgctatagacagattttgaaacatccctgtaatctctcataccaactaatggaagatcatgacattgatgtcaaaacgaaaggttcccacattgatgaaacagctttgtctcttttgatctcttttgatcttgatgcttcatgctatgctaccgtttgtctgaaggaaataatgaagcatgacgtttaaaactgatacccttggtataaccatatatatgtcactctttgaaggaaagggggctaaaatgtcttaagcaccttccatgtgttaggaacttcataattgttatctcttttaattttcacagcatcctgagaagttaggatttgatactgtaattttatagaggatatgtaagtgtcagggtccaaatttaaggtccatgtgaccccaaagcctgtgttttttttctattatatgtttcagtgacctttattctgtgtcataaagttacaatcttttaaaaccattaggaatatatataatactgcaagataacatttaagaaaaaaagttgtgaatattcatatcctccagctccttgcttagaacactagtaaaattaggtcgcagtgaagcaaatgttggagagaaagatagatgaagcattttgctaattattattgtccccctttcctgtttttgaaattattgatcagaacaatatacaagggaaatgccatacctctgtttgtgatagataccccagagtagttattacctctttgtgagataagtaatctttgatgaagattgaaatacaatttctcatccaatttttatatcttggcatacgctgaccctcttgaccatttgtaattttttcatattatctaaaacaggtgttagagtcagacagattcattcttagattctagctctgacacttactagtgattttgagtatgttgttgatttttttgtgtgtggttactgatagaatcaagacaattacaacttcataaatgacaaataataggattatctccacattttctgttgctggaggaacaaaacattgtgcccatttgaaaattttaatttttgttggtttaactatcccacattataaatcatccttcaccattttatatcagttaaatatgggtgtgttggggaggaatgactggcatgtagacatgtattgatttaggaagatctgagcatttctttcattgttggtaagatataatgatgaaatttaaaaagcagtatggagcattatatatcagtaatgtgatatatatacttaagccagtttaaccattttgggaaatgttagcattaggaaataaaatccaaaa

SEQ ID NO: 172327 - DNA, 677 bp, Homo sapiens
  Payload ID: 13879
  Gene Symbol: PUS7L
  Gene Name: pseudouridylate synthase 7-like
  ENST ID: ENST00000550784
  CDS Start-End: 196-677
gtgcaaatgaatgccttccactgaaccgaggtagacggggtcgagtttcttgcgcgatgtgctggtaatccgaatgtggtggtaacagtaagatttcgggaaaaagcacacaaacgtgggaaaaggcctctttctgaatgccaagaaggaaaagttatatatacagcttttaccctacgaaaggaaaacctggaaatgtttgaagcgattggttttttagctatcaaacttggtgttattccttcggattttagttatgcaggccttaaagacaagaaagccatcacctatcaagcaatggttgttagaaaagtgactccagagaggttgaaaaatattgaaaaagaaattgaaaagaaaagaatgaatgtctttaatattcggtctgtagatgattccctgagacttggtcagctcaaaggaaatcactttgatattgtcattagaaatttaaaaaaacaaataaatgattctgcaaacctgagggagagaattatggaagcaatagaaaatgttaagaaaaaaggctttgtgaattactatggaccacagagatttgggaagggaaggaaagttcacacagaccaaattggactagctttgctgaagaatgaaatgatgaaagccataaaattgtttcttacaccagaagacttggatgatcctgtaaatagagc

SEQ ID NO: 172328 - DNA, 784 bp, Homo sapiens
  Payload ID: 13879
  Gene Symbol: PUS7L
  Gene Name: pseudouridylate synthase 7-like
  ENST ID: ENST00000549868
  CDS Start-End: 406-784
gtgcaaatgaatgccttccactgaaccgaggtagacggggtcgagtttcttgcgcgatggtgggcttgtgacgtggactagtgtcgtgcctttggacaggcagagtaagaggagggagaagaaacaggtagagctgctggccttgtcggggacacctttggacgtgctggagggcaacgacgccctagttttctgtgaagttaagtagcttctgcaggactgggttcagtatttctagtaccttctcaggatccctcctccgccaacgaattcctcaaccacgggccaagcaaactactcccccgcccactgtcagcagcagtctctgttgaatgggaatactgcaccttcaggcttaacgccacgtgggctcctttgctgtcctccaggcactgttatagaagaatggaagaagatacagattatagaatcaggtttagttctttgtgtttctttaatgatcacgttggatttcatggcactataaaaagctcaccaagtgactttattgttattgaaattgatgaacagggacagttagttaataagaccatcgatgagcctattttcaagattagtgaaatacaacttgagccaaataattttcccaaaaaaccaaaactagatcttcaaaatctgtccttagaagatggaagaaaccaagaagttcatactttgattaagtacactgatggtgaccaaaatcatcagtctggttcagaaaaggaagatactatcgttgatggaacttccaaatgtgaagaaaaagctgatgttttaagct

SEQ ID NO: 172329 - DNA, 566 bp, Homo sapiens
  Payload ID: 13879
  Gene Symbol: PUS7L
  Gene Name: pseudouridylate synthase 7-like
  ENST ID: ENST00000547156
  CDS Start-End: 105-566
gtgcaaatgaatgccttccactgaaccgaggcactgttatagaagaatggaagaagatacagattatagaatcagcttttaccctacgaaaggaaaacctggaaatgtttgaagcgattggttttttagctatcaaacttggtgttattccttcggattttagttatgcaggccttaaagacaagaaagccatcacctatcaagcaatggttgttagaaaagtgactccagagaggttgaaaaatattgaaaaagaaattgaaaagaaaagaatgaatgtctttaatattcggtctgtagatgattccctgagacttggtcagctcaaaggaaatcactttgatattgtcattagaaatttaaaaaaacaaataaatgattctgcaaacctgagggagagaattatggaagcaatagaaaatgttaagaaaaaaggctttgtgaattactatggaccacagagatttgggaagggaaggaaagttcacacagaccaaattggactagctttgctgaagaatgaaatgatgaaagccataaaattgtttcttacaccagaagacttg

SEQ ID NO: 172330 - DNA, 1287 bp, Homo sapiens
  Payload ID: 13880
  Gene Symbol: PUSL1
  Gene Name: pseudouridylate synthase-like 1
  Uniprot ID: Q8N0Z8
  ENST ID: ENST00000379031
  CDS Start-End: 78-989
gtgaccaggccgcgtccgcgcgcgcgcaggattcctgcgctggaggccgcctctgacgccaccggctgggctccgccatgagttcggcgccggcctcaggctccgtgcgcgcgcgctatcttgtgtacttccagtacgtgggcaccgactttaacggggtcgcggccgtcaggggcactcagcgcgccgtcggggtccagaactacctggaggaggccgccgagcggctgaattccgtggagccggtcaggttcaccatctccagccgcacggacgccggggtccacgccctgagcaacgcggcgcacctggacgtccagcgccgctcaggccggccgcccttcccgcccgaggtcctggccgaggccctcaacacacacctgcggcacccggccatcagggtcctgcgggccttccgagtgcccagcgacttccacgctcgtcacgcagccacgtcccggacctacctgtaccgcctggccactggctgtcaccggcgtgatgagctgccggtgtttgaacgcaacctatgctggactctcccggcagactgcctggatatggtcgccatgcaggaagccgcccagcacctcctcggcacacacgacttcagcgccttccagtccgctggcagcccggtgccgagccccgtgcgaacgctgcgccgggtctccgtttccccaggccaagccagccccttggtcacccccgaggagagcaggaagctgcggttctggaacctggagtttgagagccagtctttcctgtatagacaggtacggaggatgacggctgtgctggtggccgtggggctgggggctttggcacctgcccaggtgaagacgattctggagagccaagatcccctgggcaagcaccagacacgtgtagccccagcccacggcttattcctcaagtcagtgctgtacgggaacctcggtgctgcctcctgcaccctgcaggggccacagttcgggagccacggatgaccctggacactcaagccaaagttaggccacaccaggcccaaccctgtgctggtcaagccagggcagtcacagctgcttggggcccacagcactgctgcctggtctccacagtagcctccctgcccgggtcccagcaccctggatgcccgtctctgtcccaggcgggatggggcacagtgcaggacacagccatgtacaccaagaagagagtaccaagtagtcttttgttcagcttttactggaaactgctgtctaggaccacctgccctaaccaggaataaaggcaagacagcctgga

SEQ ID NO: 172331 - DNA, 877 bp, Homo sapiens
  Payload ID: 13880
  Gene Symbol: PUSL1
  Gene Name: pseudouridylate synthase-like 1
  ENST ID: ENST00000467712
  CDS Start-End: 501-877
aacgttcggggaaggaagcggccctggcctcagacggcggcggagaccccagggcagggcgcccccggtaacctccgcccgcttctgcccgcagcggggtcgcggccgtcaggggcactcagcgcgccgtcggggtccagaactacctggaggaggccgccgagcggctgaattccgtggagccggtcaggttcaccatctccagccgcacggacgccggggtccacgccctgagcaacgcggcgcacctggacgtccagcgccgctcaggccggccgcccttcccgcccgaggtcctggccgaggccctcaacacacacctgcggcacccggccatcagggtcctgcgggccttccgagtgcccagcgacttccacgctcgtcacgcagccacgtcccggacctacctgtaccgcctggccactggctgtcaccggcgtgatgagctgccggtgtttgaacgcaacctatgctggactctcccggcagactgcctggatatggtcgccatgcaggaagccgcccagcacctcctcggcacacacgacttcagcgccttccagtccgctggcagcccggtgccgagccccgtgcgaacgctgcgccgggtctccgtttccccaggccaagccagccccttggtcacccccgaggagagcaggaagctgcggttctggaacctggagtttgagagccagtctttcctgtatagacaggtacggaggatgacggctgtgctggtggccgtggggctgggggctttggcacctgcccaggtgaagacgattctggagagccaagatcccctgggcaagcaccagacacgtgtagccccagcccacggcttattcctcaagtcagtgctgtacgggaacct

SEQ ID NO: 172332 - DNA, 1408 bp, Homo sapiens
  Payload ID: 13881
  Gene Symbol: PSMC3IP
  Gene Name: PSMC3 interacting protein
  Uniprot ID: Q9P2W1
  ENST ID: ENST00000253789
  CDS Start-End: 146-763
ggagtccgggaggggtcgctttgctcctccggaaggcttccccttcagccaatcaccgttcgaggcccgcccccgtcgccggaaggagccgtcgccccgagcaactacaacgtccggctttctgagttgggtggcgggaaaggcgatgagtaaaggccgggcagaagctgcggcgggagccgccgggatcctcctgaggtacctgcaggagcagaaccggccctacagctcccaggatgtgttcgggaacctacagcgggaacacggactgggcaaggcggtggtggtgaagacgctggagcagctggcgcaacaaggcaagatcaaagagaagatgtacggcaagcagaagatctattttgcggatcaggaccagtttgacatggtgagtgatgctgaccttcaagtcctagatggcaaaatcgtggccctcactgctaaggtgcagagcttgcagcagagctgccgctacatggaggctgagatgcagaaagaaatccaggagttaaagaaggaatgcgctggctacagagagagattgaagaacattaaagcagctaccaatcatgtgactccagaagagaaagagcaggtgtacagagagaggcagaagtactgtaaggagtggaggaagaggaagaggatggctacagagctgtctgatgcaatacttgaaggataccccaagagcaagaagcagttctttgaggaagttgggatagagacggatgaagattacaacgtcacactcccagacccctgaggggcccacggtcaggactggtggggactgcaggatgtcagaagagtgagatgtcttgcactggctaccttgtttttggttggcttttgttgttgttcctgctactttcacctttaagcagagcagtcaggagacaagcataaaccagagcactgggtagagaggatgagggctggtggctgggggtagacccagcccatttcattgtctaaattgcagtagcttgaggttaacatttagacttggaacaatgctaaaggaaagcatttggcaatatttattataatttaattttatataaaaatatttaatttcctctggatagtcaaacctgccagatatcaaacctgaggaaggcagaagtgaatttggagaactagggtagagagaggttgctataaaacgagcatttggagggcccacggcttcactcaggacctgctgggcttgtgtaccccaggagcccttttaagtatcttttgtacgcttttcaccccacccccaagtcctgggagaaatgcaggcaacactgagacatgggagaggccaagatatgcttgacagaaagggtgattttgaggctcagttaatatttcaaaattgtaaccgtagcaaaactgcattggtatttagaaaaataaaaaa

SEQ ID NO: 172333 - DNA, 1416 bp, Homo sapiens
  Payload ID: 13881
  Gene Symbol: PSMC3IP
  Gene Name: PSMC3 interacting protein
  Uniprot ID: Q9P2W1
  ENST ID: ENST00000393795
  CDS Start-End: 110-763
cttccccttcagccaatcaccgttcgaggcccgcccccgtcgccggaaggagccgtcgccccgagcaactacaacgtccggctttctgagttgggtggcgggaaaggcgatgagtaaaggccgggcagaagctgcggcgggagccgccgggatcctcctgaggtacctgcaggagcagaaccggccctacagctcccaggatgtgttcgggaacctacagcgggaacacggactgggcaaggcggtggtggtgaagacgctggagcagctggcgcaacaaggcaagatcaaagagaagatgtacggcaagcagaagatctattttgcggatcaggaccagtttgacatggtgagtgatgctgaccttcaagtcctagatggcaaaatcgtggccctcactgctaaggtgcagagcttgcagcagagctgccgctacatggaggctgagctcaaggaattatctagtgccctgaccacaccagagatgcagaaagaaatccaggagttaaagaaggaatgcgctggctacagagagagattgaagaacattaaagcagctaccaatcatgtgactccagaagagaaagagcaggtgtacagagagaggcagaagtactgtaaggagtggaggaagaggaagaggatggctacagagctgtctgatgcaatacttgaaggataccccaagagcaagaagcagttctttgaggaagttgggatagagacggatgaagattacaacgtcacactcccagacccctgaggggcccacggtcaggactggtggggactgcaggatgtcagaagagtgagatgtcttgcactggctaccttgtttttggttggcttttgttgttgttcctgctactttcacctttaagcagagcagtcaggagacaagcataaaccagagcactgggtagagaggatgagggctggtggctgggggtagacccagcccatttcattgtctaaattgcagtagcttgaggttaacatttagacttggaacaatgctaaaggaaagcatttggcaatatttattataatttaattttatataaaaatatttaatttcctctggatagtcaaacctgccagatatcaaacctgaggaaggcagaagtgaatttggagaactagggtagagagaggttgctataaaacgagcatttggagggcccacggcttcactcaggacctgctgggcttgtgtaccccaggagcccttttaagtatcttttgtacgcttttcaccccacccccaagtcctgggagaaatgcaggcaacactgagacatgggagaggccaagatatgcttgacagaaagggtgattttgaggctcagttaatatttcaaaattgtaaccgtagcaaaactgcattggtatttagaaaaataaaaaatttccaat

SEQ ID NO: 172334 - DNA, 902 bp, Homo sapiens
  Payload ID: 13881
  Gene Symbol: PSMC3IP
  Gene Name: PSMC3 interacting protein
  ENST ID: ENST00000588544
  CDS Start-End: 110-367
cttccccttcagccaatcaccgttcgaggcccgcccccgtcgccggaaggagccgtcgccccgagcaactacaacgtccggctttctgagttgggtggcgggaaaggcgatgagtaaaggccgggcagaagctgcggcgggagccgccgggatcctcctgaggtacctgcaggagcagaaccggccctacagctcccaggatgtgttcgggaacctacagcgggaacacggactgggcaaggcggtggtggtgaagacgctggagcagctggcgcaacaaggcaagatcaaagagaagatgtacggcaagcagaagatctattttgcggatcaggtgaggagaacttgcgccgattgtcacccatgagagcccgacaacgggtgaatctactcctggtgtgaactctttggggacaaggccccccatggaaaactcacctgtcttaggccaccatccttaaatcaaggaccagtttgacatggtgagtgatgctgaccttcaagtcctagatggcaaaatcgtggccctcactgctaaggtgcagagcttgcagcagagctgccgctacatggaggctgagctcaaggaattatctagtgccctgaccacaccagagatgcagaaagaaatccaggagttaaagaaggaatgcgctggctacagagagagattgaagaacattaaagcagctaccaatcatgtgactccagaagagaaagagcaggtgtacagagagaggcagaagtactgtaaggagtggaggaagaggaagaggatggctacagagctgtctgatgcaatacttgaaggataccccaagagcaagaagcagttctttgaggaagttgggatagagacggatgaagattacaacgtcacactcccagacccctgaggggcc

SEQ ID NO: 172335 - DNA, 747 bp, Homo sapiens
  Payload ID: 13881
  Gene Symbol: PSMC3IP
  Gene Name: PSMC3 interacting protein
  ENST ID: ENST00000586337
  CDS Start-End: 3-257
cgatgagtaaaggccgggcagaagctgcggcgggagccgccgggatcctcctgaggtacctgcaggagcagaaccggccctacagctcccaggatgtgttcgggaacctacagcgggaacacggactgggcaaggcggtggtggtgaagacgctggagcagctggcgcaacaaggcaagatcaaagagaagatgtacggcaagcagaagatctattttgcggatcagaccctctggagactttggggaccagtttgacatggtgagtgatgctgaccttcaagtcctagatggcaaaatcgtggccctcactgctaaggtgcagagcttgcagcagagctgccgctacatggaggctgagctcaaggaattatctagtgccctgaccacaccagagatgcagaaagaaatccaggagttaaagaaggaatgcgctggctacagagagagattgaagaacattaaagcagctaccaatcatgtgactccagaagagaaagagcaggtgtacagagagaggcagaagtactgtaaggagtggaggaagaggaagaggatggctacagagctgtctgatgcaatacttgaaggataccccaagagcaagaagcagttctttgaggaagttgggatagagacggatgaagattacaacgtcacactcccagacccctgaggggcccacggtcaggactggtggggactgcaggatgtcagaagagtgagatgtcttgcactggctaccttg

SEQ ID NO: 172336 - DNA, 664 bp, Homo sapiens
  Payload ID: 13881
  Gene Symbol: PSMC3IP
  Gene Name: PSMC3 interacting protein
  Uniprot ID: Q9P2W1
  ENST ID: ENST00000590760
  CDS Start-End: 380-658
gggaaaggcgatgagtaaaggccgggcagaagctgcggcgggaggtaacggcgccgtgggcgcggggaagacccgggagggcagtgggtgaggaggtcggttgagtggccccctcccctgcctttctctccgtagccgccgggatcctcctgaggtacctgcaggagcagaaccggccctacagctcccaggatgtgttcgggaacctacagcgggaacacggactgggcaaggcggtggtggtgaagacgctggagcagctggcgcaacaaggcaagatcaaagagaagatgtacggcaagcagaagatctattttgcggatcaggaccagtttgacatgagctcaaggaattatctagtgccctgaccacaccagagatgcagaaagaaatccaggagttaaagaaggaatgcgctggctacagagagagattgaagaacattaaagcagctaccaatcatgtgactccagaagagaaagagcaggtgtacagagagaggcagaagtactgtaaggagtggaggaagaggaagaggatggctacagagctgtctgatgcaatacttgaaggataccccaagagcaagaagcagttctttgaggaagttgggatagagacggatgaagattacaacgtcacactcccagacccctgaggggcc

SEQ ID NO: 172337 - DNA, 1049 bp, Homo sapiens
  Payload ID: 13881
  Gene Symbol: PSMC3IP
  Gene Name: PSMC3 interacting protein
  ENST ID: ENST00000590931
  CDS Start-End: 110-460
cttccccttcagccaatcaccgttcgaggcccgcccccgtcgccggaaggagccgtcgccccgagcaactacaacgtccggctttctgagttgggtggcgggaaaggcgatgagtaaaggccgggcagaagctgcggcgggagccgccgggatcctcctgaggtacctgcaggagcagaaccggccctacagctcccaggatgtgttcgggaacctacagcgggaacacggactgggcaaggcggtggtggtgaagacgctggagcagctggcgcaacaaggcaagatcaaagagaagatgtacggcaagcagaagatctattttgcggatcaggaccagtttgacatggtgagtgatgctgaccttcaagtcctagatggcaaaatcgtggccctcactgctaaggtgcagagcttgcagcagagctgccgctacatggaggctggtaggactgggtagcccctccaaagtgcccataggcttaggttcattctagaggtcaggaattactaaatgaatggttcaatgactgcagcatcttgttgcagctaagacccctttgctgggctcccttaggcataaaaagaaatgtaggataactaacggcttttgtgtaccaacaaatggacaagatacgcatttgttctccctgccacgattatcagtacactgtccccacgtttccctttattcctgcttctttaactggctacgcctaagtaagtagctcaaggaattatctagtgccctgaccacaccagagatgcagaaagaaatccaggagttaaagaaggaatgcgctggctacagagagagattgaagaacattaaagcagctaccaatcatgtgactccagaagagaaagagcaggtgtacagagagaggcagaagtactgtaaggagtggaggaagaggaagaggatggctacagagctgtctgatgcaatacttgaaggataccccaagagcaagaagcagttctttgaggaagttgggatagagacggatgaagattacaacgtcacactcccagacccctgaggggcc

SEQ ID NO: 172338 - DNA, 1381 bp, Homo sapiens
  Payload ID: 13881
  Gene Symbol: PSMC3IP
  Gene Name: PSMC3 interacting protein
  ENST ID: ENST00000587209
  CDS Start-End: 292-756
cgggaaaggcgatgagtaaaggccgggcagaagctgcggcgggaggtaacggcgccgtgggcgcggggaagacccgggagggcagtgggtgaggaggtcggttgagtggccccctcccctgcctttctctccgtagccgccgggatcctcctgaggtacctgcaggagcagaaccggccctacagctcccaggatgtgttcgggaacctacagcgggaacacggactgggcaaggcggtggtggtgaagacgctggagcagctggcgcaacaaggcaagatcaaagagaagatgtacggcaagcagaagatctattttgcggatcaggaccagtttgacatggtgagtgatgctgaccttcaagtcctagatggcaaaatcgtggccctcactgctaaggtgcagagcttgcagcagagctgccgctacatggaggctgagctcaaggaattatctagtgccctgaccacaccagagatgcagaaagaaatccaggagttaaagaaggaatgcgctggctacagagagagattgaagaacattaaagcagctaccaatcatgtgactccagaagagaaagagcaggtgtacagagagaggcagaagtactgtaaggagtggaggaagaggaagaggatggctacagagctgtctgatgcaatacttgaaggataccccaagagcaagaagcagttctttgaggaagttgggatagagacggatgaagattacaacgtcacactcccagacccctgaggggcccacggtcaggactggtggggactgcaggatgtcagaagagtgagatgtcttgcactggctaccttgtttttggttggcttttgttgttgttcctgctactttcacctttaagcagagcagtcaggagacaagcataaaccagagcactgggtagagaggatgagggctggtggctgggggtagacccagcccatttcattgtctaaattgcagtagcttgaggttaacatttagacttggaacaatgctaaaggaaagcatttggcaatatttattataatttaattttatataaaaatatttaatttcctctggatagtcaaacctgccagatatcaaacctgaggaaggcagaagtgaatttggagaactagggtagagagaggttgctataaaacgagcatttggagggcccacggcttcactcaggacctgctgggcttgtgtaccccaggagcccttttaagtatcttttgtacgcttttcaccccacccccaagtcctgggagaaatgcaggcaacactgagacatgggagaggccaagatatgcttgacagaaagggtgattttgaggctcagttaatatttcaaaattgtaaccgtagcaaaactgcattg

SEQ ID NO: 172339 - DNA, 908 bp, Homo sapiens
  Payload ID: 13882
  Gene Symbol: PSORS1C1
  Gene Name: psoriasis susceptibility 1 candidate 1
  Uniprot ID: Q9UIG5
  ENST ID: ENST00000259881
  CDS Start-End: 290-748
ggtgtcccagaaacccaggaaatcgagactcatgactcccagagaggatggcatctagaagtagacgatcaagggtggaatctacagtccgtgagccctgacttcttgccttcgtctcaaatagactctgcagccagccatctatgcagcgccccagtggctttgaaatgcaacagaaaccatcacccccggaccgtgggctccatgccagtgggcaaagcacagcctgggaagaattggtttgcagccaggcagtcctccatccagtcttgactttggcacttgtgatatgacttgcacagaccaaaaaagtcactctcaaagagctctcggcacacagaccccagctttacaaggaccccagctccttaacacagatcccagctccgaggaaactcgtcccccccacgttaatcctgaccgactttgccacatggagccagcaaaccatttctggcatgcaggggacctccaagcaatgatatccaaggaattccatctggcagccacccaggatgactgcagaaaaggaaggacacaggaggatatcctggttccctcttcccacccagagctgtttgcatcagtcctgccaatggctccggaagaagctgccaggctccagcaacctcagccccttcctcctccctcaggaatccacctatccgcctctaggaccttggctccaactctattgtactcgtctcctccctcccattctccttttggtctcagctccttgatctaagcctcccagagagacccctagaacgtttccctcaaggacctttctgcctggaagtctgttagcctttcagaagtaacatgtccaaaataaaatttgattcctcccaggttgttccctgcctggtccgctaccccacagtaaggaacaccttattatgcaa

SEQ ID NO: 172340 - DNA, 852 bp, Homo sapiens
  Payload ID: 13882
  Gene Symbol: PSORS1C1
  Gene Name: psoriasis susceptibility 1 candidate 1
  ENST ID: ENST00000376289
  CDS Start-End: 290-481
ggtgtcccagaaacccaggaaatcgagactcatgactcccagagaggatggcatctagaagtagacgatcaagggtggaatctacagtccatgggccctgacttcttgccttcgtctcaaatagactctgcagccagccatctatgcagcgccccagtggctttgaaatgcaacagaaaccatcacccctggaccatgggctccatgccagtgggcaaagcacagcctgggaagaattggtttgcagccaggcagtcctccatccagtcttgactttggcacttgtgatatgacttgcacagaccaaaaaagtcactctcaaagagctctcggcacacagaccccagctttacaaggaccccagctccttaacacagatcccagctccgaggaaactcatccccccacgttaatcctgaccgactttgccacatggagccagcaaaccatttctggcatgcaggggacctccaagcaatgatatccaaggaattccatctggcagccacccaggatgactgcagaaaaggaaggacacaggaggatatcctggttccctcttcccacccagagctgtttgcatcagtcctgccaatggctccggaagaagctgccaggctccagcaacctcagccccttcctcctccctcaggaatccacctatccgcctctaggaccttggctctaactctattgtactcgtctcctccctcccattctccttttggtctcagctccttgatctaagcctcccagagagaccctagaacgtttccctcaaggacctttctgcctggaagtctgttagcctttcagaagtaacatgtccaaaataaaatttgattcctccca

SEQ ID NO: 172341 - DNA, 854 bp, Homo sapiens
  Payload ID: 13882
  Gene Symbol: PSORS1C1
  Gene Name: psoriasis susceptibility 1 candidate 1
  Uniprot ID: Q9UIG5
  ENST ID: ENST00000448455
  CDS Start-End: 290-748
ggtgtcccagaaacccaggaaatcgagactcatgactcccagagaggatggcatctagaagtagacgatcaagggtggaatctacagtccgtgggccctgacttcttgccttcgtctcaaatagactctgcagccagccatctatgcagcgccccagtggctttgaaatgcaacagaaaccatcacccccggaccgtgggctccatgccagtgggcaaagcacagcctgggaagaattggtttgcagccaggcagtcctccatccagtcttgactttggcacttgtgatatgacttgcacagaccaaaaaagtcactctcaaagagctctcggcacacagaccccagctttacaaggaccccagctccttaacacagatcccagctccgaggaaactcgtcccccccacgttaatcctgaccgactttgccacatggagccagcaaaccatttctggcatgcaggggacctccaagcaatgatatccaaggaattccatctggcagccacccaggatgactgcagaaaaggaaggacacaggaggatatcctggttccctcttcccacccagagctgtttgcatcagtcctgccaatggctccggaagaagctgccaggctccagcaacctcagccccttcctcctccctcaggaatccacctatccgcctctaggaccttggctccaactctattgtactcgtctcctccctcccattctccttttggtctcagctccttgatctaagcctcccagagagacccctagaacgtttccctcaaggacctttctgcctggaagtctgttagcctttcagaagtaacatgtccaaaataaaatttgattcctccca

SEQ ID NO: 172342 - DNA, 854 bp, Homo sapiens
  Payload ID: 13882
  Gene Symbol: PSORS1C1
  Gene Name: psoriasis susceptibility 1 candidate 1
  Uniprot ID: Q9UIG5
  ENST ID: ENST00000433334
  CDS Start-End: 290-748
ggtgtcccagaaacccaggaaatcgagactcatgactcccagagaggatggcatctagaagtagacgatcaagggtggaatctacagtccatgggccctgacttcttgccttcgtctcaaatagactctgcagccagccatctatgcagcgccccagtggctttgaaatgcaacagaaaccatcacccccggaccgtgggctccatgccagtgggcaaagcacagcctgggaagaattggtttgcagccaggcagtcctccatccagtcttgactttggcacttgtgatatgacttgcacagaccaaaaaagtcactctcaaagagctctcggcacacagaccccagctttacaaggaccccagctccttaacacagatcccagctccaaggaaactcgtcccccccacgttaatcctgaccgactttgccacatggagccagcaaaccatttctggcatgcaggggacctccaagcaatgatatccaaggaattccatctggcagccacccaggatgactgcagaaaaggaaggacacaggaggatatcctggttccctcttcccacccagagctgtttgcatcagtcctgccaatggctccggaagaagctgccaggctccagcaacctcagccccttcctcctccctcaggaatccacctatccgcctctaggaccttggctccaactctattgtactcgtctcctccctcccattctccttttggtctcagctccttgatctaagcctcccagagagacccctagaatgtttccctcaaggacctttctgcctggaagtctgttagcctttcagaagtaacatgtccaaaataaaatttgattcctccca

SEQ ID NO: 172343 - DNA, 854 bp, Homo sapiens
  Payload ID: 13882
  Gene Symbol: PSORS1C1
  Gene Name: psoriasis susceptibility 1 candidate 1
  Uniprot ID: Q9UIG5
  ENST ID: ENST00000420214
  CDS Start-End: 290-748
ggtgtcccagaaacccaggaaatcgagactcatgactcccagagaggatggcatctagaagtagacgatcaagggtggaatctacagtccatgggccctgacttcttgccttcgtctcaaatagactctgcagccagccatctatgcagcgccccagtggctttgaaatgcaacagaaaccatcacccccggaccatgggctccatgccagtgggcaaagcacagcctgggaagaattggtttgcagccaggcagtcctccatccagtcttgactttggcacttgtgatatgacttgcacagaccaaaaaagtcactctcaaagagctctcggcacacagaccccagctttacaaggaccccagctccttaacacagatcccagctccgaggaaactcgtcccccccacgttaatcctgaccgactttgccacatggagccagcaaaccatttctggcatgcaggggacctccaagcaatgatatccaaggaattccatctggcagccacccaggatgactgcagaaaaggaaggacacaggaggatatcctggttccctcttcccacccagagctgtttgcatcagtcctgccaatggctccggaagaagctgccaggctccagcaacctcagccccttcctcctccctcaggaatccacctatccgcctctaggaccttggctccaactctattgtactcgtctcctccctcccattctccttttggtctcagctccttgatctaagcctcccagagagacccctagaacgtttccctcaaggacctttctgcctggaagtctgttagcctttcagaagtaacatgtccaaaataaaatttgattcctccca

SEQ ID NO: 172344 - DNA, 854 bp, Homo sapiens
  Payload ID: 13882
  Gene Symbol: PSORS1C1
  Gene Name: psoriasis susceptibility 1 candidate 1
  Uniprot ID: Q9UIG5
  ENST ID: ENST00000441092
  CDS Start-End: 290-748
ggtgtcccagaaacccaggaaatcgagactcatgactcccagagaggatggcatctagaagtagacgatcaagggtggaatctacagtccatgggccctgacttcttgccttcgtctcaaatagactctgcagccagccatctatgcagcgccccagtggctttgaaatgcaacagaaaccatcacccccggaccgtgggctccatgccagtgggcaaagcacagcctgggaagaattggtttgcagccaggcagtcctccatccagtcttgactttggcacttgtgatatgacttgcacagaccaaaaaagtcactctcaaagagctctcggcacacagaccccagctttacaaggaccccagctccttaacacagatcccagctccgaggaaactcgtcccccccacgttaatcctgaccgactttgccacatggagccagcaaaccatttctggcatgcaggggacctccaagcaatgatatccaaggaattccatctggcagccacccaggatgactgcagaaaaggaaggacacaggaggatatcctggttccctcttcccacccagagctgtttgcatcagtcctgccaatggctccggaagaagctgccaggctccagcaacctcagccccttcctcctccctcaggaatccacctatccgcctctaggaccttggctccaactctattgtactcgtctcctccctcccattctccttttggtctcagctccttgatctaagcctcccagagagacccctagaatgtttccctcaaggacctttctgcctggaagtctgttagcctttcagaagtaacatgtccaaaataaaatttgattcctccca

SEQ ID NO: 172345 - DNA, 501 bp, Homo sapiens
  Payload ID: 13882
  Gene Symbol: PSORS1C1
  Gene Name: psoriasis susceptibility 1 candidate 1
  ENST ID: ENST00000481450
  CDS Start-End: 126-395
agccccacccagccccagccccaggaggaggagcctgtctggatggacgcagcctgaactgacccacaaacagaccaaaaaagtcactctcaaagagctctcggcatgcaggggacctccaagcaatgatatccaaggaattccatctggcagccacccaggatgactgcagaaaaggaaggacacaggaggatatcctggttccctcttcccacccagagctgtttgcatcagtcctgccaatggctccggaagaagctgccaggctccagcaacctcagccccttcctcctccctcaggaatccacctatccgcctctaggaccttggctccaactctattgtactcgtctcctccctcccattctccttttggtctcagctccttgatctaagcctcccagagagacccctagaacgtttccctcaaggacctttctgcctggaagtctgttagcctttcagaagtaacatgtccaaaataaaatttgattcctccca

SEQ ID NO: 172346 - DNA, 655 bp, Homo sapiens
  Payload ID: 13882
  Gene Symbol: PSORS1C1
  Gene Name: psoriasis susceptibility 1 candidate 1
  ENST ID: ENST00000547221
  CDS Start-End: 236-550
agcgatcgcgcgggcaggaagaccgggtgggagccccacccagccccagccccaggaggaggagcctgtctggatggacgcagcctgaactgacccacaaacagaccaaaaaagtcactctcaaagagctctcggcacacagaccccagctttacaaggaccccagctccttaacacagatcccagctccgaggaaactcgtcccccccacgttaatcctgaccgactttgccacatggagccagcaaaccatttctggcatgcaggggacctccaagcaatgatatccaaggaattccatctggcagccacccaggatgactgcagaaaaggaaggacacaggaggatatcctggttccctcttcccacccagagctgtttgcatcagtcctgccaatggctccggaagaagctgccaggctccagcaacctcagccccttcctcctccctcaggaatccacctatccgcctctaggaccttggctccaactctattgtactcgtctcctccctcccattctccttttggtctcagctccttgatctaagcctcccagagagacccctagaacgtttccctcaaggacctttctgcctggaagtctgttagcctttcagaagtaacatgtccaaaataaaatttgattcctccc

SEQ ID NO: 172347 - DNA, 1150 bp, Homo sapiens
  Payload ID: 13883
  Gene Symbol: PSORS1C2
  Gene Name: psoriasis susceptibility 1 candidate 2
  Uniprot ID: Q9UIG4
  ENST ID: ENST00000259845
  CDS Start-End: 325-735
gtgattacggagatgccaagtgggtattgactgctccaggatgtggatggagggtgtgaaaaccagggtggggtgacgcaggctctgggtcatgatagggagagcaggcagctgggtcctgggctggaggactaaaataagggacgccaccttcaggggtgacacatcagcccaggccttcccaacgggtttgaccagttctgttctgatggtattcctgtgccactgggctggtccctcctccactcctcccctataaagcctcttggggttcccaggcacccagactcagcccaccccagctttgggggccagtacatagccatgatcctcaactggaagctcctggggatcctggtcctttgcctgcacaccagaggcatctcaggcagcgagggccacccctctcacccacccgcagaggaccgagaggaggcaggctccccaacattgcctcagggccccccagtccccggtgacccttggccaggggcaccccctctctttgaagatcctccgcctacccgccccagtcgtccctggagagacctgcctgaaactggagtctggctccctgaaccgcctagaacggatcctcctcaacctccccggcctgacgacccttggccggcaggaccccagcccccagaaaacccctggcctcctgcccctgaggtggacaaccgacctcaggaggagccagacctagacccaccccgggaagagtacagataatggagtcccctcagccgttctgttcccaggcatctccaggcacccacgccctctccaccctctgattccccgtgaattcttcccaatttagcctgtctccttaaacctcttcctcattccctcggttttattctgaacccgtaaggtggtgttctcaatatttcctgtcccctcctgagatccatacttagtcctcacatcgcccgttttttcctctgacagcctaagcctactctcctacctcgcctccaggcctcggccgcacctacctcccacccggtcttcctgcccgcgcgatcgctggggcagggctatggtactgtgttcccttctgccacctggtggccggcggcaggaactatcagtagacagctgctgcttccatgaaacggaaaaataaaaatcatgttttctt

SEQ ID NO: 172348 - DNA, 1151 bp, Homo sapiens
  Payload ID: 13883
  Gene Symbol: PSORS1C2
  Gene Name: psoriasis susceptibility 1 candidate 2
  Uniprot ID: Q9UIG4
  ENST ID: ENST00000383530
  CDS Start-End: 325-735
gtgattacggagatgccaagtgggtattgactgctccagggtgtggatggagggtgtgaaaaccagggtggggtgacgcaggctctgggtcatgatagggagagcaggcagctgggtcctgggctggaggactaaaataagggacgccaccttcaggggtgacacatcagcccaggccttcccaacgggtttgaccagttctgttctgatggtattcctgtgccactgggctggcccctcctccactcctcccctataaagcctcttggggttcccaggcacccagactcagcccaccccagctttgggggccagtacatagccatgatcctcaactggaagctcctggggatcctggtcctttgcctgcacaccagaggcatctcaggcagcgagggccacccctctcacccacccgcagaggaccgagaggaggcaggctccccaacattgcctcagggccccccagtccccggtgacccttggccaggggcaccccctctctttgaagatcctccgcctacccgccccagtcgtccctggagagacctgcctgaaactggagtctggccccctgaaccgcctagaacggatcctcctcaacctccccggcctgacgacccttggccggcaggaccccagcccccagaaaacccctggcctcctgcccctgaggtggacaaccgacctcaggaggagccagacctagacccaccccgggaagagtacagataatggagtcccctcagccgttctgttcccaggcatctccaggcacccacgccctctccaccctctgattccccgtgaattcttcccaatttagcctatctccttaaacctcttcctcattccctcggttttattctgaacccgtaaggtggtgttctcaatatttcctgtcccctcctgagatccatacttagtcctcacatcgcccgttttttcctctgacagcctaagcctactctcctacctcgcctccaggcctcggccccacctacctcccacccggtcttcctgcccgcgcgatcgctggggcagggctatggtactgtgttcccttctgccacctggtggccggcggcaggaactatcagtagacgctgctgcttccatgaaacggaaaaataaaaatcatgttttcttaa

SEQ ID NO: 172349 - DNA, 1152 bp, Homo sapiens
  Payload ID: 13883
  Gene Symbol: PSORS1C2
  Gene Name: psoriasis susceptibility 1 candidate 2
  Uniprot ID: Q9UIG4
  ENST ID: ENST00000416027
  CDS Start-End: 325-735
gtgattacggagatgccaagtgggtattgactgctccagggtgtggatggagggtgtgaaaaccagggtggggtgacgcaggctctgggtcatgatagggagagcaggcagctgggtcctgggctggaggactaaaataagggacgccaccttcaggggtgacacatcagcccaggccttcccaacgggtttgaccagttctgttctgatggtattcctgtgccactgggctggcccctcctccactcctcccctataaagcctcttggggttcccaggcacccagactcagcccaccccagctttgggggccagtacatagccatgatcctcaactggaagctcctggggatcctggtcctttgcctgcacaccagaggcatctcaggcagcgagggccacccctctcacccacccgcagaggaccgagaggaggcaggctccccaacattgcctcagggccccccagtccccggtgacccttggccaggggcaccccctctctttgaagatcctccgcctacccgccccagtcgtccctggagagacctgcctgaaactggagtctggccccctgaaccgcctagaacggatcctcctcaacctccccggcctgacgacccttggccggcaggaccccagcccccagaaaacccctggcctcctgcccctgaggtggacaaccgacctcaggaggagccagacctagacccaccccgggaagagtacagataatggagtcccctcagccgttctgttcccaggcatctccaggcacccacgccctctccaccctctgattccccgtgaattcttcccaatttagcctatctccttaaacctcttcctcattccctcggttttattctgaacccgtaaggtggtgttctcaatatttcctgtcccctcctgagatccatacttagtcctcacatcgcccgttttttcctctgacagcctaagcctactctcctacctcgcctccaggcctcggccgcacctacctcccacccggtcttcctgcccgcgcgatcgctggggcagggctatggtactgtgttcccttctgccacctggtggccggcggcaggaactatcagtagacagctgctgcttccatgaaacggaaaaataaaaatcatgttttcttaa

SEQ ID NO: 172350 - DNA, 1152 bp, Homo sapiens
  Payload ID: 13883
  Gene Symbol: PSORS1C2
  Gene Name: psoriasis susceptibility 1 candidate 2
  Uniprot ID: Q9UIG4
  ENST ID: ENST00000413924
  CDS Start-End: 325-735
gtgattacggagatgccaagtgggtattgactgctccagggtgtggatggagggtgtgaaaaccagggtggggtgacgcaggctctgggtcatgatagggagagcaggcagctgggtcctgggctggaggactaaaataagggacgccaccttcaggggtgacacatcagcccaggccttcccaacgggtttgaccagttctgttctgatggtattcctgtgccactgggctggtccctcctccactcctcccctataaagcctcttggggttcccaggcacccagactcagcccaccccagctttgggggccagtacatagccatgatcctcaactggaagctcctggggatcctggtcctttgcctgcacaccagaggcatctcaggcagcgagggccacccctctcacccacccgcagaggaccgagaggaggcaggctccccaacattgcctcagggccccccagtccccggtgacccttggccaggggcaccccctctctttgaagatcctccgcctacccgccccagtcgtccctggagagacctgcctgaaactggagtctggccccctgaaccgcctagaacggatcctcctcaacctccccggcctgacgacccttggccggcaggaccccagcccccagaaaacccctggcctcctgcccctgaggtggacaaccgacctcaggaggagccagacctagacccaccccgggaagagtacagataatggagtcccctcagccgttctgttcccaggcatctccaggcacccacgccctctccaccctctgattccccgtgaattcttcccaatttagcctatctccttaaacctcttcctcattccctcggttttattctgaacccgtaaggtggtgttctcaatatttcctgtcccctcctgagatccatacttagtcctcacatcgcccgttttttcctctgacagcctaagcctactctcctacctcgcctccaggcctcggccccacctacctcccacccggtcttcctgcccgcgcgatcgctggggcagggctacggtactgtgttcccttctgccacctggtggccggcggcaggaactatcagtagacagctgctgcttccatgaaacggaaaaataaaaatcatgttttcttaa

SEQ ID NO: 172351 - DNA, 1152 bp, Homo sapiens; identical to SEQ ID NO: 172350
  Payload ID: 13883
  Gene Symbol: PSORS1C2
  Gene Name: psoriasis susceptibility 1 candidate 2
  Uniprot ID: Q9UIG4
  ENST ID: ENST00000422316
  CDS Start-End: 325-735

SEQ ID NO: 172352 - DNA, 1152 bp, Homo sapiens
  Payload ID: 13883
  Gene Symbol: PSORS1C2
  Gene Name: psoriasis susceptibility 1 candidate 2
  Uniprot ID: Q9UIG4
  ENST ID: ENST00000458589
  CDS Start-End: 325-735
gtgattacggagatgccaagtgggtattgactgctccagggtgtggatggagggtgtgaaaaccagggtggggtgacgcaggctctgggtcatgatagggagagcaggcagctgggtcctgggctggaggactaaaataagggacgccaccttcaggggtgacacatcagcccaggccttcccaacgggtttgaccagttctgttctgatggtattcctgtgccactgggctggcccctcctccactcctcccctataaagcctcttggggttcccaggcacccagactcagcccaccccagctttgggggccagtacatagccatgatcctcaactggaagctcctggggatcctggtcctttgcctgcacaccagaggcatctcaggcagcgagggccacccctctcacccacccgcagaggaccgagaggaggcaggctccccaacattgcctcagggccccccagtccccggtgacccttggccaggggcaccccctctctttgaagatcctccgcctacccgccccagtcgtccctggagagacctgcctgaaactggagtctggccccctgaaccgcctagaacggatcctcctcaacctccccggcctgacgacccttggccggcaggaccccagcccccagaaaacccctggcctcctgcccctgaggtggacaaccgacctcaggaggagccagacctagacccaccccgggaagagtacagataatggagtcccctcagccgttctgttcccaggcatctccaggcacccacgccctctccaccctctgattccccgtgaattcttcccaatttagcctatctccttaaacctcttcctcattccctcggttttattctgaacccgtaaggtggtgttctcaatatttcctgtcccctcctgagatccatacttagtcctcacatcgcccgttttttcctctgacagcctaagcctactctcctacctcgcctccaggcctcggccccacctacctcccacccggtcttcctgcccgcgcgatcgctggggcagggctacggtactgtgttcccttctgccacctggtggccggcggcaggaactatcagtagacagctgctgcttccatgaaacggaaaaataaaaatcatgttttcttaa

SEQ ID NO: 172353 - DNA, 4996 bp, Homo sapiens
  Payload ID: 13884
  Gene Symbol: PPTC7
  Gene Name: PTC7 protein phosphatase homolog
  Uniprot ID: Q8NI37
  ENST ID: ENST00000354300
  CDS Start-End: 290-1204
acgctagtggagcggaagatggcggcggcggcggcggccgctgcagccgggacttcagttgggctgaggcggaggagccgccgcttctgacctcgctctggctccggtgcgcgcggctgagcgcgtgcgaggccccgcgcgtcgggcaggggcggcggcggccactgcgcgccgccctgaggagcgccccagcggcggcgcgactgcggctgaggagagagccggctccgggcctccgcgtcctcctgctcccccggccccccgcctcctcgggggggcggcggcggcgatgttctcggtcctctcgtacgggcggctggtggcccgcgccgtgctcggcggcctctcgcagaccgaccccagggccggcggcggcggcggcggcgactacggactggtgacggccggctgcggcttcgggaaggacttccgtaagggcctcctcaagaagggcgcgtgctacggggacgacgcgtgcttcgtggcccggcaccgttccgcggacgtgctcggggttgcagatggtgtaggaggctggagagactatggagttgatccatctcaattctcagggactttaatgcggacgtgtgaacgtttagtaaaagaaggacggttcgtacctagtaatcccattggaattctcaccacaagctactgtgagttgctgcaaaataaagtccctttgctcggtagcagcaccgcctgcattgtggtgctggacagaaccagccaccgcttacacacagcaaacctgggcgattcaggcttcctggttgtcaggggtggtgaagtcgtgcaccgatcagatgagcagcagcattacttcaacactccattccagctctcaatcgctccccctgaagccgagggagtcgtcttgagcgacagtccggatgctgctgatagcacgtctttcgatgtccagctaggagacattatcctgacggcaacagatggactctttgacaacatgcctgattatatgattcttcaggagctaaaaaagttaaagaattcaaattatgagagtatacaacagactgccagaagcattgctgagcaagctcatgagctggcctatgacccaaattatatgtcaccttttgcacagtttgcatgtgacaatggattgaatgtgagaggtggaaagccagatgacatcaccgtccttctttcaatagtggctgagtatacagactagctgaggtgtcaagtcctgcctttcctttcatcatcccaaatttcccctgccatgtgtgctgatcctgctggcaggaccacatttctttgccactgatctcaatggccagtgatgtaagtcttttgcctgtcttcttgagactcgttgagatctttgttgagaaccactactatcattcactagctcatatctgccggcagcaattgaagagatccaatatttgaagattggccttcatttctcgatgttctttccatgatggggatggaggtgttcagtgccaccgtggctgttacttttcaaagtagttgaagtattgaaaatgagtaatgttggtaaagtgaattcaaaatcctagtatgctaaagggatggtacaagtctaacacaaattgtacgtaatgatacatctactagaaacatacattattcatcaaaagaaatgttacatgtgtactccacaggcatagtctttgttatgatgattggtgtggctttatgtctttgttataaactcctatttttcaggggcttatgattctgctctaaaacattgctctgggttatacagttttgatcccaaaagcttttttgttacaaatcgggagaaaaatccattttagttctatggatggaaatatttcatgcttttaaaaagatgtttgtgttcctgtggttaaagttttggcagtttattgattagtccaaatcacaggctaaggcctgatctccaggaggggtaggggagacactttaccagtatttttttatggaaataatactcaaggttgtaaaacccctcaaagcctagaaatttaattgttatggctgaaattcctcctagttgtctgatagaatgcccctgaatgggaactctaggtcccaaggcctgaagggttgagaacagacagctgtaactttgaattttgttggctttcagtggtcatgctacctacccatactcgtactctcagaccttttattagtagccttgctttctatagagcatgcaccaaatccagtgagtccatgtggagagagcactgtgtgcgcagcggcagcagcacagacgtccatgaggaaaactcccagtgatgatctgacatttacaattaccccacatggaaatttaggggtttctgaatcaagcttaatgtttacagtttccaaatagccattttgcagtgtatagtttccttacaaaactaccccgcattcagttttcacattatctgcaagctgaaacttatttttaagttttgtgtacaagttgactgctgtaaagatatatatttttgggtcagtttttttccttcattaacttggtggtagaaaaaaatatatacttagaaatccttaaattaaagccatgttttatatataagtcaggtaacattggtgtatagatgagaatgcaattaaacctgatgagaatctacttgagaatatagaaagtctttctctaaaggagatactgactccctggtttattgcattaaaatttatgtttgaggttacctcaacttgttttaaaagattttgttttgtgaatttgtactgtatatttgagtaactgtcaggcttttatttaaaattgtttaacatgtaccatgtacatgtcattactatatttcaatgcatcatgcttgtaacaggcatttcatttataataagaatgagttattcatttgtaagccgttcagtaatttatctactattcctaaattggcataatgttagataatctattttgaatcacctttaattacatgtcagaatgccttaactaccctaacttgacaaaacagaattctttggtagacgcggtgggggcggggtggggggtctggacggagtctctatttaaggagaaatcatcatgctatgataaaacacagaagcatgagtggcaagtggcggggtatttattttgcacaaactatttgcagtctctgtgtatttaaaaagtaaagaaagttgcatccagaagggttttgttagaatgaatacatttatattaggactgacaacttcagctcttttgtttaggttttcaattatttttggtaagagtatgtagccttatgatctggatatattttgcattcattttccaacgcctacatttaattcctggtaagagcagtgctcgtcaagtttctggtttttctctgctctcatttaacccgtcaaacacaatctttgtaaagctagattggtggtgttttatacaacttatttactcagcttacctttttgagaaacgattgttagaaattgacgatgtgtttgttccagtgatactgaaagtagtgggggcaagaattgagtttcacagtggaattggctttggatctggcctatagattagtgacataaaatattttctctattttcccctgttctttttgtgttatgcacttaattttatgactgccgggggggtcagctggagtgctgcttaacaagtatctctcctactctcagtggtcagaggctgtgttggacccatagtagaattttccaggtcacagacccaagcttccatgggttgttactgtgctgtaccacttggtgggtctgattctgaacctgatgtgtgtgttaattatattttaagcaacacacacacacacacacgcctcatgtaatggacttttataacaaaagaaaaaatttggatttctaatttacaaatggcaaattatttatccctctctggatgcaccaaagaccagtaaagtttatagcttttccatctatatttataaagcaatactgtattataaaaatcaatatttttatcacatgcttgaaatttttattttgttgttttaaaatgtgcactctaaacatatcagaaccttatttcttcctatgaacttaagctgcctgcgcacaaaaaaaaaaaaaatttaccaaatggagatgcagtagagtccataggctctaaaaactaaaagaaatgggatgcagggggaacaagttatttgtcctgagttactgtacttgcttgacatggttgttgggtactaaatcacaaaagaatccattccaggtatgcatgtctgggggttgggctgtgtctagattagaaactgggtttcaagctttgcatgatgggagagcgtcctctcctctatcagctgcgtgtgttctggataggacagtagcccggagatggaaaccaccttcagtaccattagcccaccataccaagtaacaagttaggcaggaatcgtgggaatttattgagtcagctttgagtgtttgagagaatgtaaacaagattggctcgaattgtaaacgtttgtactttggatgagttcatggttctttaggtcaccttaataccagctatctttggtagaagctacagcattcagtttctctggaaactgtatcacatttttgcattttaaaaattttacagtatcaaaaaaccaaaatctgcttatgaaacaaaacatgaagcaggacatatttggattctatttatttaaaattaaattctttgcaaaattgaacttctcaactaaaacgtgtccatgtcagaattttaactgttagcaggtagtttgtggcaaagatggctaaataatgaagcaaattagaatctgtgtgtatactaatgagctgctttttttctgttgagactatcattatttgtcttattacccaagaggcaattacctgaatttggatgtctgaattataacttatgcaggaatagttctgtaaatacatttaaataaactgtaaagatatttaataaatatagtatttatactaa

SEQ ID NO: 172354 - DNA, 2660 bp, Homo sapiens
  Payload ID: 13885
  Gene Symbol: PINK1
  Gene Name: PTEN induced putative kinase 1
  Uniprot ID: Q9BXM7
  ENST ID: ENST00000321556
  CDS Start-End: 95-1840
cgcagaggcaccgccccaagtttgttgtgaccggcgggggacgccggtggtggcggcagcggcggctgcgggggcaccgggccgcggcgccaccatggcggtgcgacaggcgctgggccgcggcctgcagctgggtcgagcgctgctgctgcgcttcacgggcaagcccggccgggcctacggcttggggcggccgggcccggcggcgggctgtgtccgcggggagcgtccaggctgggccgcaggaccgggcgcggagcctcgcagggtcgggctcgggctccctaaccgtctccgcttcttccgccagtcggtggccgggctggcggcgcggttgcagcggcagttcgtggtgcgggcctggggctgcgcgggcccttgcggccgggcagtctttctggccttcgggctagggctgggcctcatcgaggaaaaacaggcggagagccggcgggcggtctcggcctgtcaggagatccaggcaatttttacccagaaaagcaagccggggcctgacccgttggacacgagacgcttgcagggctttcggctggaggagtatctgatagggcagtccattggtaagggctgcagtgctgctgtgtatgaagccaccatgcctacattgccccagaacctggaggtgacaaagagcaccgggttgcttccagggagaggcccaggtaccagtgcaccaggagaagggcaggagcgagctccgggggcccctgccttccccttggccatcaagatgatgtggaacatctcggcaggttcctccagcgaagccatcttgaacacaatgagccaggagctggtcccagcgagccgagtggccttggctggggagtatggagcagtcacttacagaaaatccaagagaggtcccaagcaactagcccctcaccccaacatcatccgggttctccgcgccttcacctcttccgtgccgctgctgccaggggccctggtcgactaccctgatgtgctgccctcacgcctccaccctgaaggcctgggccatggccggacgctgttcctcgttatgaagaactatccctgtaccctgcgccagtacctttgtgtgaacacacccagcccccgcctcgccgccatgatgctgctgcagctgctggaaggcgtggaccatctggttcaacagggcatcgcgcacagagacctgaaatccgacaacatccttgtggagctggacccagacggctgcccctggctggtgatcgcagattttggctgctgcctggctgatgagagcatcggcctgcagttgcccttcagcagctggtacgtggatcggggcggaaacggctgtctgatggccccagaggtgtccacggcccgtcctggccccagggcagtgattgactacagcaaggctgatgcctgggcagtgggagccatcgcctatgaaatcttcgggcttgtcaatcccttctacggccagggcaaggcccaccttgaaagccgcagctaccaagaggctcagctacctgcactgcccgagtcagtgcctccagacgtgagacagttggtgagggcactgctccagcgagaggccagcaagagaccatctgcccgagtagccgcaaatgtgcttcatctaagcctctggggtgaacatattctagccctgaagaatctgaagttagacaagatggttggctggctcctccaacaatcggccgccactttgttggccaacaggctcacagagaagtgttgtgtggaaacaaaaatgaagatgctctttctggctaacctggagtgtgaaacgctctgccaggcagccctcctcctctgctcatggagggcagccctgtgatgtccctgcatggagctggtgaattactaaaagaacatggcatcctctgtgtcgtgatggtctgtgaatggtgagggtgggagtcaggagacaagacagcgcagagagggctggttagccggaaaaggcctcgggcttggcaaatggaagaacttgagtgagagttcagtctgcagtcctctgctcacagacatctgaaaagtgaatggccaagctggtctagtagatgaggctggactgaggaggggtaggcctgcatccacagagaggatccaggccaaggcactggctgtcagtggcagagtttggctgtgacctttgcccctaacacgaggaactcgtttgaagggggcagcgtagcatgtctgatttgccacctggatgaaggcagacatcaacatgggtcagcacgttcagttacgggagtgggaaattacatgaggcctgggcctctgcgttcccaagctgtgcgttctggaccagctactgaattattaatctcacttagcgaaagtgacggatgagcagtaagtaagtaagtgtggggatttaaacttgagggtttccctcctgactagcctctcttacaggaattgtgaaatattaaatgcaaatttacaactgcagatgacgtatgtgccttgaactgaatatttggctttaagaatgattcttatactctgaaggtgagaatattttgtgggcaggtatcaacattggggaagagatttcatgtctaactaactaactttatacatgatttttaggaagctattgcctaaatcagcgtcaacatgcagtaaaggttgtcttcaactga

SEQ ID NO: 172355 - DNA, 1006 bp, Homo sapiens
  Payload ID: 13886
  Gene Symbol: PCBD1
  Gene Name: pterin-4 alpha-carbinolamine dehydratase/ dimerization cofactor of hepatocyte nuclear factor 1 alpha
  Uniprot ID: P61457
  ENST ID: ENST00000299299
  CDS Start-End: 252-566
cggggtgggattccaacccagaagcgggcatttggagccctcatgcttcaccctagctccctgaaacaagcacggaggatggctctgagcagcgaggaaagtgctggaagcaagcaggccgagcgcgtccctggctggggacgttaatcattaccggagggcggcccgagcgcggccccgccccgggacggcagcctgcgcgcccggccgccgcctgccctctccgctggccacctgctgccgcccgcgccatggctggcaaagcacacaggctgagcgctgaggagagggaccagctgctgccaaacctgagggctgtggggtggaatgagctggaaggccgtgatgccatcttcaagcagtttcatttcaaagacttcaacagggcctttgggttcatgacaagagtggccctgcaggctgagaaactggaccaccatcctgaatggtttaacgtgtacaacaaggtccacatcacgctgagcacccatgagtgtgccggcctttcagaacgggacataaacctggccagcttcatcgaacaagtagcagtgtccatgacatagaccctgcccttcctctttgaattcttccgggggaaggggtgactgaactgggagtccagggagggagctgaggagcccttaccctcccaccactcccctcccaagacccagccgccgccgttgagggctgagtccttgctgtgggatgtgccagtgtccccaccaacaccaggaatttagaccttttccctgcaccactctcttcatcctgggggctctgttacactaatttgaataaactctcccctttctttgcaacttcccagcaacaataatgattttcttgccaggccgtctcttgctccctaattcatttcccaggaagctgtgatacagggtgaaataaagtcttgtcttagaaaccaggaccctaaaccccacactatgtaatagaaacacatgtgtttttatgtctcaaataaaactattatatcacttgg

SEQ ID NO: 172356 - DNA, 1223 bp, Homo sapiens
  Payload ID: 13887
  Gene Symbol: PCBD2
  Gene Name: pterin-4 alpha-carbinolamine dehydratase/ Dimerization cofactor of hepatocyte nuclear factor 1 alpha (TCF1) 2
  Uniprot ID: Q9H0N5
  ENST ID: ENST00000254908
  CDS Start-End: 235-627
agagtccacctggcggccaagggcgctggcgaccgctgaagctcctgggggtgttcggggtccgggctgcgcctgtgcccgcgggaaggctgggcgcttcccacacacagaccccgctccgggccagccccgcagggagactaccagggctggcggtagctgggcgtggtcgggtcgggggcggctgtgggcggccggcaggcagcgcgcggggcagccctcggcagacggccaatggcggcggtgctcggggcgctcggggcgacgcggcgcttgttggcggcgctgcgaggccagagcctagggctagcggccatgtcatcaggtactcacaggttgactgcagaggagaggaaccaagctatacttgaccttaaagcagcaggatggtcggaattaagtgagagagatgccatctacaaagaattctccttccacaattttaatcaggcatttggctttatgtcccgagttgccctacaagcagagaagatgaatcatcacccagaatggttcaatgtatacaacaaggtccagataactctcacctcacatgactgtggtgaactgaccaaaaaagatgtgaagctggccaagtttattgaaaaagcagctgcttctgtgtgatttcttccaaaatacatgtaaaatcttgtacacatcttagctgcaatgtatgttgaaggaaatttatgtgaacaaatagagttgttctttttctcttttttttaagacagagtgttgctctgtcgcccaggccagagtgcagtggtatgatctcggctcactgtaacctccgcctcccaggttcaggtgattctcctgcctcagcctcctgagtagctgggattacaagcacgtgtcaccacgcctggctaatttttgtatttttagtatagacagggttttaccacgttggtcaggctggtctcgaactcctgacctcgtgatccgcctgcctcagcctcccaaagtgctgggattacaggcatgagccaccatgcctggctgttgaattgttcttaaggcatcatatctagaagcaaagaaaaaagaaaaataacaatttaagttgtgtaaattgtttgcctttatatattacatttggtaaaatcagtgcttaaatacgcaatgatttaaactggaacctgaggtatttttcatgctatctaatcatatacctaagataaaccaacccagttacttatattaataatattcag

SEQ ID NO: 172357 - DNA, 5621 bp, Homo sapiens
  Payload ID: 13887
  Gene Symbol: PCBD2
  Gene Name: pterin-4 alpha-carbinolamine dehydratase/dimerization cofactor of hepatocyte nuclear factor 1 alpha (TCF1) 2
  Uniprot ID: Q9H0N5
  ENST ID: ENST00000512783
  CDS Start-End: 21-413
cagccctcggcagacggccaatggcggcggtgctcggggcgctcggggcgacgcggcgcttgttggcggcgctgcgaggccagagcctagggctagcggccatgtcatcaggtactcacaggttgactgcagaggagaggaaccaagctatacttgaccttaaagcagcaggatggtcggaattaagtgagagagatgccatctacaaagaattctccttccacaattttaatcaggcatttggctttatgtcccgagttgccctacaagcagagaagatgaatcatcacccagaatggttcaatgtatacaacaaggtccagataactctcacctcacatgactgtggtgaactgaccaaaaaagatgtgaagctggccaagtttattgaaaaagcagctgcttctgtgtgatttcttccaaaatacataagtctgagaggctaaacttgatggctgtgttaacatatgtcacgtgtagcacagtggagaaagcaggatatggctcataatgacagtggtgaagacctgcgaatgaagttgctagttatcacctacattagggtttgacataggtctatgttatgggtcgctgcatctgctggaactcacagactttactatagagaatcaaagatcccgtatccgaagtctatggaaatgctcatggtggtaaattccaacagaatgaaacaccaaacttgcttaaagtaactcacgtttcaatttgaaagagatattgtcaaaattggaggcccccaggttcctgtctgttccaaatctttgcatgatgacagtggtttctctgatgtggtaagctttggctttcttctgttttctttctaaaagatcactggagtagagaggagttaaacagacatgacctttgacctcttgcatgacctccacagatagcaaaccgggccgacacatggttgacgatgtccttttctacaatgaagttaatgaaagttctgaaaatagtgattactttctgacattgataggatttaggaaacctctggataaatagcttaagcatggctgtttatgtttttgctatagacaaaaagcagcagcatgtacattgtatttggacacaagcctgcctcggttaatatattgaactattggaccactagggttagtagggagcggtctgtacactttctgattcagcattcagaaacattctaggtggactctgtagctttcagttttgtaaagttatcagaaaaacatcgggagggtttggccatcatatgtgagctttgtgtttcaatgccagttactcaggattagtaaattaatgactgtccagaggacttcagggtcaccaagctgctgcacctgccattggctgactctccccggctatctgtggctgagatggtgctgcttaggtcacgcagagcatgagctgctgctgaaagggcacaggagatggcccttgggcttctcatcccaggatgcctgccctgcccaccaatccatgagaagatatgtatgatttcagtaggccctggatcagcttgtcacctctggtttcctgtttgctttccactcactcagctggagtttcatttccagactaaagtcttcatcattggcttcagaaacagcattcatctgtggctgtgctgatgtagtacaccaagaacaactgggctcttctctgtcactttcagtgggctaccttccctcacctctccaagcagcatgaaagaattctttacatttttaatctcttttttgtttttccctgaaagtatgctttggtgcttaaagagagaagtcacaaaagtatactactgagtttcctggagatgaaatcctgttgtccctagctatgtgaatgagcacagggatccctgatgccattattttgtatattcatacggcacacacttactgagggccttctgtgtgccctaggggattgagcacagtgacatatcagggcaggtagaaacagatggagagctgatgcgggctgtcttagagcagctgccccaggaggcccctgtggatggatgttgggcaggagccctgagacgttaggggcatataactaaaggacatagcaggagttataggaggagctgatccctgagggaaacaatgaagacggagaagatggggctaaagtttgaattgtggggacattaatcacagtgattcttaaaactttgctgttgatgattttaaatggagaaaatgagtacgtaagatgttatttcccagttcagtatattggttgcccacaaagtattttcctaccatgaatggtcatatatacttgttgtagaataccagggacagcagagatggtggggtagttacttccttttcttacagcccaagaactttggtgtccaggagattgaccaatttagccactgagcatttaatacaacacagggctacccagatcccactgtcctgatttgccctgaaagccaaaggagttaggagaaggtgagtggggagaatatattaatcctgagagttgaacagagcaaaaatccctattacttttgtacttaaaacatctctgccacatgtgctcactctttatattctgtttaggtggtttatatgtgcacatcccatcctatgcctgcagttagccaactcagggtttatattgcctcctttctttttttctttttttttttttttttaagagatggggtctcattctatcatgcagactggagtgcagtggtgtgatcacagctcattgtaacctccaacgcctggactaaagtgatcctcctaccttggcctctctggtagctgggactacaggtgcatgccaccacacccacctaattttttttatttttattttttgtagagacagtctcactatcttgctcaggctagtcctgaactcctgggctcaagttatcttgctgcctcagcctcccatgggtaatttttatttcctttttttttttttttggagatggagtttcgctcttgtcgcccaggctggagtgcaatggcacgatcttggctcactgcagtctccacctcctgggttcaagtgattctccatcctcagcctcctgagtagctgagattacaggcaactgccaccatgcgcggctaatttatgtatttttttttagtaagagatggggtttcaccatgttggccagactagtcttaaactcctgacctcaagcgacctgcctgccttggcctcccaaagtgctgggattacaggcatgagccgctatgcctcgtcgctgatttttatttcttattttttttttagagatgggggtctcactatgttgctcaggctgatctcaaactcctggcctcaagtgatcctcccaccttagcctcccaagttgctgggattataagtgtgagccactatccctacctcactattaccttctttgcttctcttgttttcttttgttctaagtcaaacccatcacaatcttttcttgtccttccaggtgttttccagtgctgtgccctggatgtgctctctttctcttagagcccagagaacttgcttttcccccttatatatgacccttaactttttctaacacattattaagggcctgtgtctatcagctgggggcacttcttgaagggagggcctttgtgtggtctgtttctagtgacttccagctttaacccagagcctcatgattgctgggtgcccatagcctttttgctgaatggaggcactcagtctccttgggaagagagaatccatgatagacccacttgggagctccccacttcaggggcctacacactggtaatgcaacagaatgcccaagagtgacctcataaagcaaggattcccttcgtggccccttctctgctgcctctcagaatccagacgctaaggaaaatccctaagcagagattttctgttggatgctaaaagcaaggaataaaagttgaaaatttggaaaatgtctcaacaccgtcaccagcgccactcgagagtcatttctagttcaccagttgacactacatcggtgggattttgcccaacattcaagaaatttaagtaaatattatctatctccattgcctgttaagaaatgtgctagtagaagtgtgagggcagggtgtcagtgttctctcagcctcttccctcagatactcgtctgcttaccaaaataagttgcatgtccttgacaatctggtttctatgattggtgaggctggcatgctattacctttatgtgccctgtagacttgaatgaccagtttgaccagtttgactgttagataatctgaaggcttttctctttttttataatagaccccatctcaaatcagataatgaaaattacatatcttgatatattagaaaagtatatacattctggctgggcacggtggctcacacctgtaatccctgcactttgagaggctggggcggatcacttgaggtcaggagtttgagaccagcctggccaacgtggcgaaaccccatctctactaaaaatacacagattagcccggagtgatggtgtgcacctgttgtcccagctactcaggatgctgaggcaggagaatccctttaacctggggggcgaaggttgcagtgagccaagattgcaccactgcactccagcctgggtgacagaacgagactctgtctcagaaaaaaaaaaaaagaaaaggaaaaagaaaaatatatattctatatttttttaacttatgagaatgtgttcatttcatttgtaacatataatgggaaacagtaatacgtactctgagaaaaattgcaaagcacagataaatggaaataaacaggaaaaagaatcacctataacctcaccatccatagacagacactgttaaaattttggcatatttcctgctgattttttctactgctgatttttgcacaggtgagataattttgaacagagaattttgtatctttggtttttgtgttttgctgcacacaaaaacaaaagatataaaaatggatcataaacatttttctaaatcctgaaaaatgcatagacatattttagtgcctgtatttcacaagatggacataccataatttacttacacagtcctttttgttagatgtttaagttgttttcaagcttctcagtgctggaaaaaatactgagatagacatgtttagttgaagttatttcatttcaggttatattatcttgggtcagagaatgaatggttctcaggcttttcaaaagagctggtcagtttttatgcctctggcagtttttgagagtgctcaatcatactacactgttgccagcattagatcttatcacatttaagtcattgctaattttataaacaaaaacaatggttttactttgcatctccctgattggtattgctgtagaacatatttggagaagtttgtttgtctttggtgtttatttcatgaatagattgtgtgcccattttctcttggggtattcagttttttattactgatgtgagcatgtgtatgggtgattatttgatgattatcagttttgcttagtagactggcaatatttagtcttgctgtcactgtgttcccagtgcctactagattgcttgatatgtagttgccactcaataaagatttgttgagtcaatgaa

SEQ ID NO: 172358 - DNA, 961 bp, Homo sapiens
  Payload ID: 13887
  Gene Symbol: PCBD2
  Gene Name: pterin-4 alpha-carbinolamine dehydratase/dimerization cofactor of hepatocyte nuclear factor 1 alpha (TCF1) 2
  ENST ID: ENST00000504352
  CDS Start-End: 1-360
cggcgcttgttggcggcgctgcgaggccagagcctagggctagcggccatgtcatcaggtactcacaggttgactgcagaggagaggaaccaagctatacttgaccttaaagcagcaggatggtcggaattaagtgagagagatgccatctacaaagaattctccttccacaattttaatcaggcatttggctttatgtcccgagttgccctacaagcagagaagatgaatcatcacccagaatggttcaatgtatacaacaaggtccagataactctcacctcacatgactgtggtgaactgaccaaaaaagatgtgaagctggccaagtttattgaaaaagcagctgcttctgtgtgatttcttccaaaatacatgaggaacgatgatgaatgtcgggcatttgtgaagagagtcataatgagccgtttctttaagataattatgattagcactgtcacatcgaatgcgttttttatggccttgtggaccagttatgacataaggtaccgcttgttcagacttcttgagggtggtggtacagccattgaaaataacatgtatgaaagcccctggttaactgtgaaactgagaaattattaacacttctgggaactccactgaaggtgccgggaaagatgtgagagagccctgatctctcacctctggctaaccttgaggctctgtgcaagcaggaaatgaaggctgaggcagagtgttctcggagatcttctttgtgtccatctgcacatctgagttgtccatgaaggtctatgtggaccccatcaactactggaagaacggctacaacctgctggatgtgatcattatcatcgttatgtttttaccctatgccctccgccagctcatgggcaaacagttcacttacctgtatatcgctgatggcatgcagtccctgcgcatcctcaagcttatcggctatagccagggcatccggacg

SEQ ID NO: 172359 - DNA, 1790 bp, Homo sapiens
  Payload ID: 13888
  Gene Symbol: PTGES3L-AARSD1
  Gene Name: PTGES3L-AARSD1 readthrough
  Uniprot ID: Q9BTE6
  ENST ID: ENST00000360221
  CDS Start-End: 146-1723
tggagattccctgctccaagtcttctgggcgctccaggttctgtgaggccccacgggagccccggacccctggtctctgtaactgtggggtgagggaaggcagcacgcccggaccttgtggtacgacaggcccaggtatgtgttcatggagttttgtgttgaggacagcaccgatgtccacgtgcttattgaggatcaccgcattgtgttcagctgcaagaatgccgatggagtggagttgtacaatgagattgagttctatgccaaagtgaactccaaggactcccaggataagcgctcttcccgctctattacttgttttgtgagaaaatggaaggaaaaggtggcctggccgcggcttaccaaggaggatatcaagccagtgtggctgtctgtggactttgataactggagagactgggaaggggatgaagagatggagctggctcatgtggaacattatgcagagcttttgaagaaggtcagcaccaagagacctccacctgccatggatgatttggatttcaccaccaccgtggtctcctgctgtcccgcggagctgcagactgaagggagcaacggcaagaaagaagtgctgagcggtttccaagtggtgctggaagacacagtgcttttccctgagggcgggggacagcctgatgaccgtggtacaatcaatgacatctctgtgctgagagtgactcgccgtggggaacaggctgatcatttcacccagacacccctggatccaggaagccaggttctggtccgggtagattgggagcggaggtttgaccacatgcagcagcattcagggcagcatctcatcacggcagttgctgaccatctatttaagctgaagacaacatcatgggagttagggagatttcggagtgcgattgagctggacaccccctctatgactgcagagcaagtagctgccattgagcagagcgtcaatgaaaaaatcagagatcggctgcctgtgaatgtccgagaactgagcctggatgatcctgaggtggagcaggtgagtggccggggtttgcctgatgatcatgctgggcccattcgggttgttaacatcgagggcgttgattccaacatgtgctgtgggacccatgtgagcaatctcagtgaccttcaggtcattaagattctgggcactgagaaggggaaaaagaacagaaccaacctgatatttctgtctgggaaccgggtgctgaagtggatggagagaagtcatggaactgaaaaagcactgactgctctgcttaagtgtggagcagaggatcatgtggaagcagtgaaaaagctccagaactccaccaagatcctgcagaagaataacctgaatctgctcagagacctggctgtgcacattgcccatagcctcaggaacagtccagactggggaggtgtggtcatattacacaggaaggagggtgattcagagttcatgaatatcattgccaatgagattgggtcagaggagaccctcctgttcttaactgtgggcgatgagaaaggtggtggactcttcttactggcagggccacctgcgtctgtggagaccctggggcccagggtggctgaggtcctggaaggcaaaggagcagggaagaaaggccgttttcagggcaaggccaccaagatgagccggcggatggaggcgcaggcgcttctccaggactacatcagcacgcagagtgctaaggagtgagggcttagggcactcacctcctgtttccacaggaatcttttggtcaataaaatagattgactcagaa

SEQ ID NO: 172360 - DNA, 1670 bp, Homo sapiens
  Payload ID: 13888
  Gene Symbol: PTGES3L-AARSD1
  Gene Name: PTGES3L-AARSD1 readthrough
  ENST ID: ENST00000409103
  CDS Start-End: 136-1623
ctgctccaagtcttctgggcgctccaggttctgtgaggccccacgggagccccggacccctggtctctgtaactgtggggtgagggaaggcagcacgcccggaccttgtggtacgacaggcccaggtatgtgttcatggagttttgtgttgaggacagcaccgatgtccacgtgcttattgaggatcaccgcattgtgttcagctgcaagaatgccgatggagtggagttgtacaatgagattgagttctatgccaaagtgaactccaaggactcccaggataagcgctcttcccgctctattacttgttttgtgagaaaatggaaggaaaaggtggcctggccgcggcttaccaaggaggatatcaagcttttgaagaaggtcagcaccaagagacctccacctgccatggatgatttggatttcaccaccaccgtggtctcctgctgtcccgcggagctgcagactgaagggagcaacggcaagaaagaagtgctgagcggtttccaagtggtgctggaagacacagtgcttttccctgagggcgggggacagcctgatgaccgtggtacaatcaatgacatctctgtgctgagagtgactcgccgtggggaacaggctgatcatttcacccagacacccctggatccaggaagccaggttctggtccgggtagattgggagcggaggtttgaccacatgcagcagcattcagggcagcatctcatcacggcagttgctgaccatctatttaagctgaagacaacatcatgggagttagggagatttcggagtgcgattgagctggacaccccctctatgactgcagagcaagtagctgccattgagcagagcgtcaatgaaaaaatcagagatcggctgcctgtgaatgtccgagaactgagcctggatgatcctgaggtggagcaggtgagtggccggggtttgcctgatgatcatgctgggcccattcgggttgttaacatcgagggcgttgattccaacatgtgctgtgggacccatgtgagcaatctcagtgaccttcaggtcattaagattctgggcactgagaaggggaaaaagaacagaaccaacctgatatttctgtctgggaaccgggtgctgaagtggatggagagaagtcatggaactgaaaaagcactgactgctctgcttaagtgtggagcagaggatcatgtggaagcagtgaaaaagctccagaactccaccaagatcctgcagaagaataacctgaatctgctcagagacctggctgtgcacattgcccatagcctcaggaacagtccagactggggaggtgtggtcatattacacaggaaggagggtgattcagagttcatgaatatcattgccaatgagattgggtcagaggagaccctcctgttcttaactgtgggcgatgagaaaggtggtggactcttcttactggcagggccacctgcgtctgtggagaccctggggcccagggtggctgaggtcctggaaggcaaaggagcagggaagaaaggccgttttcagggcaaggccaccaagatgagccggcggatggaggcgcaggcgcttctccaggactacatcagcacgcagagtgctaaggagtgagggcttagggcactcacctcctgtttccacaggaatcttttggtcaa

SEQ ID NO: 172361 - DNA, 2042 bp, Homo sapiens
  Payload ID: 13888
  Gene Symbol: PTGES3L-AARSD1
  Gene Name: PTGES3L-AARSD1 readthrough
  Uniprot ID: Q9BTE6
  ENST ID: ENST00000409399
  CDS Start-End: 219-1979
ggcggggcctgaagtacccaagtccccgagggcgcgccttccccgggaatttaattcaggacaataatgttttattgagcgcctattgtgaatcagacactgagcagtaagcgtcggagaaacagtctatgcatttctgaagaccccacggtgaagggctgcaaggatgaagctgtcccagagtatctccagagtgcagatcccttggctgccaggtcatgttctctcttcctctcaactgctctcccgaccatataaggagaggcagctgctgggggcgtccccaggatctaaagatagcggcccctgcctggaactctaaatgccaccctggagcgggagccgcaatggcacggcagcacgcccggaccttgtggtacgacaggcccaggtatgtgttcatggagttttgtgttgaggacagcaccgatgtccacgtgcttattgaggatcaccgcattgtgttcagctgcaagaatgccgatggagtggagttgtacaatgagattgagttctatgccaaagtgaactccaaggactcccaggataagcgctcttcccgctctattacttgttttgtgagaaaatggaaggaaaaggtggcctggccgcggcttaccaaggaggatatcaagccagtgtggctgtctgtggactttgataactggagagactgggaaggggatgaagagatggagctggctcatgtggaacattatgcagagcttttgaagaaggtcagcaccaagagacctccacctgccatggatgatttggatttcaccaccaccgtggtctcctgctgtcccgcggagctgcagactgaagggagcaacggcaagaaagaagtgctgagcggtttccaagtggtgctggaagacacagtgcttttccctgagggcgggggacagcctgatgaccgtggtacaatcaatgacatctctgtgctgagagtgactcgccgtggggaacaggctgatcatttcacccagacacccctggatccaggaagccaggttctggtccgggtagattgggagcggaggtttgaccacatgcagcagcattcagggcagcatctcatcacggcagttgctgaccatctatttaagctgaagacaacatcatgggagttagggagatttcggagtgcgattgagctggacaccccctctatgactgcagagcaagtagctgccattgagcagagcgtcaatgaaaaaatcagagatcggctgcctgtgaatgtccgagaactgagcctggatgatcctgaggtggagcaggtgagtggccggggtttgcctgatgatcatgctgggcccattcgggttgttaacatcgagggcgttgattccaacatgtgctgtgggacccatgtgagcaatctcagtgaccttcaggtcattaagattctgggcactgagaaggggaaaaagaacagaaccaacctgatatttctgtctgggaaccgggtgctgaagtggatggagagaagtcatggaactgaaaaagcactgactgctctgcttaagtgtggagcagaggatcatgtggaagcagtgaaaaagctccagaactccaccaagatcctgcagaagaataacctgaatctgctcagagacctggctgtgcacattgcccatagcctcaggaacagtccagactggggaggtgtggtcatattacacaggaaggagggtgattcagagttcatgaatatcattgccaatgagattgggtcagaggagaccctcctgttcttaactgtgggcgatgagaaaggtggtggactcttcttactggcagggccacctgcgtctgtggagaccctggggcccagggtggctgaggtcctggaaggcaaaggagcagggaagaaaggccgttttcagggcaaggccaccaagatgagccggcggatggaggcgcaggcgcttctccaggactacatcagcacgcagagtgctaaggagtgagggcttagggcactcacctcctgtttccacaggaatcttttggtcaataaaatagattgactc

SEQ ID NO: 172362 - DNA, 566 bp, Homo sapiens
  Payload ID: 13888
  Gene Symbol: PTGES3L-AARSD1
  Gene Name: PTGES3L-AARSD1 readthrough
  ENST ID: ENST00000452752
  CDS Start-End: 1-566
gcagcacgcccggaccttgtggtacgacaggcccagctgcaagaatgccgatggagtggagttgtacaatgagattgagttctatgccaaagtgaactccaaggactcccaggataagcgctcttcccgctctattacttgttttgtgagaaaatggaaggaaaaggtggcctggccgcggcttaccaaggaggatatcaagccagtgtggctgtctgtggactttgataactggagagactgggaaggggatgaagagatggagctggctcatgtggaacattatgcagagcttttgaagaaggtcagcaccaagagacctccacctgccatggatgatttggatttcaccaccaccgtggtctcctgctgtcccgcggagctgcagactgaagggagcaacggcaagaaagaagtgctgagcggtttccaagtggtgctggaagacacagtgcttttccctgagggcgggggacagcctgatgaccgtggtacaatcaatgacatctctgtgctgagagtgactcgccgtggggaacaggctgatcatttcacccagacacccc

SEQ ID NO: 172363 - DNA, 584 bp, Homo sapiens
  Payload ID: 13888
  Gene Symbol: PTGES3L-AARSD1
  Gene Name: PTGES3L-AARSD1 readthrough
  ENST ID: ENST00000423601
  CDS Start-End: 1-160
aggcagctgctgggggcgtccccaggatctaaagatagcggcccctgcctggaactctaaatgccaccctggagcgggagccgcaatggcacgccacacctcaacttctcttcaggcagcacgcccggaccttgtggtacgacaggcccagagcaagtagctgccattgagcagagcgtcaatgaaaaaatcagagatcggctgcctgtgaatgtccgagaactgagcctggatgatcctgaggtggagcaggtgagtggccggggtttgcctgatgatcatgctgggcccattcgggttgttaacatcgagggcgttgattccaacatgtgctgtgggacccatgtgagcaatctcagtgaccttcaggtcattaagattctgggcactgagaaggggaaaaagaacagaaccaacctgatatttctgtctgggaaccgggtgctgaagtggatggagagaagtcatggaactgaaaaagcactgactgctctgcttaagtgtggagcagaggatcatgtggaagcagtgaaaaagctccagaactccaccaagatcctgcagaagaataacctgaatctgct

SEQ ID NO: 172364 - DNA, 594 bp, Homo sapiens
  Payload ID: 13888
  Gene Symbol: PTGES3L-AARSD1
  Gene Name: PTGES3L-AARSD1 readthrough
  ENST ID: ENST00000454303
  CDS Start-End: 198-594
aactctaaatgccaccctggagcgggagccgcaatggcacgctccactttgaaaaaactgtggcatcaaaggtccctgggtagtcccttcccaaatgacctcagtcttccctctcccacccctatgaagccacacctcaacttctcttcaggcagcacgcccggaccttgtggtacgacaggcccaggtatgtgttcatggagttttgtgttgaggacagcaccgatgtccacgtgcttattgaggatcaccgcattgtgttcagctgcaagaatgccgatggagtggagttgtacaatgagattgagttctatgccaaagtgaactccaaggactcccaggataagcgctcttcccgctctattacttgttttgtgagaaaatggaaggaaaaggtggcctggccgcggcttaccaaggaggatatcaagccagtgtggctgtctgtggactttgataactggagagactgggaaggggatgaagagatggagctggctcatgtggaacattatgcagagcttttgaagaaggtcagcaccaagagacctccacctgccatggatgatttggatttcaccaccaccgtggtct

SEQ ID NO: 172365 - DNA, 2150 bp, Homo sapiens
  Payload ID: 13888
  Gene Symbol: PTGES3L-AARSD1
  Gene Name: PTGES3L-AARSD1 readthrough
  Uniprot ID: Q9BTE6
  ENST ID: ENST00000421990
  CDS Start-End: 347-2107
gcaacggcgcggtggcctggaaccccaggggagtggtgggcggggcctgaagtacccaagtccccgagggcgcgccttccccgggaatttaattcaggacaataatgttttattgagcgcctattgtgaatcagacactgagcagtaagcgtcggagaaacaggtgaatgataccggggaaaagtcattccctgtgtgtagcgtctagggcagcctttgccctggttccagcagatgggttgtctcttcatagtctatgcatttctgaagaccccacggtgaagggctgcaaggatgaagctgtcccagagtatctccagagtgcagatcccttggctgccaggtcatgttctctcttcctctcaactgctctcccgaccatataaggagaggcagctgctgggggcgtccccaggatctaaagatagcggcccctgcctggaactctaaatgccaccctggagcgggagccgcaatggcacggcagcacgcccggaccttgtggtacgacaggcccaggtatgtgttcatggagttttgtgttgaggacagcaccgatgtccacgtgcttattgaggatcaccgcattgtgttcagctgcaagaatgccgatggagtggagttgtacaatgagattgagttctatgccaaagtgaactccaaggactcccaggataagcgctcttcccgctctattacttgttttgtgagaaaatggaaggaaaaggtggcctggccgcggcttaccaaggaggatatcaagccagtgtggctgtctgtggactttgataactggagagactgggaaggggatgaagagatggagctggctcatgtggaacattatgcagagcttttgaagaaggtcagcaccaagagacctccacctgccatggatgatttggatttcaccaccaccgtggtctcctgctgtcccgcggagctgcagactgaagggagcaacggcaagaaagaagtgctgagcggtttccaagtggtgctggaagacacagtgcttttccctgagggcgggggacagcctgatgaccgtggtacaatcaatgacatctctgtgctgagagtgactcgccgtggggaacaggctgatcatttcacccagacacccctggatccaggaagccaggttctggtccgggtagattgggagcggaggtttgaccacatgcagcagcattcagggcagcatctcatcacggcagttgctgaccatctatttaagctgaagacaacatcatgggagttagggagatttcggagtgcgattgagctggacaccccctctatgactgcagagcaagtagctgccattgagcagagcgtcaatgaaaaaatcagagatcggctgcctgtgaatgtccgagaactgagcctggatgatcctgaggtggagcaggtgagtggccggggtttgcctgatgatcatgctgggcccattcgggttgttaacatcgagggcgttgattccaacatgtgctgtgggacccatgtgagcaatctcagtgaccttcaggtcattaagattctgggcactgagaaggggaaaaagaacagaaccaacctgatatttctgtctgggaaccgggtgctgaagtggatggagagaagtcatggaactgaaaaagcactgactgctctgcttaagtgtggagcagaggatcatgtggaagcagtgaaaaagctccagaactccaccaagatcctgcagaagaataacctgaatctgctcagagacctggctgtgcacattgcccatagcctcaggaacagtccagactggggaggtgtggtcatattacacaggaaggagggtgattcagagttcatgaatatcattgccaatgagattgggtcagaggagaccctcctgttcttaactgtgggcgatgagaaaggtggtggactcttcttactggcagggccacctgcgtctgtggagaccctggggcccagggtggctgaggtcctggaaggcaaaggagcagggaagaaaggccgttttcagggcaaggccaccaagatgagccggcggatggaggcgcaggcgcttctccaggactacatcagcacgcagagtgctaaggagtgagggcttagggcactcacctcctgtttccacaggaatcttttgg

SEQ ID NO: 172366 - DNA, 1238 bp, Homo sapiens
  Payload ID: 13889
  Gene Symbol: PRY
  Gene Name: PTPN13-like, Y-linked
  Uniprot ID: O14603
  ENST ID: ENST00000303728
  CDS Start-End: 228-671
aagaagaggagcacaccacaccagaaacagacatcttgcagtgtttcactgtctcaaccttatctgcacagtccgaggtcagtctgagagagcttctgagagacccaggatgaagggatgcagtgaggtcaagagcccaaccttctttcactgacacccacctctaaggactcagagagacatgaataaaatgggcctcaacaatcccaagagaccactcaaggacaatgggagccactgggcttggctttctactttcctggagacaagacaatttgaatggcactgactgccagggatgcaatattttatacttctctgagactacggggagcatgtgttctgaactttccttgaacagaggtcttgaggccagaaggaagaaggatcttaaagactcatttctctggagatatgggaaggttggctgtatctcacttccacttcgtgagatgaccgcctggattaacccaccccaaatttcagagattttccaaggctaccaccagagggtgcacggagctgatgcactgagcctgcaaaccaactctctgagaagcaggttatcttcacagtgcctcggacagagcttccttctcaggacactcgagagaggccgtggtttcagggcacttggggacatctgtggccacgttcatgaagaagactaagcctacttcatctcaggacccgcccaagagtggccgcggctttgggacacctggggtcgggtccaccatgaggataaaacctccttctcttctggacatgtccaggagtggccgttgctacaagtcacctggtgctacgaccagggtgagaataaagacgtctcctcaggaccctcccaggagagtacatggcattgagacatctggcggccaagtgaggaaaagacaccctgtctgcagcacccagaactgaggaggggcactgccctgggccttacttcccagccctggcctccaattctgaccttacaaaagtgtcccttgagtgaggcagtgaccacgcattgtcacagctaccaaagtgtggtttgcagatgatctgggcttgtttctggcagagattctggtacagagaaaggagaggcgctgagtggaaccacgatgggctgaggccaggggagacatcacaacctccaacaacactttttttcatgctttaataactcatttttcttagagaactaaagtagttgaaacaatatagaaacattttttaagtaggcatat

SEQ ID NO: 172367 - DNA, 1353 bp, Homo sapiens
  Payload ID: 13889
  Gene Symbol: PRY
  Gene Name: PTPN13-like, Y-linked
  Uniprot ID: O14603
  ENST ID: ENST00000477123
  CDS Start-End: 228-443
aagaagaggagcacaccacaccagaaacagacatcttgcagtgtttcactgtctcaaccttatctgcacagtccgaggtcagtctgagagagcttctgagagacccaggatgaagggatgcagtgaggtcaagagcccaaccttctttcactgacacccacctctaaggactcagagagacatgaataaaatgggcctcaacaatcccaagagaccactcaaggacaatgggagccactgggcttggctttctactttcctggagacaagacaatttgaatggcactgactgccagggatgcaatattttatacttctctgagactacggggagcatgtgttctgaactttccttgaacagaggtcttgaggccagaaggaagaaggatcttaaagactcatttctctggagagacggggtttcaccgtgtttaccatgctgatctggaatccctgtcctcaggtgatctggccgcttcgacctccaaaagtgctgagattacaagcttgaactgccatgcccaatgatatgggaaggttggctgtatctcacttccacttcgtgagatgaccgcctggattaacccaccccaaatttcagagattttccaaggctaccaccagagggtgcacggagctgatgcactgagcctgcaaaccaactctctgagaagcaggttatcttcacagtgcctcggacagagcttccttctcaggacactcgagagaggccgtggtttcagggcacttggggacatctgtggccacgttcatgaagaagactaagcctacttcatctcaggacccgcccaagagtggccgcggctttgggacacctggggtcgggtccaccatgaggataaaacctccttctcttctggacatgtccaggagtggccgttgctacaagtcacctggtgctacgaccagggtgagaataaagacgtctcctcaggaccctcccaggagagtacatggcattgagacatctggcggccaagtgaggaaaagacaccctgtctgcagcacccagaactgaggaggggcactgccctgggccttacttcccagccctggcctccaattctgaccttacaaaagtgtcccttgagtgaggcagtgaccacgcattgtcacagctaccaaagtgtggtttgcagatgatctgggcttgtttctggcagagattctggtacagagaaaggagaggcgctgagtggaaccacgatgggctgaggccaggggagacatcacaacctccaacaacactttttttcatgctttaataactcatttttcttagagaactaaagtagttgaaacaatatagaaacattttttaagtaggcatat

SEQ ID NO: 172368 - DNA, 1238 bp, Homo sapiens
  Payload ID: 13890
  Gene Symbol: PRY2
  Gene Name: PTPN13-like, Y-linked 2
  Uniprot ID: O14603
  ENST ID: ENST00000303804
  CDS Start-End: 228-671
aagaagaggagcacaccacaccagaaacagacatcttgcagtgtttcactgtctcaaccttatctgcacagtccgaggtcagtctgagagagcttctgagagacccaggatgaagggatgcagtgaggtcaagagcccaaccttctttcactgacacccacctctaaggactcagagagacatgaataaaatgggcctcaacaatcccaagagaccactcaaggacaatgggagccactgggcttggctttctactttcctggagacaagacaatttgaatggcactgactgccagggatgcaatattttatacttctctgagactacggggagcatgtgttctgaactttccttgaacagaggtcttgaggccagaaggaagaaggatcttaaagactcatttctctggagatatgggaaggttggctgtatctcacttccacttcgtgagatgaccgcctggattaacccaccccaaatttcagagattttccaaggctaccaccagagggtgcacggagctgatgcactgagcctgcaaaccaactctctgagaagcaggttatcttcacagtgcctcggacagagcttccttctcaggacactcgagagaggccgtggtttcagggcacttggggacatctgtggccacgttcatgaagaagactaagcctacttcatctcaggacccgcccaagagtggccgcggctttgggacacctggggtcgggtccaccatgaggataaaacctccttctcttctggacatgtccaggagtggccgttgctacaagtcacctggtgctacgaccagggtgagaataaagacgtctcctcaggaccctcccaggagagtacatggcattgagacatctggcggccaagtgaggaaaagacaccctgtctgcagcacccagaactgaggaggggcactgccctgggccttacttcccagccctggcctccaattctgaccttacaaaagtgtcccttgagtgaggcagtgaccacgcattgtcacagctaccaaagtgtggtttgcagatgatctgggcttgtttctggcagagattctggtacagagaaaggagaggcgctgagtggaaccacgatgggctgaggccaggggagacatcgcaacctccaacaacactttttttcatgctttaataactcatttttcttagagaactaaagtagttgaaacaatatagaaacattttttaagtaggcatat

SEQ ID NO: 172369 - DNA, 1353 bp, Homo sapiens
  Payload ID: 13890
  Gene Symbol: PRY2
  Gene Name: PTPN13-like, Y-linked 2
  Uniprot ID: O14603
  ENST ID: ENST00000472391
  CDS Start-End: 228-443
aagaagaggagcacaccacaccagaaacagacatcttgcagtgtttcactgtctcaaccttatctgcacagtccgaggtcagtctgagagagcttctgagagacccaggatgaagggatgcagtgaggtcaagagcccaaccttctttcactgacacccacctctaaggactcagagagacatgaataaaatgggcctcaacaatcccaagagaccactcaaggacaatgggagccactgggcttggctttctactttcctggagacaagacaatttgaatggcactgactgccagggatgcaatattttatacttctctgagactacggggagcatgtgttctgaactttccttgaacagaggtcttgaggccagaaggaagaaggatcttaaagactcatttctctggagagacggggtttcaccgtgtttaccatgctgatctggaatccctgtcctcaggtgatctggccgcttcgacctccaaaagtgctgagattacaagcttgaactgccatgcccaatgatatgggaaggttggctgtatctcacttccacttcgtgagatgaccgcctggattaacccaccccaaatttcagagattttccaaggctaccaccagagggtgcacggagctgatgcactgagcctgcaaaccaactctctgagaagcaggttatcttcacagtgcctcggacagagcttccttctcaggacactcgagagaggccgtggtttcagggcacttggggacatctgtggccacgttcatgaagaagactaagcctacttcatctcaggacccgcccaagagtggccgcggctttgggacacctggggtcgggtccaccatgaggataaaacctccttctcttctggacatgtccaggagtggccgttgctacaagtcacctggtgctacgaccagggtgagaataaagacgtctcctcaggaccctcccaggagagtacatggcattgagacatctggcggccaagtgaggaaaagacaccctgtctgcagcacccagaactgaggaggggcactgccctgggccttacttcccagccctggcctccaattctgaccttacaaaagtgtcccttgagtgaggcagtgaccacgcattgtcacagctaccaaagtgtggtttgcagatgatctgggcttgtttctggcagagattctggtacagagaaaggagaggcgctgagtggaaccacgatgggctgaggccaggggagacatcgcaacctccaacaacactttttttcatgctttaataactcatttttcttagagaactaaagtagttgaaacaatatagaaacattttttaagtaggcatat

SEQ ID NO: 172370 - DNA, 5038 bp, Homo sapiens; identical to SEQ ID NO: 171759
  Payload ID: 13891
  Gene Symbol:
  Gene Name: PTPRD
  ENST ID: ENST00000635279
  CDS Start-End: 52-4569

SEQ ID NO: 172371 - DNA, 8251 bp, Homo sapiens; identical to SEQ ID NO: 171756
  Payload ID: 13891
  Gene Symbol:
  Gene Name: PTPRD
  ENST ID: ENST00000635613
  CDS Start-End: 104-4624

SEQ ID NO: 172372 - DNA, 521 bp, Homo sapiens; identical to SEQ ID NO: 171764
  Payload ID: 13891
  Gene Symbol:
  Gene Name: PTPRD
  ENST ID: ENST00000634771
  CDS Start-End: 243-521

SEQ ID NO: 172373 - DNA, 9911 bp, Homo sapiens; identical to SEQ ID NO: 171758
  Payload ID: 13891
  Gene Symbol:
  Gene Name: PTPRD
  ENST ID: ENST00000634556
  CDS Start-End: 545-6283

SEQ ID NO: 172374 - DNA, 8242 bp, Homo sapiens; identical to SEQ ID NO: 171760
  Payload ID: 13891
  Gene Symbol:
  Gene Name: PTPRD
  ENST ID: ENST00000635611
  CDS Start-End: 107-4615

SEQ ID NO: 172375 - DNA, 8248 bp, Homo sapiens; identical to SEQ ID NO: 171761
  Payload ID: 13891
  Gene Symbol:
  Gene Name: PTPRD
  ENST ID: ENST00000634360
  CDS Start-End: 104-4621

SEQ ID NO: 172376 - DNA, 9472 bp, Homo sapiens; identical to SEQ ID NO: 171757
  Payload ID: 13891
  Gene Symbol:
  Gene Name: PTPRD
  ENST ID: ENST00000634608
  CDS Start-End: 107-5845

SEQ ID NO: 172377 - DNA, 8224 bp, Homo sapiens; identical to SEQ ID NO: 171766
  Payload ID: 13891
  Gene Symbol:
  Gene Name: PTPRD
  ENST ID: ENST00000634498
  CDS Start-End: 107-4597

SEQ ID NO: 172378 - DNA, 6210 bp, Homo sapiens; identical to SEQ ID NO: 171765
  Payload ID: 13891
  Gene Symbol:
  Gene Name: PTPRD
  ENST ID: ENST00000635012
  CDS Start-End: 107-5845

SEQ ID NO: 172379 - DNA, 5039 bp, Homo sapiens; identical to SEQ ID NO: 171762
  Payload ID: 13891
  Gene Symbol:
  Gene Name: PTPRD
  ENST ID: ENST00000634583
  CDS Start-End: 52-4569

SEQ ID NO: 172380 - DNA, 1697 bp, Homo sapiens; identical to SEQ ID NO: 171763
  Payload ID: 13891
  Gene Symbol:
  Gene Name: PTPRD
  ENST ID: ENST00000634307
  CDS Start-End: 816-1424

SEQ ID NO: 172381 - DNA, 5933 bp, Homo sapiens
  Payload ID: 13892
  Gene Symbol: PPFIBP1
  Gene Name: PTPRF interacting protein, binding protein 1 (liprin beta 1)
  Uniprot ID: Q86W92
  ENST ID: ENST00000228425
  CDS Start-End: 234-3251
gactcgtgtgctgcgagctggcggccgggccggagtgctggggctttgaactccgagaggaggtggaccagaacttttggaactagtgccggcggctctccaccccccagtataaaagaacgtgtggatcactttgctgagtacatccaagatttgaagaactgaaataaatcagctttaaacctgctttttaaaaatatctgggttggaatttgcccctgacaaataataaaatgatgagtgatgcaagtgacatgttggctgcagcgttggagcagatggatggtatcatagcaggttctaaggctctggaatattccaatgggatttttgattgccaatctcccacctctccattcatgggaagtttgcgagctctgcaccttgtggaagacctgcgtggattgttagagatgatggaaacagatgagaaagaaggcttgagatgccagatcccagattcaacagcagaaacgcttgttgaatggcttcagagtcaaatgacaaatggacacctaccagggaacggagatgtgtatcaagaaaggctggcacgtttagaaaatgataaagaatccctcgttcttcaggtaagtgtgttaacagaccaggtggaggctcagggagagaagattcgagatttggagttttgtcttgaagagcacagagagaaggtgaatgccacagaagaaatgctgcagcaggagcttctaagtaggacatccttagaaactcagaagttggatctgatggctgaaatatctaacttgaagttgaaactgacagctgtagagaaggacagattggattatgaagataagttcagagacacagaggggctgattcaggagatcaatgatttgaggttaaaagttagtgaaatggacagtgagagacttcagtatgaaaaaaagcttaaatcaaccaaagatgaactggcatctttaaaagaacaactagaagaaaaggaatctgaagtaaaaaggctacaagaaaaattggtttgcaagatgaaaggagaaggggttgaaattgttgatagagatgaaaattttaaaaagaagctcaaagaaaaaaacatcgaagtacaaaaaatgaaaaaagctgtggagtccttgatggcagcaaatgaagaaaaggatcggaaaatagaagatcttcgacagtgcctgaacaggtacaagaaaatgcaagacacggtggtactggcccaaggtaaaaaaggcaaagatggagaatatgaagagctgctcaattccagttccatctcctctttgctggatgcacagggtttcagtgatctggagaaaagtccatcacccactccagtaatgggatctcccagttgtgacccatttaacacaagtgttcccgaagagttccatactaccatcttgcaagtttccatcccttcattattgccagcaactgtaagcatggaaacttctgaaaaatcaaagttgactcctaagccagagacttcatttgaagaaaatgatggaaacataatccttggtgccactgttgatacccaactgtgtgataaacttttaacttcaagtctgcagaagtccagcagcctgggcaatctgaagaaagagacatctgatggggaaaaggaaactattcagaagacttcagaggacagagctccggcagaaagcaggccatttgggacccttcctcccaggcccccagggcaggacacctccatggatgacaaccccttcggcactcgaaaagtcagatcttcctttggccggggcttttttaaaatcaaaagtaacaagagaacagcaagtgcaccaaacttagatcgtaaacgaagtgccagtgcacccaccctagctgaaacagaaaaagagacagcagagcacctagatctggctggtgcttcttctcggccaaaagattcacagaggaacagtcccttccagataccgcctccatctccagattccaaaaagaaatccagaggtatcatgaaactctttggaaaacttaggagaagtcaatcaactacattcaacccagatgacatgtctgagcctgaattcaaaagaggagggacaagggcaaccgcggggccccgattaggttggtctcgagacttgggacagtctaacagtgacttggatatgccatttgccaagtggaccaaggagcaggtttgcaattggctgatggaacagggcttgggctcgtacctgaattctggcaagcactggattgcatctggccaaacgcttttgcaggcttctcaacaagatctagagaaggaacttggaatcaagcattcacttcatcgaaagaaactccagctagcactccaagccctgggatctgaagaagaaaccaatcatgggaagctggatttcaactgggtcactagatggttggatgacattggcctccctcaatataagacccagtttgatgaaggacgggttgatggtcgaatgctacattacatgactgttgatgacttactgtctctgaaggttgtaagtgtgctacaccatctcagtatcaaaagggccatccaggtcctgaggatcaataactttgaaccaaactgtctacggaggcggccatctgatgagaataccatcgccccatcagaagttcagaagtggactaaccatcgagtgatggagtggctgcgctccgtggacttggcagaatatgcgcccaatctcagaggcagtggtgtccatggtgggctcatggttctagagcctcgttttaacgtagaaacaatggctcagttattgaacatcccacccaataagactttgctgcgaagacatttggccactcatttcaaccttctgattggggctgaggcacagcaccagaagcgagatgccatggagctgccggattatgtacttctaacagctactgccaaagtgaagccaaagaaacttgcctttagcaattttgggaatttgagaaagaagaaacaggaagatggtgaagaatatgtttgtccaatggaattgggacaggcatcaggaagtgcatctaagaaaggatttaaacctggtttggatatgcgcctgtatgaggaagatgatttggaccggttagagcagatggaagattcagaagggacagtgagacagataggtgcattctctgaaggcatcaacaatctgacgcacatgttaaaagaagatgacatgtttaaagattttgctgcccgttcccccagtgccagcattacagatgaagactcaaacgtttgaccgtagcacctggatgaacattaggagtgcttagtcttttttctacttgcttttccaaacactcacagtatatacaacaggcagcggattgtctattgtttgttgttccaacttctgctgtcgagaagtttaaacagaaagcaggagtaatgtgccgattctgaagttgccacaaaaaataagacactggtgaatgagagtataattgtttttcttctatttaatgtaaaaatctgtgatatattatatttaaagtgttgcatttaagatgagtattttaccagagtgtttccattcatatccgcggtatggaggatttgaggaacagtaaccaggatgtgaatgattttgttacatcagtgttcactgtagccacctaagtaggacattatatgatttcagaatcaatatgtggaacttctttaagcattcagtgtgcccactaaatgccagccacacctccacttgcctcttattgtcttatttttatatatttttctaaatatatgtatatatacagtacatagaaaatagaacttttattttgtgacctaaggacgatggtgaaaagatcacgttttcaaaacaatctggtgatcagaatgttcatataccagctggtttctgaagaggtcagaatgatctttctccatactgacttttaacaatgttgatcattgaggctaaattaatatatatgaaatattcctttttgatgacaccacaaaattgttgaacagtttaagaatttcaaccttaatcttggatccctttacctcatatggaagaacttgagggacattagtatacttttttttaagatggagtcttgctctgtcacccaggttggagtgccatggcatgatcttggctcactgcaacctccacctcctgggtcaagccattctgcttcagccccaagtaggtgggactccaggcatgcaccaccatgcctggctaatttttgcatttttagtagagacagggtttcaccatattggccaggctgggactcgaactcctgaccttgtgatctgcccgcctcagcctcccaaagtactgggattataggcatgagccaccacgcccagcctgttatttttttattattattgtttttttttagtgacagagtctcattctgttgcccatgctggagtgcagtggcgtgatcatagctcactgcagccttgaattcctaggctccagtgatcctctcacctcagcttccctaatagctaggattacaggtgtgtggcctcccaccccaccccacccttcacacctggctgatttttcaaaaagtttttttgtagaaacagggtctcaccatgttgtccagcctggtctcaaactcctgtcctcaagtgatcctcccacctcagcctttcaaagtgctggaattacaggtgtgagccactctgcctggcctaccactaacttgaatacattcagaatcacctcctctccccaaaatttgtagaaatagtttttgaggaagccaaaagcaaagcagaaacctttacagtattgtttcttttctctttgttaactgtgtcattacagcaaaatactagcagtctgcctaaacatgttcattgtacatttctcaggctatcaatgaatggaggtttttaaaaagttgaatatttgtctgaacattttatttcaaagttcaaaaaaacagaggctgcaaaattcattttataatggctattttgtgacgataagatgtagttcatgtttttctgtagcactgggcccaaatattctttgtaaagaaaatcgctgcagcaaaaactgttactgtgtttattatatttgtagaagtattagaaaaatattctattttttattcagtgctgcgtaattacccatggtagccaaccctacaaaagacaggttttcacaaattgaggtggaggtgggcggttcagtatctgccactggacttgattataaactgtatttgaatatcagtggtattatcttttaagttgtcagcaagttaccaaggtattcattaaagaacttgtaatatcaaattactatttattcataacaattgatttgatgctaataataattttctttaaactctaccattcattatgtggtaactgtattgaacttactttatttggattttattttaatgtgactagatgtcaccacttcaaaaaatcaatttgttcttagaacctggttgaaaataccaggaaactgttacagacgccattttttttttttttgagacggagtcttgctctgttgcccaggctggagtgcagtggcacaatctcagctcactgcaagctccgcctcctgggttcacgccattctcccacctcagcttcccaagcagctgggactacaggtacctgccaccacgcctggctaattttgtttttgtatttttagtagagacggggtttcaccgtgttagccaggaaggtctcaatctcctgacctcgtgaatcgcccccctcggtctcccaaagtgctgggattacaggcgtgagccaccatgcccggcccaaatattttttattcaggatggtataacctaactgataataggtaataaggttaaatttttttatgacgtattttatttacaaatatcatacactgctggtgttaccatatgaaaggaaataaagtcaattgataattgcctca

SEQ ID NO: 172382 - DNA, 6001 bp, Homo sapiens
  Payload ID: 13892
  Gene Symbol: PPFIBP1
  Gene Name: PTPRF interacting protein, binding protein 1 (liprin beta 1)
  Uniprot ID: Q86W92
  ENST ID: ENST00000318304
  CDS Start-End: 284-3319
ggattcctgacatggtgtagtgcaggcagggtggggaaaggacggggaaggactcgtgtgctgcgagctggcggccgggccggagtgctggggctttgaactccgagaggaggtggaccagaacttttggaactagtgccggcggctctccaccccccagtataaaagaacgtgtggatcactttgctgagtacatccaagatttgaagaactgaaataaatcagctttaaacctgctttttaaaaatatctgggttggaatttgcccctgacaaataataaaatgatgagtgatgcaagtgacatgttggctgcagcgttggagcagatggatggtatcatagcaggttctaaggctctggaatattccaatgggatttttgattgccaatctcccacctctccattcatgggaagtttgcgagctctgcaccttgtggaagacctgcgtggattgttagagatgatggaaacagatgagaaagaaggcttgagatgccagatcccagattcaacagcagaaacgcttgttgaatggcttcagagtcaaatgacaaatggacacctaccagggaacggagatgtgtatcaagaaaggctggcacgtttagaaaatgataaagaatccctcgttcttcaggtaagtgtgttaacagaccaggtggaggctcagggagagaagattcgagatttggagttttgtcttgaagagcacagagagaaggtgaatgccacagaagaaatgctgcagcaggagcttctaagtaggacatccttagaaactcagaagttggatctgatggctgaaatatctaacttgaagttgaaactgacagctgtagagaaggacagattggattatgaagataagttcagagacacagaggggctgattcaggagatcaatgatttgaggttaaaagttagtgaaatggacagtgagagacttcagtatgaaaaaaagcttaaatcaaccaaatctttaatggccaaactttctagcatgaaaatcaaggtgggtcagatgcagtatgaaaagcagcggatggaacaaaaatgggagtcactgaaggatgaactggcatctttaaaagaacaactagaagaaaaggaatctgaagtaaaaaggctacaagaaaaattggtttgcaagatgaaaggagaaggggttgaaattgttgatagagacatcgaagtacaaaaaatgaaaaaagctgtggagtccttgatggcagcaaatgaagaaaaggatcggaaaatagaagatcttcgacagtgcctgaacaggtacaagaaaatgcaagacacggtggtactggcccaaggcaaagatggagaatatgaagagctgctcaattccagttccatctcctctttgctggatgcacagggtttcagtgatctggagaaaagtccatcacccactccagtaatgggatctcccagttgtgacccatttaacacaagtgttcccgaagagttccatactaccatcttgcaagtttccatcccttcattattgccagcaactgtaagcatggaaacttctgaaaaatcaaagttgactcctaagccagagacttcatttgaagaaaatgatggaaacataatccttggtgccactgttgatacccaactgtgtgataaacttttaacttcaagtctgcagaagtccagcagcctgggcaatctgaagaaagagacatctgatggggaaaaggaaactattcagaagacttcagaggacagagctccggcagaaagcaggccatttgggacccttcctcccaggcccccagggcaggacacctccatggatgacaaccccttcggcactcgaaaagtcagatcttcctttggccggggcttttttaaaatcaaaagtaacaagagaacagcaagtgcaccaaacttagctgaaacagaaaaagagacagcagagcacctagatctggctggtgcttcttctcggccaaaagattcacagaggaacagtcccttccagataccgcctccatctccagattccaaaaagaaatccagaggtatcatgaaactctttggaaaacttaggagaagtcaatcaactacattcaacccagatgacatgtctgagcctgaattcaaaagaggagggacaagggcaaccgcggggccccgattaggttggtctcgagacttgggacagtctaacagtgacttggatatgccatttgccaagtggaccaaggagcaggtttgcaattggctgatggaacagggcttgggctcgtacctgaattctggcaagcactggattgcatctggccaaacgcttttgcaggcttctcaacaagatctagagaaggaacttggaatcaagcattcacttcatcgaaagaaactccagctagcactccaagccctgggatctgaagaagaaaccaatcatgggaagctggatttcaactgggtcactagatggttggatgacattggcctccctcaatataagacccagtttgatgaaggacgggttgatggtcgaatgctacattacatgactgttgatgacttactgtctctgaaggttgtaagtgtgctacaccatctcagtatcaaaagggccatccaggtcctgaggatcaataactttgaaccaaactgtctacggaggcggccatctgatgagaataccatcgccccatcagaagttcagaagtggactaaccatcgagtgatggagtggctgcgctccgtggacttggcagaatatgcgcccaatctcagaggcagtggtgtccatggtgggctcatggttctagagcctcgttttaacgtagaaacaatggctcagttattgaacatcccacccaataagactttgctgcgaagacatttggccactcatttcaaccttctgattggggctgaggcacagcaccagaagcgagatgccatggagctgccggattatgtacttctaacagctactgccaaagtgaagccaaagaaacttgcctttagcaattttgggaatttgagaaagaagaaacaggaagatggtgaagaatatgtttgtccaatggaattgggacaggcatcaggaagtgcatctaagaaaggatttaaacctggtttggatatgcgcctgtatgaggaagatgatttggaccggttagagcagatggaagattcagaagggacagtgagacagataggtgcattctctgaaggcatcaacaatctgacgcacatgttaaaagaagatgacatgtttaaagattttgctgcccgttcccccagtgccagcattacagatgaagactcaaacgtttgaccgtagcacctggatgaacattaggagtgcttagtcttttttctacttgcttttccaaacactcacagtatatacaacaggcagcggattgtctattgtttgttgttccaacttctgctgtcgagaagtttaaacagaaagcaggagtaatgtgccgattctgaagttgccacaaaaaataagacactggtgaatgagagtataattgtttttcttctatttaatgtaaaaatctgtgatatattatatttaaagtgttgcatttaagatgagtattttaccagagtgtttccattcatatccgcggtatggaggatttgaggaacagtaaccaggatgtgaatgattttgttacatcagtgttcactgtagccacctaagtaggacattatatgatttcagaatcaatatgtggaacttctttaagcattcagtgtgcccactaaatgccagccacacctccacttgcctcttattgtcttatttttatatatttttctaaatatatgtatatatacagtacatagaaaatagaacttttattttgtgacctaaggacgatggtgaaaagatcacgttttcaaaacaatctggtgatcagaatgttcatataccagctggtttctgaagaggtcagaatgatctttctccatactgacttttaacaatgttgatcattgaggctaaattaatatatatgaaatattcctttttgatgacaccacaaaattgttgaacagtttaagaatttcaaccttaatcttggatccctttacctcatatggaagaacttgagggacattagtatacttttttttaagatggagtcttgctctgtcacccaggttggagtgccatggcatgatcttggctcactgcaacctccacctcctgggtcaagccattctgcttcagccccaagtaggtgggactccaggcatgcaccaccatgcctggctaatttttgcatttttagtagagacagggtttcaccatattggccaggctgggactcgaactcctgaccttgtgatctgcccgcctcagcctcccaaagtactgggattataggcatgagccaccacgcccagcctgttatttttttattattattgtttttttttagtgacagagtctcattctgttgcccatgctggagtgcagtggcgtgatcatagctcactgcagccttgaattcctaggctccagtgatcctctcacctcagcttccctaatagctaggattacaggtgtgtggcctcccaccccaccccacccttcacacctggctgatttttcaaaaagtttttttgtagaaacagggtctcaccatgttgtccagcctggtctcaaactcctgtcctcaagtgatcctcccacctcagcctttcaaagtgctggaattacaggtgtgagccactctgcctggcctaccactaacttgaatacattcagaatcacctcctctccccaaaatttgtagaaatagtttttgaggaagccaaaagcaaagcagaaacctttacagtattgtttcttttctctttgttaactgtgtcattacagcaaaatactagcagtctgcctaaacatgttcattgtacatttctcaggctatcaatgaatggaggtttttaaaaagttgaatatttgtctgaacattttatttcaaagttcaaaaaaacagaggctgcaaaattcattttataatggctattttgtgacgataagatgtagttcatgtttttctgtagcactgggcccaaatattctttgtaaagaaaatcgctgcagcaaaaactgttactgtgtttattatatttgtagaagtattagaaaaatattctattttttattcagtgctgcgtaattacccatggtagccaaccctacaaaagacaggttttcacaaattgaggtggaggtgggcggttcagtatctgccactggacttgattataaactgtatttgaatatcagtggtattatcttttaagttgtcagcaagttaccaaggtattcattaaagaacttgtaatatcaaattactatttattcataacaattgatttgatgctaataataattttctttaaactctaccattcattatgtggtaactgtattgaacttactttatttggattttattttaatgtgactagatgtcaccacttcaaaaaatcaatttgttcttagaacctggttgaaaataccaggaaactgttacagacgccattttttttttttttgagacggagtcttgctctgttgcccaggctggagtgcagtggcacaatctcagctcactgcaagctccgcctcctgggttcacgccattctcccacctcagcttcccaagcagctgggactacaggtacctgccaccacgcctggctaattttgtttttgtatttttagtagagacggggtttcaccgtgttagccaggaaggtctcaatctcctgacctcgtgaatcgcccccctcggtctcccaaagtgctgggattacaggcgtgagccaccatgcccggcccaaatattttttattcaggatggtataacctaactgataataggtaataaggttaaatttttttatgacgtattttatttacaaatatcatacactgctggtgttaccatatgaaaggaaataaagtcaattgataattgcctca

SEQ ID NO: 172383 - DNA, 559 bp, Homo sapiens
  Payload ID: 13892
  Gene Symbol: PPFIBP1
  Gene Name: PTPRF interacting protein, binding protein 1 (liprin beta 1)
  ENST ID: ENST00000535575
  CDS Start-End: 301-559
ccggctccaatccctggatggctttaagtccagcaaacctttctgtttttcctatcgctcttctctttgcttaacctctcctctttcctccagacccacttaaaagcagttcatcaggaaaacttagctgacagtctcagtcagaactcactcgtgcaggaactttgcaggaagcagtataaaagaacgtgtggatcactttgctgagtacatccaagatttgaagaactgaaataaatcagctttaaacctgctttttaaaaatatctgggttggaatttgcccctgacaaataataaaatgatgagtgatgcaagtgacatgttggctgcagcgttggagcagatggatggtatcatagcaggttctaaggctctggaatattccaatgggatttttgattgccaatctcccacctctccattcatgggaagtttgcgagctctgcaccttgtggaagacctgcgtggattgttagagatgatggaaacagatgagaaagaaggcttgagatgccagatcccagattcaacagcagaaacgcttgttgaatggcttc

SEQ ID NO: 172384 - DNA, 2805 bp, Homo sapiens
  Payload ID: 13892
  Gene Symbol: PPFIBP1
  Gene Name: PTPRF interacting protein, binding protein 1 (liprin beta 1)
  ENST ID: ENST00000545334
  CDS Start-End: 332-661
ggtacctggaactgggagtgatgtcagctcccagctcggtgcctgcccggattcctgacatggtgtagtgcaggcagggtggggaaaggacggggaaggactcgtgtgctgcgagctggcggccgggccggagtgctggggctttgaactccgagaggaggtggaccagaacttttggaactagtgccggcggctctccaccccccagtataaaagaacgtgtggatcactttgctgagtacatccaagatttgaagaactgaaataaatcagctttaaacctgctttttaaaaatatctgggttggaatttgcccctgacaaataataaaatgatgagtgatgcaagtgacatgttggctgcagcgttggagcagatggatggtatcatagcaggttctaaggctctggaatattccaatgggatttttgattgccaatctcccacctctccattcatgggaagtttgcgagctctgcaccttgtggaagacctgcgtggattgttagagatgatggaaacagatgagaaagaaggcttgagatgccagatcccagattcaacagcagaaacgcttgttgaatggcttcagagtcaaatggtagggtctgcctgttccaaattctgttataaatcctttgttgcttattccaaaatttagaacatagaatagctgattagaacaagaaaagtttagggcaacacatgtgctccgattttattacttaagatatcttaattttcttttgactctaaggataactttttaaaaagtgctattagtgtacattttgtaaataccaacaacaggtcacctgattctgcccataaaaacagactggcttttagattgtgcctgaatgacctactgtggcttaaatcaaatagtcctgtaagggaaagaatcttgcacatgatagatgatttctcagtcatattgggttattcaccataaaggatccaatagcaattctaaatggaaagcatgatgaaagactttcaaaaagcaacaggatttacagcagtatttgaccggaagtgccatctagtggtttatggcaatcatttcagttccagttcccgaattaaattgtggagttgggcctttaacccatttatgcgcagtgttccattattggaacgctaagcttgtgggagttatttatatcctgctcaaagtcatcgccaaggtctcatttaaaaaaaaaaaatcacaacctccagcataaatgggttaatggtgttactcactgaacaatgaggccgctttctaggcatccttctcaaaaattgaagatgtggcagagctaccctttgtctgggcacggttggaaatactgtggttttaatctgtgatgaatacataaaatctaaagaatgtcacaaaaacagattcagtggaggacagaggaaaggagatattttgtgcttaaaggatattcaattttcagtaagatgcactcatatgcttatgagttaactgtgttgatataaaagctaataagaattgtatgaaagaatcgtgatctactttatgatctgtggtagacatgaaaaccgcttgctttgggaaccttaagagtacatcctacagctaaaacattttcatatgatgtgacacaaatattagagctcccagccagtcctgtgctgaatactctgtgttcccacctggtttacctctgcgtttctgagagcgaatagtacaatctatcctttagtgggggtgcagctacacaaactggagttattttacttgttaaaacacataatgccttactattatactttctatttgctctacagatttctcctccagagacttaagggtccaggtttgctgatttctttggggattgcttcatgctctgtacttggtgtttcctgacatattccttagtctatttcaatgtcctatctcaccccttctttactccatgttcttctgaccatttagcatgcagtgaaaaaggaatttactattgttagaagaacgtatttctatcccacacccagaggccaccaatggcaatagtagccgaagcgtacctgtagttcagcttttgacatgtgtctaaaacatgtccattaacatgtgcttaatctgttctgtgaaagtattttcagaaatgataaaaagtaatgatggttacatctgaatataagttagatcatgacactcactccttttttcagaaactaccagtggcatcacatcttactcagagtaaaaaccacagtgcttactgtgggctgcaaggcctcgtaggatttgccccccatgactttctgacttcatctcttgtcacacatctccttattcgctccacgccaagcacagtggctttttcactgattcttaaacatgccaggtacactggcctcagagcctttgcactggcttttccaggcactggcttttcactctgcctggaaagctctttcgccagatatttgcatggctagctccctcacattctcctggtgtttactcaaaagtcatgctctcagtgaggccttgtatcaccaccctaactaaaattatacccatttattccttgtcttacatctccctgcttattttgttcttagcattcaccattttcttatgtgcaatgtgtttgtgatgtttatatcatttattttctgtctttccaattggaatgtaagcatcaggaatcagatttttgcccttattttaaaaaaattactgtatccctggtgcttagaagaatgcctggctcagtagttatatttgtaatgaatgatgctccatgaatgataaagtggattgcatgtttgaat

SEQ ID NO: 172385 - DNA, 973 bp, Homo sapiens
  Payload ID: 13892
  Gene Symbol: PPFIBP1
  Gene Name: PTPRF interacting protein, binding protein 1 (liprin beta 1)
  ENST ID: ENST00000539326
  CDS Start-End: 1-728
atgacattggcctccctcaatataagacccagtttgatgaaggacgggttgatggtcgaatgctacattacatgactgttaataccatcgccccatcagaagttcagaagtggactaaccatcgagtgatggagtggctgcgctccgtggacttggcagaatatgcgcccaatctcagaggcagtggtgtccatggtgggctcatggttctagagcctcgttttaacgtagaaacaatggctcagttattgaacatcccacccaataagactttgctgcgaagacatttggccactcatttcaaccttctgattggggctgaggcacagcaccagaagcgagatgccatggagctgccggattatgtacttctaacagctactgccaaagtgaagccaaagaaacttgcctttagcaattttgggaatttgagaaagaagaaacaggaagatggtgaagaatatgtttgtccaatggaattgggacaggcatcaggaagtgcatctaagaaaggatttaaacctggtttggatatgcgcctgtatgaggaagatgatttggaccggttagagcagatggaagattcagaagggacagtgagacagataggtgcattctctgaaggcatcaacaatctgacgcacatgttaaaagaagatgacatgtttaaagattttgctgcccgttcccccagtgccagcattacagatgaagactcaaacgtttgaccgtagcacctggatgaacattaggagtgcttagtcttttttctacttgcttttccaaacactcacagtatatacaacaggcagcggattgtctattgtttgttgttccaacttctgctgtcgagaagtttaaacagaaagcaggagtaatgtgccgattctgaagttgccacaaaaaataagacactggtgaatgagagtataattgtttttcttctatttaatgtaaaaatctgtgatatatt

SEQ ID NO: 172386 - DNA, 609 bp, Homo sapiens
  Payload ID: 13892
  Gene Symbol: PPFIBP1
  Gene Name: PTPRF interacting protein, binding protein 1 (liprin beta 1)
  ENST ID: ENST00000538433
  CDS Start-End: 555-609
tgtgtgcattgaaacagcagccttaaggtctttaaacggggaaatacatttttcttgcttcagagattcaattttacttgcccgagaagcttgtgtggtgtgattttcatcgctaaaagcaacagcagccacatggctgacaacaccaccacttaacaattcaaagctcggtcaccgttttcaggagtctcttccaaatctttctgaagtgcttttgaagttctacattccccgtctaagggaacacccagcagtcccaggataaaagggcagaaggtataaaagaacgtgtggatcactttgctgagtacatccaagatttgaagaactgaaataaatcagctttaaacctgctttttaaaaatacaaatggacacctaccagggaacggagatgtgtatcaagaaaggctggcacgtttagaaaatgataaagaatccctcgttcttcaggtaagtgtgttaacagaccaggtggaggctcagggagagaagattcgagatttggagttttgtcttgaagagcacagagagaaggtgaatgccacagaagaaatgctgcagcaggagcttctaagtaggacatccttagaaactcagaagttggatc

SEQ ID NO: 172387 - DNA, 616 bp, Homo sapiens
  Payload ID: 13892
  Gene Symbol: PPFIBP1
  Gene Name: PTPRF interacting protein, binding protein 1 (liprin beta 1)
  ENST ID: ENST00000537261
  CDS Start-End: 1-616
aatgaagaaaaggatcggaaaatagaagatcttcgacagtgcctgaacaggtacaagaaaatgcaagacacggtggtactggcccaaggtaaaaaaggcaaagatggagaatatgaagagctgctcaattccagttccatctcctctttgctggatgcacagggtttcagtgatctggagaaaagtccatcacccactccagtaatgggatctcccagttgtgacccatttaacacaagtgttcccgaagagttccatactaccatcttgcaagtttccatcccttcattattgccagcaactgtaagcatggaaacttctgaaaaatcaaagttgactcctaagccagagacttcatttgaagaaaatgatggaaacataatccttggtgccactgttgatacccaactgtgtgataaacttttaacttcaagtctgcagaagtccagcagcctgggcaatctgaagaaagagacatctgatggggacagagctccggcagaaagcaggccatttgggacccttcctcccaggcccccagggcaggacacctccatggatgacaaccccttcggcactcgaaaagtcagatcttcctttggccggggctttttta

SEQ ID NO: 172388 - DNA, 3208 bp, Homo sapiens
  Payload ID: 13892
  Gene Symbol: PPFIBP1
  Gene Name: PTPRF interacting protein, binding protein 1 (liprin beta 1)
  Uniprot ID: Q86W92
  ENST ID: ENST00000542629
  CDS Start-End: 266-3208
agtgcaggcagggtggggaaaggacggggaaggactcgtgtgctgcgagctggcggccgggccggagtgctggggctttgaactccgagaggaggtggaccagaacttttggaactagtgccggcggctctccaccccccagtataaaagaacgtgtggatcactttgctgagtacatccaagatttgaagaactgaaataaatcagctttaaacctgctttttaaaaatatctgggttggaatttgcccctgacaaataataaaatgatgagtgatgcaagtgacatgttggctgcagcgttggagcagatggatggtatcatagcaggttctaaggctctggaatattccaatgggatttttgattgccaatctcccacctctccattcatgggaagtttgcgagctctgcaccttgtggaagacctgcgtggattgttagagatgatggaaacagatgagaaagaaggcttgagatgccagatcccagattcaacagcagaaacgcttgttgaatggcttcagagtcaaatgacaaatggacacctaccagggaacggagatgtgtatcaagaaaggctggcacgtttagaaaatgataaagaatccctcgttcttcaggtaagtgtgttaacagaccaggtggaggctcagggagagaagattcgagatttggagttttgtcttgaagagcacagagagaaggtgaatgccacagaagaaatgctgcagcaggagcttctaagtaggacatccttagaaactcagaagttggatctgatggctgaaatatctaacttgaagttgaaactgacagctgtagagaaggacagattggattatgaagataagttcagagacacagaggggctgattcaggagatcaatgatttgaggttaaaagttagtgaaatggacagtgagagacttcagtatgaaaaaaagcttaaatcaaccaaagatgaactggcatctttaaaagaacaactagaagaaaaggaatctgaagtaaaaaggctacaagaaaaattggtttgcaagatgaaaggagaaggggttgaaattgttgatagagacatcgaagtacaaaaaatgaaaaaagctgtggagtccttgatggcagcaaatgaagaaaaggatcggaaaatagaagatcttcgacagtgcctgaacaggtacaagaaaatgcaagacacggtggtactggcccaaggcaaagatggagaatatgaagagctgctcaattccagttccatctcctctttgctggatgcacagggtttcagtgatctggagaaaagtccatcacccactccagtaatgggatctcccagttgtgacccatttaacacaagtgttcccgaagagttccatactaccatcttgcaagtttccatcccttcattattgccagcaactgtaagcatggaaacttctgaaaaatcaaagttgactcctaagccagagacttcatttgaagaaaatgatggaaacataatccttggtgccactgttgatacccaactgtgtgataaacttttaacttcaagtctgcagaagtccagcagcctgggcaatctgaagaaagagacatctgatggggaaaaggaaactattcagaagacttcagaggacagagctccggcagaaagcaggccatttgggacccttcctcccaggcccccagggcaggacacctccatggatgacaaccccttcggcactcgaaaagtcagatcttcctttggccggggcttttttaaaatcaaaagtaacaagagaacagcaagtgcaccaaacttagctgaaacagaaaaagagacagcagagcacctagatctggctggtgcttcttctcggccaaaagattcacagaggaacagtcccttccagataccgcctccatctccagattccaaaaagaaatccagaggtatcatgaaactctttggaaaacttaggagaagtcaatcaactacattcaacccagatgacatgtctgagcctgaattcaaaagaggagggacaagggcaaccgcggggccccgattaggttggtctcgagacttgggacagtctaacagtgacttggatatgccatttgccaagtggaccaaggagcaggtttgcaattggctgatggaacagggcttgggctcgtacctgaattctggcaagcactggattgcatctggccaaacgcttttgcaggcttctcaacaagatctagagaaggaacttggaatcaagcattcacttcatcgaaagaaactccagctagcactccaagccctgggatctgaagaagaaaccaatcatgggaagctggatttcaactgggtcactagatggttggatgacattggcctccctcaatataagacccagtttgatgaaggacgggttgatggtcgaatgctacattacatgactgttgatgacttactgtctctgaaggttgtaagtgtgctacaccatctcagtatcaaaagggccatccaggtcctgaggatcaataactttgaaccaaactgtctacggaggcggccatctgatgagaataccatcgccccatcagaagttcagaagtggactaaccatcgagtgatggagtggctgcgctccgtggacttggcagaatatgcgcccaatctcagaggcagtggtgtccatggtgggctcatggttctagagcctcgttttaacgtagaaacaatggctcagttattgaacatcccacccaataagactttgctgcgaagacatttggccactcatttcaaccttctgattggggctgaggcacagcaccagaagcgagatgccatggagctgccggattatgtacttctaacagctactgccaaagtgaagccaaagaaacttgcctttagcaattttgggaatttgagaaagaagaaacaggaagatggtgaagaatatgtttgtccaatggaattgggacaggcatcaggaagtgcatctaagaaaggatttaaacctggtttggatatgcgcctgtatgaggaagatgatttggaccggttagagcagatggaagattcagaagggacagtgagacagataggtgcattctctgaaggcatcaacaatctgacgcacatgttaaaagaagatgacatgtttaaagattttgctgcccgttcccccagtgccagcattacagatgaagactcaaacgtttga

SEQ ID NO: 172389 - DNA, 875 bp, Homo sapiens
  Payload ID: 13892
  Gene Symbol: PPFIBP1
  Gene Name: PTPRF interacting protein, binding protein 1 (liprin beta 1)
  Uniprot ID: Q86W92
  ENST ID: ENST00000535047
  CDS Start-End: 270-782
gtgtagtgcaggcagggtggggaaaggacggggaaggactcgtgtgctgcgagctggcggccgggccggagtgctggggctttgaactccgagaggaggtggaccagaacttttggaactagtgccggcggctctccaccccccagtataaaagaacgtgtggatcactttgctgagtacatccaagatttgaagaactgaaataaatcagctttaaacctgctttttaaaaatatctgggttggaatttgcccctgacaaataataaaatgatgagtgatgcaagtgacatgttggctgcagcgttggagcagatggatggtatcatagcaggttctaaggctctggaatattccaatgggatttttgattgccaatctcccacctctccattcatgggaagtttgcgagctctgcaccttgtggaagacctgcgtggattgttagagatgatggaaacagatgagaaagaaggcttgagatgccagatcccagattcaacagcagaaacgcttgttgaatggcttcagagtcaaatgacaaatggacacctaccagggaacggagatgtgtatcaagaaaggctggcacgtttagaaaatgataaagaatccctcgttcttcaggtaagtgtgttaacagaccaggtggaggctcagggagagaagattcgagatttggagttttgtcttgaagagcacagagagaaggtgaatgccacagaagaaatgctgcagcaggtatgtgcagaggccagaaccaagatgggatttccctgctgaactatgtgagatgctgcatttctatgttgtgtttgctctgatgcagcagtaagtttcttgattcatttagaccagcacattaaaaaaaaaaaa

SEQ ID NO: 172390 - DNA, 2645 bp, Homo sapiens
  Payload ID: 13892
  Gene Symbol: PPFIBP1
  Gene Name: PTPRF interacting protein, binding protein 1 (liprin beta 1)
  ENST ID: ENST00000540114
  CDS Start-End: 414-2645
gagtgatgtcagctcccagctcggtgcctgcccggattcctgacatggtgtagtgcaggcagggtggggaaaggacggggaaggactcgtgtgctgcgagctggcggccgggccggagtgctggggctttgaactccgagaggaggtggaccagaacttttggaactagtgccggcggctctccaccccccagtataaaagaacgtgtggatcactttgctgagtacatccaagatttgaagaactgaaataaatcagctttaaacctgctttttaaaaatacaaatggacacctaccagggaacggagatgtgtatcaagaaaggctggcacgtttagaaaatgataaagaatccctcgttcttcaggagcttctaagtaggacatccttagaaactcagaagttggatctgatggctgaaatatctaacttgaagttgaaactgacagctgtagagaaggacagattggattatgaagataagttcagagacacagaggggctgattcaggagatcaatgatttgaggttaaaagttagtgaaatggacagtgagagacttcagtatgaaaaaaagcttaaatcaaccaaatctttaatggccaaactttctagcatgaaaatcaaggtgggtcagatgcagtatgaaaagcagcggatggaacaaaaatgggagtcactgaaggatgaactggcatctttaaaagaacaactagaagaaaaggaatctgaagtaaaaaggctacaagaaaaattggtttgcaagatgaaaggagaaggggttgaaattgttgatagagacatcgaagtacaaaaaatgaaaaaagctgtggagtccttgatggcagcaaatgaagaaaaggatcggaaaatagaagatcttcgacagtgcctgaacaggtacaagaaaatgcaagacacggtggtactggcccaaggtaaaaaaggcaaagatggagaatatgaagagctgctcaattccagttccatctcctctttgctggatgcacagggtttcagtgatctggagaaaagtccatcacccactccagtaatgggatctcccagttgtgacccatttaacacaagtgttcccgaagagttccatactaccatcttgcaagtttccatcccttcattattgccagcaactgtaagcatggaaacttctgaaaaatcaaagttgactcctaagccagagacttcatttgaagaaaatgatggaaacataatccttggtgccactgttgatacccaactgtgtgataaacttttaacttcaagtctgcagaagtccagcagcctgggcaatctgaagaaagagacatctgatggggaaaaggaaactattcagaagacttcagaggacagagctccggcagaaagcaggccatttgggacccttcctcccaggcccccagggcaggacacctccatggatgacaaccccttcggcactcgaaaagtcagatcttcctttggccggggcttttttaaaatcaaaagtaacaagagaacagcaagtgcaccaaacttagctgaaacagaaaaagagacagcagagcacctagatctggctggtgcttcttctcggccaaaagattcacagaggaacagtcccttccagataccgcctccatctccagattccaaaaagaaatccagaggtatcatgaaactctttggaaaacttaggagaagtcaatcaactacattcaacccagatgacatgtctgagcctgaattcaaaagaggagggacaagggcaaccgcggggccccgattaggttggtctcgagacttgggacagtctaacagtgacttggatatgccatttgccaagtggaccaaggagcaggtttgcaattggctgatggaacagggcttgggctcgtacctgaattctggcaagcactggattgcatctggccaaacgcttttgcaggcttctcaacaagatctagagaaggaacttggaatcaagcattcacttcatcgaaagaaactccagctagcactccaagccctgggatctgaagaagaaaccaatcatgggaagctggatttcaactgggtcactagatggttggatgacattggcctccctcaatataagacccagtttgatgaaggacgggttgatggtcgaatgctacattacatgactgttgatgacttactgtctctgaaggttgtaagtgtgctacaccatctcagtatcaaaagggccatccaggtcctgaggatcaataactttgaaccaaactgtctacggaggcggccatctgatgagaataccatcgccccatcagaagttcagaagtggactaaccatcgagtgatggagtggctgcgctccgtggacttggcagaatatgcgcccaatctcagaggcagtggtgtccatggtgggctcatggttctagagcctcgttttaacgtagaaacaatggctcagttattgaacatcccacccaataagactttgctgcgaagacatttggccactcatttcaaccttctgattggggctgaggcacagcaccagaagcgagatgccatggagctgccggattatgtacttctaacagctactgccaaagtgaagccaaagaaacttgcctttagcaattttgggaatttg

SEQ ID NO: 172391 - DNA, 585 bp, Homo sapiens
  Payload ID: 13892
  Gene Symbol: PPFIBP1
  Gene Name: PTPRF interacting protein, binding protein 1 (liprin beta 1)
  ENST ID: ENST00000542187
  CDS Start-End: 129-585
agactggcacttacactatcagccctcctgcttatcaagccttcagactcagactggagctatacccttgggttttctgggtctccagcttgcagttagcagatcttgggacttctcagcctacataaatgcatctgggttggaatttgcccctgacaaataataaaatgatgagtgatgcaagtgacatgttggctgcagcgttggagcagatggatggtatcatagcaggttctaaggctctggaatattccaatgggatttttgattgccaatctcccacctctccattcatgggaagtttgcgagctctgcaccttgtggaagacctgcgtggattgttagagatgatggaaacagatgagaaagaaggcttgagatgccagatcccagattcaacagcagaaacgcttgttgaatggcttcagagtcaaatgacaaatggacacctaccagggaacggagatgtgtatcaagaaaggctggcacgtttagaaaatgataaagaatccctcgttcttcaggtaagtgtgttaacagaccaggtggaggctcagggagagaagattcgagatttggagtttt

SEQ ID NO: 172392 - DNA, 5719 bp, Homo sapiens
  Payload ID: 13892
  Gene Symbol: PPFIBP1
  Gene Name: PTPRF interacting protein, binding protein 1 (liprin beta 1)
  Uniprot ID: Q86W92
  ENST ID: ENST00000537927
  CDS Start-End: 462-3038
cagctcccagctcggtgcctgcccggattcctgacatggtgtagtgcaggcagggtggggaaaggacggggaaggactcgtgtgctgcgagctggcggccgggccggagtgctggggctttgaactccgagaggaggtggaccagaacttttggaactagtgccggcggctctccaccccccagtataaaagaacgtgtggatcactttgctgagtacatccaagatttgaagaactgaaataaatcagctttaaacctgctttttaaaaatacaaatggacacctaccagggaacggagatgtgtatcaagaaaggctggcacgtttagaaaatgataaagaatccctcgttcttcaggtaagtgtgttaacagaccaggtggaggctcagggagagaagattcgagatttggagttttgtcttgaagagcacagagagaaggtgaatgccacagaagaaatgctgcagcaggagcttctaagtaggacatccttagaaactcagaagttggatctgatggctgaaatatctaacttgaagttgaaactgacagctgtagagaaggacagattggattatgaagataagttcagagacacagaggggctgattcaggagatcaatgatttgaggttaaaagttagtgaaatggacagtgagagacttcagtatgaaaaaaagcttaaatcaaccaaatctttaatggccaaactttctagcatgaaaatcaaggtgggtcagatgcagtatgaaaagcagcggatggaacaaaaatgggagtcactgaaggatgaactggcatctttaaaagaacaactagaagaaaaggaatctgaagtaaaaaggctacaagaaaaattggtttgcaagatgaaaggagaaggggttgaaattgttgatagagacatcgaagtacaaaaaatgaaaaaagctgtggagtccttgatggcagcaaatgaagaaaaggatcggaaaatagaagatcttcgacagtgcctgaacaggtacaagaaaatgcaagacacggtggtactggcccaaggcaaagatggagaatatgaagagctgctcaattccagttccatctcctctttgctggatgcacagggtttcagtgatctggagaaaagtccatcacccactccagtaatgggatctcccagttgtgacccatttaacacaagtgttcccgaagagttccatactaccatcttgcaagtttccatcccttcattattgccagcaactgtaagcatggaaacttctgaaaaatcaaagttgactcctaagccagagacttcatttgaagaaaatgatggaaacataatccttggtgccactgttgatacccaactgtgtgataaacttttaacttcaagtctgcagaagtccagcagcctgggcaatctgaagaaagagacatctgatggggaaaaggaaactattcagaagacttcagaggacagagctccggcagaaagcaggccatttgggacccttcctcccaggcccccagggcaggacacctccatggatgacaaccccttcggcactcgaaaagtcagatcttcctttggccggggcttttttaaaatcaaaagtaacaagagaacagcaagtgcaccaaacttagctgaaacagaaaaagagacagcagagcacctagatctggctggtgcttcttctcggccaaaagattcacagaggaacagtcccttccagataccgcctccatctccagattccaaaaagaaatccagaggtatcatgaaactctttggaaaacttaggagaagtcaatcaactacattcaacccagatgacatgtctgagcctgaattcaaaagaggagggacaagggcaaccgcggggccccgattaggttggtctcgagacttgggacagtctaacagtgacttggatatgccatttgccaagtggaccaaggagcaggtttgcaattggctgatggaacagggcttgggctcgtacctgaattctggcaagcactggattgcatctggccaaacgcttttgcaggcttctcaacaagatctagagaaggaacttggaatcaagcattcacttcatcgaaagaaactccagctagcactccaagccctgggatctgaagaagaaaccaatcatgggaagctggatttcaactgggtcactagatggttggatgacattggcctccctcaatataagacccagtttgatgaaggacgggttgatggtcgaatgctacattacatgactgttgatgacttactgtctctgaaggttgtaagtgtgctacaccatctcagtatcaaaagggccatccaggtcctgaggatcaataactttgaaccaaactgtctacggaggcggccatctgatgagaataccatcgccccatcagaagttcagaagtggactaaccatcgagtgatggagtggctgcgctccgtggacttggcagaatatgcgcccaatctcagaggcagtggtgtccatggtgggctcatggttctagagcctcgttttaacgtagaaacaatggctcagttattgaacatcccacccaataagactttgctgcgaagacatttggccactcatttcaaccttctgattggggctgaggcacagcaccagaagcgagatgccatggagctgccggattatgtacttctaacagctactgccaaagtgaagccaaagaaacttgcctttagcaattttgggaatttgagaaagaagaaacaggaagatggtgaagaatatgtttgtccaatggaattgggacaggcatcaggaagtgcatctaagaaaggatttaaacctggtttggatatgcgcctgtatgaggaagatgatttggaccggttagagcagatggaagattcagaagggacagtgagacagataggtgcattctctgaaggcatcaacaatctgacgcacatgttaaaagaagatgacatgtttaaagattttgctgcccgttcccccagtgccagcattacagatgaagactcaaacgtttgaccgtagcacctggatgaacattaggagtgcttagtcttttttctacttgcttttccaaacactcacagtatatacaacaggcagcggattgtctattgtttgttgttccaacttctgctgtcgagaagtttaaacagaaagcaggagtaatgtgccgattctgaagttgccacaaaaaataagacactggtgaatgagagtataattgtttttcttctatttaatgtaaaaatctgtgatatattatatttaaagtgttgcatttaagatgagtattttaccagagtgtttccattcatatccgcggtatggaggatttgaggaacagtaaccaggatgtgaatgattttgttacatcagtgttcactgtagccacctaagtaggacattatatgatttcagaatcaatatgtggaacttctttaagcattcagtgtgcccactaaatgccagccacacctccacttgcctcttattgtcttatttttatatatttttctaaatatatgtatatatacagtacatagaaaatagaacttttattttgtgacctaaggacgatggtgaaaagatcacgttttcaaaacaatctggtgatcagaatgttcatataccagctggtttctgaagaggtcagaatgatctttctccatactgacttttaacaatgttgatcattgaggctaaattaatatatatgaaatattcctttttgatgacaccacaaaattgttgaacagtttaagaatttcaaccttaatcttggatccctttacctcatatggaagaacttgagggacattagtatacttttttttaagatggagtcttgctctgtcacccaggttggagtgccatggcatgatcttggctcactgcaacctccacctcctgggtcaagccattctgcttcagccccaagtaggtgggactccaggcatgcaccaccatgcctggctaatttttgcatttttagtagagacagggtttcaccatattggccaggctgggactcgaactcctgaccttgtgatctgcccgcctcagcctcccaaagtactgggattataggcatgagccaccacgcccagcctgttatttttttattattattgtttttttttagtgacagagtctcattctgttgcccatgctggagtgcagtggcgtgatcatagctcactgcagccttgaattcctaggctccagtgatcctctcacctcagcttccctaatagctaggattacaggtgtgtggcctcccaccccaccccacccttcacacctggctgatttttcaaaaagtttttttgtagaaacagggtctcaccatgttgtccagcctggtctcaaactcctgtcctcaagtgatcctcccacctcagcctttcaaagtgctggaattacaggtgtgagccactctgcctggcctaccactaacttgaatacattcagaatcacctcctctccccaaaatttgtagaaatagtttttgaggaagccaaaagcaaagcagaaacctttacagtattgtttcttttctctttgttaactgtgtcattacagcaaaatactagcagtctgcctaaacatgttcattgtacatttctcaggctatcaatgaatggaggtttttaaaaagttgaatatttgtctgaacattttatttcaaagttcaaaaaaacagaggctgcaaaattcattttataatggctattttgtgacgataagatgtagttcatgtttttctgtagcactgggcccaaatattctttgtaaagaaaatcgctgcagcaaaaactgttactgtgtttattatatttgtagaagtattagaaaaatattctattttttattcagtgctgcgtaattacccatggtagccaaccctacaaaagacaggttttcacaaattgaggtggaggtgggcggttcagtatctgccactggacttgattataaactgtatttgaatatcagtggtattatcttttaagttgtcagcaagttaccaaggtattcattaaagaacttgtaatatcaaattactatttattcataacaattgatttgatgctaataataattttctttaaactctaccattcattatgtggtaactgtattgaacttactttatttggattttattttaatgtgactagatgtcaccacttcaaaaaatcaatttgttcttagaacctggttgaaaataccaggaaactgttacagacgccattttttttttttttgagacggagtcttgctctgttgcccaggctggagtgcagtggcacaatctcagctcactgcaagctccgcctcctgggttcacgccattctcccacctcagcttcccaagcagctgggactacaggtacctgccaccacgcctggctaattttgtttttgtatttttagtagagacggggtttcaccgtgttagccaggaaggtctcaatctcctgacctcgtgaatcgcccccctcggtctcccaaagtgctgggattacaggcgtgagccaccatgcccggcccaaatattttttattcaggatggtataacctaactgataataggtaataaggttaaatttttttatgacgtattttatttacaaatatcatacactgctggtgttaccatatgaaaggaaataaagtcaattgataattgcctc

SEQ ID NO: 172393 - DNA, 1191 bp, Homo sapiens
  Payload ID: 13892
  Gene Symbol: PPFIBP1
  Gene Name: PTPRF interacting protein, binding protein 1 (liprin beta 1)
  ENST ID: ENST00000545381
  CDS Start-End: 348-1191
ggcagtgggagggggaggtacctggaactgggagtgatgtcagctcccagctcggtgcctgcccggattcctgacatggtgtagtgcaggcagggtggggaaaggacggggaaggactcgtgtgctgcgagctggcggccgggccggagtgctggggctttgaactccgagaggaggtggaccagaacttttggaactagtgccggcggctctccaccccccagtataaaagaacgtgtggatcactttgctgagtacatccaagatttgaagaactgaaataaatcagctttaaacctgctttttaaaaatatctgggttggaatttgcccctgacaaataataaaatgatgagtgatgcaagtgacatgttggctgcagcgttggagcagatggatggtatcatagcaggttctaaggctctggaatattccaatgggatttttgattgccaatctcccacctctccattcatgggaagtttgcgagctctgcaccttgtggaagacctgcgtggattgttagagatgatggaaacagatgagaaagaaggcttgagatgccagatcccagattcaacagcagaaacgcttgttgaatggcttcagagtcaaatgacaaatggacacctaccagggaacggagatgtgtatcaagaaaggctggcacgtttagaaaatgataaagaatccctcgttcttcaggtaagtgtgttaacagaccaggtggaggctcagggagagaagattcgagatttggagttttgtcttgaagagcacagagagaaggtgaatgccacagaagaaatgctgcagcaggagcttctaagtaggacatccttagaaactcagaagttggatctgatggctgaaatatctaacttgaagttgaaactgacagctgtagagaaggacagattggattatgaagataagttcagagacacagaggggctgattcaggagatcaatgatttgaggttaaaagttagtgaaatggacagtgagagacttcagtatgaaaaaaagcttaaatcaaccaaagatgaactggcatctttaaaagaacaactagaagaaaaggaatctgaagtaaaaaggctacaagaaaaattggtttgcaagatgaaaggagaaggggttgaaattgttgatagagatgaaaattttaaaaagaagctcaaagaaaaaa

SEQ ID NO: 172394 - DNA, 1565 bp, Homo sapiens
  Payload ID: 13892
  Gene Symbol: PPFIBP1
  Gene Name: PTPRF interacting protein, binding protein 1 (liprin beta 1)
  ENST ID: ENST00000619325
  CDS Start-End: 1-261
gacagagctccggcagaaagcaggccatttgggacccttcctcccaggcccccagggcaggacacctccatggatgacaaccccttcggcactcgaaaagtcagatcttcctttggccggggcttttttaaaatcaaaagtaacaagagaacagcaagtgcaccaaacttaggtacgtatgaccaaaatgcctttgccctaattcttccacaaggaggaaaagagcagtgtcttcccttcccttactctttcattcattgattcatttctctttctcagaaacgaaggtgaatgacttaggggaatttagcaaaaaatgcctccgtggatttaatttagtgttgtgaagatatatagactctcaccctgctctctcctgtggtataaacttagcggaaagacctaaaatcatgattccctttgacttcatcatggagtttcccatctgttgtgatagtggataaattaacattgacgttgagcctgtgtgtaacatcagaagcactgtgtgccgcatgcctctcctccacggtgtgtatttggcgaggaggagtctgatctgcatttcattttgtcatctctgtgttctctccattgggctgcgtgtgattgtgtgcgttgttgggatatctgaagatcgtaaacgaagtgccagtgcacccaccctaggtattgtacccctgcatgccagccttcaccagcactgtgctccaaaccaatctaatccctgctcttggcatctgtgatctctagaaagcgatctgacagcaatcagaaaatgtagttctctattccggagtgttctttccaccttctgctaaaaaggactctgtagaggctttgcttccaagcctaaatgctgttttaaccaatactagtaacactcactgtgtgaatagctttgagaggacctagacgtgtgcagcatccctcagagtgcagggcaggaatgtcctggcattgtacattgcagctctttcagccttgaagtgcatattaccacacactaactcccaggtccttgcagtccgttctccatgcttacatttcccccagcctccaaaaagaaatttttttggccatatagggaggtttatagaagacattgaatattatagttttaggcttacttctcttaggggaacattcttctgacgttttattactttgaagatggagataatatttagtgatgacagaagcaactttacttgatatctgaggcgttaccccccaaagtgattttagaagaggggcagctcagttttcctctttgtaaggcaggggacaaatggggaaaaaagttctcaaaataaaaaagagaaatatggtagttttaagatgaggataagctaggcagcattttcaggggcacctgtagccatcgtggttgaaggatttgaattgggaaagttcctttgggtttttccaaaaggtgctgttaccttgtatagatatccacctatctattcacatggaccagcaaacgggacttctctctctatcgatataaatgtctagaatgaacactggatgcataaaataaactgatctgttcagacaac

SEQ ID NO: 172395 - DNA, 3557 bp, Homo sapiens
  Payload ID: 13893
  Gene Symbol: PPFIBP2
  Gene Name: PTPRF interacting protein, binding protein 2 (liprin beta 2)
  Uniprot ID: Q8ND30
  ENST ID: ENST00000299492
  CDS Start-End: 389-3019
gctgaccaggccggtcccccgggaacaggaaccctggtggacgggtcccagcaggcttcttcggtgcccgagagggagcgggtgcccaagggggtggtccctgtggcaggtcccggggtgggggcgcggcgctccgggaagagccttccgcaggtccccgccccgtcacgtgggcgccggccccggccgctgcggtcggtccgctggttggtcgggcgcttggtccggcagttggtcggtgggccagtggcccgtcgctcgcttctgggctctcatgtttgaaggtgggagggacacgggagcggcccgcacacctgagccgcccggagaggagcctcggccccgtacccagtaagaagaggaggaggccaggcaggcaaaaggagtcatggcttctgatgctagtcatgcgctggaagctgccctggagcaaatggacgggatcattgcaggcactaaaacaggtgcagatcttagtgatggtacttgtgagcctggactggcttccccggcctcctacatgaaccccttcccggtgctccatctcatcgaggacttgaggctggccttggagatgctggagcttcctcaggagagagcagccctcctgagccagatccctggcccaacagctgcctacataaaggaatggtttgaagagagcttgtcccaggtaaaccaccacagtgctgctagtaatgaaacctaccaggaacgcttggcacgtctagaaggggataaggagtccctcatattgcaggtgagtgtcctcacagaccaagtagaagcccagggagaaaagattcgagacctggaagtgtgtctggaaggacaccaggtgaaactcaatgctgctgaagagatgcttcaacaggagctgctaagccgcacatctcttgagacccagaagctcgatctgatgactgaagtgtctgagctgaagctcaagctggttggcatggagaaggagcagagagagcaggaggagaagcagagaaaagcagaggagttactgcaagagctcaggcacctcaaaatcaaagtggaagagttggaaaatgaaaggaatcagtatgaatggaagctaaaggccactaaggctgaagtcgcccagctgcaagaacaggtggccctgaaagatgcagaaattgagcgtctgcacagccagctctcccggacagcagctctccacagtgagagtcacacagagagagaccaagaaattcaacgtctgaaaatggggatggaaactttgctgcttgccaatgaagataaggaccgtcggatagaggagcttacggggctgttaaaccagtaccggaaggtaaaggagattgtgatggtcactcaagggccttcggagagaactctctcaatcaatgaagaagaaccggagggaggtttcagcaagtggaacgctacaaataaggaccctgaagaattatttaaacaagagatgcctccaagatgtagctctcctacagtggggccacctccattgccacagaaatcactggaaaccagggctcagaaaaagctctcttgtagtctagaagacttgagaagtgaatctgtggataagtgtatggatgggaaccagcccttcccggtgttagaacccaaggacagccctttcttggcggagcacaaatatcccactttacctgggaagctttcaggagccacgcccaatggagaggctgccaaatctcctcccaccatctgccagcctgacgccacggggagcagcctgctgaggctgagagacacagaaagtggctgggacgacactgctgtggtcaatgacctctcatccacatcatcgggcactgaatcaggtcctcagtctcctctgacaccagatggtaaacggaatcccaaaggcattaagaagttctggggaaaaatccgaagaactcagtcaggaaatttctacactgacacgctggggatggcagagtttcgacgaggtgggctccgggcaaccgcagggccaagactctctaggaccagggactccaagggacagaaaagtgacgccaatgccccctttgcccagtggagcacagagcgtgtgtgtgcatggctggaggactttggcctggctcagtatgtgatctttgccaggcagtgggtatcttctggccacaccttattgacagccacccctcaggacatggaaaaggagctaggaattaagcacccactccacaggaagaagcttgttttagcagtgaaagccatcaacaccaaacaggaggagaagtctgcactgctagaccacatttgggtgacaaggtggcttgatgatattggcttaccccagtacaaagaccagtttcatgaatctagagttgacagacgaatgctgcaatacctaactgtgaacgatttactcttcttaaaagtcaccagccaactacatcatctcagcatcaaatgtgccattcacgtgctgcatgtcaacaagttcaacccccactgcctgcaccggcggccagctgatgagagtaacctttctccttcagaagttgtacagtggtccaaccacagggtgatggagtggttacgatctgtggacctggcagagtatgcacccaatcttcgagggagtggagtccatggaggcctcattatcctggagccacgcttcactggggacaccctggctatgcttctcaacatccccccacaaaagacgctcctcaggcgccacctgaccaccaagttcaatgccttgattggtccggaggctgaacaggagaagcgagagaaaatggcctcaccagcttacacaccactgaccaccacagccaaagtccggccaaggaaactaggattttcacacttcggaaacataagaaaaaagaagttcgatgaatcgacggactacatttgcccaatggagcccagtgacggtgtcagtgatagtcacagggtctacagtggctaccggggcctcagcccccttgatgcccctgaactggatgggctggaccaggtgggacagattagctgatgcccttgtcacctgccctctgtgcaccctgagagctcacagtaacactgtgtgtgtcaccatataactgcacctcacccccgcacgtgtgcatgactcgcagagaatattccagcaattgtgtacccctgggccagtctctttgaaccctgagggtggccaggatctggagctgcatctctaaggggccaggctttggggaccattgccaaaggtggactcaggaggaaagacacttaaagacacttttacatgtctagtaattcttgatgttcatcttcagcaccagtggaaacacatgaacttcgatgcaggtccagagaccatggacactcccacgaggctcagctctcaggcaccccctacacttcagttgagggaaaagctcaagtgccttaggcccgtggaccacagtcttggctgagatcaaagggatgagcaacagggacttctgccacagtgacaatggaattgtgttgtgccttacttcagaggtggtctcttctttcttgtaataaaagcaatatttatgcggaaa

SEQ ID NO: 172396 - DNA, 814 bp, Homo sapiens
  Payload ID: 13893
  Gene Symbol: PPFIBP2
  Gene Name: PTPRF interacting protein, binding protein 2 (liprin beta 2)
  ENST ID: ENST00000528947
  CDS Start-End: 547-814
gggctgaccaggccggtcccccgggaacaggaaccctggtggacgggtcccagcaggcttcttcggtgcccgagagggagcgggtgcccaagggggtggtccctgtggcaggtcccggggtgggggcgcggcgctccgggaagagccttccgcaggtccccgccccgtcacgtgggcgccggccccggccgctgcggtcggtccgctggttggtcgggcgcttggtccggcagttggtcggtgggccagtggcccgtcgctcgcttctgggctctcatgtttgaaggtgggagggacacgggagcggcccgcacacctgagccgcccggagaggagcctcggccccgtacccaggaaaaactggcggagagcctcagaaccacctgtttcctctgctgcaccatgcttgagtgtggaagccgtgcccctgttctccacagcgtgtatggccattcggcacatgtgtagatttgctgaatgagcaaacagcaactcctccagtttacagactaagaagaggaggaggccaggcaggcaaaaggagtcatggcttctgatgctagtcatgcgctggaagctgccctggagcaaatggacgggatcattgcaggcactaaaacaggtgcagatcttagtgatggtacttgtgagcctggactggcttccccggcctcctacatgaaccccttcccggtgctccatctcatcgaggacttgaggctggccttggagatgctggagcttcctcaggagagagcagccctcctgagccagatccctggcccaacagctgcctacataaaggaatggtttg

SEQ ID NO: 172397 - DNA, 534 bp, Homo sapiens
  Payload ID: 13893
  Gene Symbol: PPFIBP2
  Gene Name: PTPRF interacting protein, binding protein 2 (liprin beta 2)
  ENST ID: ENST00000526046
  CDS Start-End: 325-534
attcagcaactctgatagcaacgttctcagcagcctggcccctctgtcctgctatggctcctctttgtcctgacaggatatctcgctgtgttgggctcctctgtcctgagggaaatttagcacaatggccttgtccctcattgtgatataaagccagtgtctgtgggctctgccattgctctgaggagctgtcttcgcaggccaggtgtgcggcttctcctctccactgtcagatctgatcctgtgggggtcgtgacctctggatgttataggacctgtggaggacagtaagaagaggaggaggccaggcaggcaaaaggagtcatggcttctgatgctagtcatgcgctggaagctgccctggagcaaatggacgggatcattgcaggcactaaaacaggtgcagatcttagtgatggtacttgtgagcctggactggcttccccggcctcctacatgaaccccttcccggtgctccatctcatcgaggacttgaggctggccttggagatgctggagcttcctcaggagaga

SEQ ID NO: 172398 - DNA, 673 bp, Homo sapiens
  Payload ID: 13893
  Gene Symbol: PPFIBP2
  Gene Name: PTPRF interacting protein, binding protein 2 (liprin beta 2)
  ENST ID: ENST00000534409
  CDS Start-End: 1-673
agggccttcggagagaactctctcaatcaatgaagaagaaccggagggaggtttcagcaagtggaacgctacaaataaggaccctgaagaattatttaaacaagagatgcctccaagatgtagctctcctacagtggggccacctccattgccacagaaatcactggaaaccagggctcagaaaaagctctcttgtagtctagaagacttgagaagtgaatctgtggataagtgtatggatgggaaccagcccttcccggtgttagaacccaaggacagccctttcttggcggagcacaaatatcccactttacctgggaagctttcaggagccacgcccaatggagaggctgccaaatctcctcccaccatctgccagcctgacgccacggggagcagcctgctgaggctgaatcgtggccggagtgtcagtgcccccgtattaggagacacagaaagtggctgggacgacactgctgtggtcaatgacctctcatccacatcatcgggcactgaatcaggtcctcagtctcctctgacaccagatggtaaacggaatcccaaaggcattaagaagttctggggaaaaatccgaagaactcagtcaggaaatttctacactgacacgctggggatggcagagtttcgacgaggtgggctccgggcaaccgca

SEQ ID NO: 172399 - DNA, 577 bp, Homo sapiens
  Payload ID: 13893
  Gene Symbol: PPFIBP2
  Gene Name: PTPRF interacting protein, binding protein 2 (liprin beta 2)
  ENST ID: ENST00000525597
  CDS Start-End: 318-577
gtaaatgcagagtgaagcagagacaggaaatcggggctctcagtaatgagttccagccactccagaagggggaagccagacaaggaattttcttcaggactgtttccctctggcaggctccgtcccaggtaaaccaccacagtgctgctagtaatgaaacctaccaggaacgcttggcacgtctagaaggggataaggagtccctcatattgcaggtgagtgtcctcacagaccaagtagaagcccagggagaaaagattcgagacctggaagtgtgtctggaaggacaccaggtgaaactcaatgctgctgaagagatgcttcaacaggagctgctaagccgcacatctcttgagacccagaagctcgatctgatgactgaagtgtctgagctgaagctcaagctggttggcatggagaaggagcagagagagcaggaggagaagcagagaaaagcagaggagttactgcaagagctcaggcacctcaaaatcaaagtggaagagttggaaaatgaaaggaatcagtatgaatggaagctaaaggccactaaggctgaagtcgcccagctgcaaga

SEQ ID NO: 172400 - DNA, 407 bp, Homo sapiens
  Payload ID: 13893
  Gene Symbol: PPFIBP2
  Gene Name: PTPRF interacting protein, binding protein 2 (liprin beta 2)
  ENST ID: ENST00000524548
  CDS Start-End: 1-407
accccttcccggtgctccatctcatcgaggacttgaggctggccttggagatgctggagcttcctcaggagagagcagccctcctgagccagatccctggcccaacagctgcctacataaaggaatggtttgaagagagcttgtcccaggtaaaccaccacagtgctgctagtaatgaaacctaccaggaacgcttggcacgtctagaaggggataaggagtccctcatattgcaggtgagtgtcctcacagaccaagtagaagcccagggagaaaagattcgagacctggaagtgtgtctggaaggacaccaggtgaaactcaatgctgctgaagagatgcttcaacagatatgcaatttagtcctcagattttgtatgcttaatattatatttttcccatttaaa

SEQ ID NO: 172401 - DNA, 484 bp, Homo sapiens
  Payload ID: 13893
  Gene Symbol: PPFIBP2
  Gene Name: PTPRF interacting protein, binding protein 2 (liprin beta 2)
  ENST ID: ENST00000526873
  CDS Start-End: 217-484
actagagggacctccaccccaggttgcgagtgcagcgcggcgggacctgggatgattcgggggctttccgacctgcttagggagggcggctcagagacaacctcaattttgcctggattgcacgcgggccgaggaagtcgggatgctccgaagggtttctgctctgggagtgcctctaattaagaagaggaggaggccaggcaggcaaaaggagtcatggcttctgatgctagtcatgcgctggaagctgccctggagcaaatggacgggatcattgcaggcactaaaacaggtgcagatcttagtgatggtacttgtgagcctggactggcttccccggcctcctacatgaaccccttcccggtgctccatctcatcgaggacttgaggctggccttggagatgctggagcttcctcaggagagagcagccctcctgagccagatccctggcccaacagctgcctacataaaggaatggtttg

SEQ ID NO: 172402 - DNA, 625 bp, Homo sapiens
  Payload ID: 13893
  Gene Symbol: PPFIBP2
  Gene Name: PTPRF interacting protein, binding protein 2 (liprin beta 2)
  ENST ID: ENST00000527790
  CDS Start-End: 114-625
cagtaggaggaggatgtcgctgctgagactgtgggacagctaggctcagagggagtctgacttcggggcacccggagtaagaagaggaggaggccaggcaggcaaaaggagtcatggcttctgatgctagtcatgcgctggaagctgccctggagcaaatggacgggatcattgcaggcactaaaacaggtgcagatcttagtgatggtacttgtgagcctggactggcttccccggcctcctacatgaaccccttcccggtgctccatctcatcgaggacttgaggctggccttggagatgctggagcttcctcaggagagagcagccctcctgagccagatccctggcccaacagctgcctacataaaggaatggtttgaagagagcttgtcccaggtaaaccaccacagtgctgctagtaatgaaacctaccaggaacgcttggcacgtctagaaggggataaggagtccctcatattgcaggtgagtgtcctcacagaccaagtagaagcccagggagaaaagattcgagacctggaagtgtgtctggaaggacaccaggtgaaactcaatgctgctgaagagatgcttcaacaggagctgctaagccgcacatctcttga

SEQ ID NO: 172403 - DNA, 2580 bp, Homo sapiens
  Payload ID: 13893
  Gene Symbol: PPFIBP2
  Gene Name: PTPRF interacting protein, binding protein 2 (liprin beta 2)
  Uniprot ID: Q8ND30
  ENST ID: ENST00000528883
  CDS Start-End: 153-2447
gttgcagaagtgctggcaagccagctgagatgtgccttgaggtcggggctgttctggaagaggaataaggagcaggagtccagcccagaggcagctcctgtggctgttgggtgttttactcttgagtctatcaagagcagtaaacgtgacccatgtcatcagagcagtggccgagactccctggtaaggtgagtgtcctcacagaccaagtagaagcccagggagaaaagattcgagacctggaagtgtgtctggaaggacaccaggtgaaactcaatgctgctgaagagatgcttcaacaggagctgctaagccgcacatctcttgagacccagaagctcgatctgatgactgaagtgtctgagctgaagctcaagctggttggcatggagaaggagcagagagagcaggaggagaagcagagaaaagcagaggagttactgcaagagctcaggcacctcaaaatcaaagtggaagagttggaaaatgaaaggaatcagtatgaatggaagctaaaggccactaaggctgaagtcgcccagctgcaagaacaggtggccctgaaagatgcagaaattgagcgtctgcacagccagctctcccggacagcagctctccacagtgagagtcacacagagagagaccaagaaattcaacgtctgaaaatggggatggaaactttgctgcttgccaatgaagataaggaccgtcggatagaggagcttacggggctgttaaaccagtaccggaaggtaaaggagattgtgatggtcactcaagggccttcggagagaactctctcaatcaatgaagaagaaccggagggaggtttcagcaagtggaacgctacaaataaggaccctgaagaattatttaaacaagagatgcctccaagatgtagctctcctacagtggggccacctccattgccacagaaatcactggaaaccagggctcagaaaaagctctcttgtagtctagaagacttgagaagtgaatctgtggataagtgtatggatgggaaccagcccttcccggtgttagaacccaaggacagccctttcttggcggagcacaaatatcccactttacctgggaagctttcaggagccacgcccaatggagaggctgccaaatctcctcccaccatctgccagcctgacgccacggggagcagcctgctgaggctgagagacacagaaagtggctgggacgacactgctgtggtcaatgacctctcatccacatcatcgggcactgaatcaggtcctcagtctcctctgacaccagatggtaaacggaatcccaaaggcattaagaagttctggggaaaaatccgaagaactcagtcaggaaatttctacactgacacgctggggatggcagagtttcgacgaggtgggctccgggcaaccgcagggccaagactctctaggaccagggactccaagggacagaaaagtgacgccaatgccccctttgcccagtggagcacagagcgtgtgtgtgcatggctggaggactttggcctggctcagtatgtgatctttgccaggcagtgggtatcttctggccacaccttattgacagccacccctcaggacatggaaaaggagctaggaattaagcacccactccacaggaagaagcttgttttagcagtgaaagccatcaacaccaaacaggaggagaagtctgcactgctagaccacatttgggtgacaaggtggcttgatgatattggcttaccccagtacaaagaccagtttcatgaatctagagttgacagacgaatgctgcaatacctaactgtgaacgatttactcttcttaaaagtcaccagccaactacatcatctcagcatcaaatgtgccattcacgtgctgcatgtcaacaagttcaacccccactgcctgcaccggcggccagctgatgagagtaacctttctccttcagaagttgtacagtggtccaaccacagggtgatggagtggttacgatctgtggacctggcagagtatgcacccaatcttcgagggagtggagtccatggaggcctcattatcctggagccacgcttcactggggacaccctggctatgcttctcaacatccccccacaaaagacgctcctcaggcgccacctgaccaccaagttcaatgccttgattggtccggaggctgaacaggagaagcgagagaaaatggcctcaccagcttacacaccactgaccaccacagccaaagtccggccaaggaaactaggattttcacacttcggaaacataagaaaaaagaagttcgatgaatcgacggactacatttgcccaatggagcccagtgacggtgtcagtgatagtcacagggtctacagtggctaccggggcctcagcccccttgatgcccctgaactggatgggctggaccaggtgggacagattagctgatgcccttgtcacctgccctctgtgcaccctgagagctcacagtaacactgtgtgtgtcaccatataactgcacctcacccccgcacgtgtgcatgactcgcagagaatattccagcaattgtgtacccctggg

SEQ ID NO: 172404 - DNA, 780 bp, Homo sapiens
  Payload ID: 13893
  Gene Symbol: PPFIBP2
  Gene Name: PTPRF interacting protein, binding protein 2 (liprin beta 2)
  ENST ID: ENST00000529575
  CDS Start-End: 314-780
agtttacagttctgcctgataagatgctgctgatttctggtaggcagcaggagtaacacctcagggggcctcagctcctttttcagccattccctcaagtacttggaattccagccagtcccaggtaaaccaccacagtgctgctagtaatgaaacctaccaggaacgcttggcacgtctagaaggggataaggagtccctcatattgcaggtgagtgtcctcacagaccaagtagaagcccagggagaaaagattcgagacctggaagtgtgtctggaaggacaccaggtgaaactcaatgctgctgaagagatgcttcaacaggagctgctaagccgcacatctcttgagacccagaagctcgatctgatgactgaagtgtctgagctgaagctcaagctggttggcatggagaaggagcagagagagcaggaggagaagcagagaaaagcagaggagttactgcaagagctcaggcacctcaaaatcaaagtggaagagttggaaaatgaaaggaatcagtatgaatggaagctaaaggccactaaggctgaagtcgcccagctgcaagaacaggtggccctgaaagatgcagaaattgagcgtctgcacagccagctctcccggacagcagctctccacagtgagagtcacacagagagagaccaagaaattcaacgtctgaaaatggggatggaaactttgctgcttgccaatgaagataaggaccgtcggatagaggagcttacggggctgttaaaccagtaccggaaggtaaa

SEQ ID NO: 172405 - DNA, 562 bp, Homo sapiens
  Payload ID: 13893
  Gene Symbol: PPFIBP2
  Gene Name: PTPRF interacting protein, binding protein 2 (liprin beta 2)
  ENST ID: ENST00000534552
  CDS Start-End: 1-448
aaagacgctcctcaggcgccacctgaccaccaagttcaatgccttgattggtccggaggctgaacaggagaagcgagagaaaatggcctcaccagcttacacaccactgaccaccacagccaaagtccggccaaggaaactaggattttcacacttcggaaacataagaaaaaagaagttcgatgaatcgacggactacatttgcccaatggagcccagtgacggtgtcagtgatagtcacagggtctacagtggctaccggggcctcagcccccttgatgcccctgaactggatgggctggaccagcaccagtggaaacacatgaacttcgatgcaggtccagagaccatggacactcccacgaggctcagctctcaggcaccccctacacttcagttgagggaaaagctcaagtgccttaggcccgtggaccacagtcttggctgagatcaaagggatgagcaacagggacttctgccacagtgacaatggaattgtgttgtgccttacttcagaggtggtctcttctttcttgtaataaaagcaatatttatgcggaaa

SEQ ID NO: 172406 - DNA, 3003 bp, Homo sapiens
  Payload ID: 13893
  Gene Symbol: PPFIBP2
  Gene Name: PTPRF interacting protein, binding protein 2 (liprin beta 2)
  ENST ID: ENST00000533792
  CDS Start-End: 305-2461
gatgggaataggaggaggtggggggtggcatctagggagtgctggaggggccacctggagagcctgcatgtgacctgccctgaaaggaggaaaacagctgcagctccagtcccaggtaaaccaccacagtgctgctagtaatgaaacctaccaggaacgcttggcacgtctagaaggggataaggagtccctcatattgcaggtgagtgtcctcacagaccaagtagaagcccagggagaaaagattcgagacctggaagtgtgtctggaaggacaccaggtgaaactcaatgctgctgaagagatgcttcaacaggagctgctaagccgcacatctcttgagacccagaagctcgatctgatgactgaagtgtctgagctgaagctcaagctggttggcatggagaaggagcagagagagcaggaggagaagcagagaaaagcagaggagttactgcaagagctcaggcacctcaaaatcaaagtggaagagttggaaaatgaaaggaatcagtatgaatggaagctaaaggccactaaggctgaagtcgcccagctgcaagaacaggtggccctgaaagatgcagaaattgagcgtctgcacagccagctctcccggacagcagctctccacagtgagagtcacacagagagagaccaagaaattcaacgtctgaaaatggggatggaaactttgctgcttgccaatgaagataaggaccgtcggatagaggagcttacggggctgttaaaccagtaccggaaggtaaaggagattgtgatggtcactcaagggccttcggagagaactctctcaatcaatgaagaagaaccggagggaggtttcagcaagtggaacgctacaaataaggaccctgaagaattatttaaacaagagatgcctccaagatgtagctctcctacagtggggccacctccattgccacagaaatcactggaaaccagggctcagaaaaagctctcttgtagtctagaagacttgagaagtgaatctgtggataagtgtatggatgggaaccagcccttcccggtgttagaacccaaggacagccctttcttggcggagcacaaatatcccactttacctgggaagctttcaggagccacgcccaatggagaggctgccaaatctcctcccaccatctgccagcctgacgccacggggagcagcctgctgaggctgagagacacagaaagtggctgggacgacactgctgtggtcaatgacctctcatccacatcatcgggcactgaatcaggtcctcagtctcctctgacaccagatggtaaacggaatcccaaaggcattaagaagttctggggaaaaatccgaagaactcagtcaggaaatttctacactgacacgctggggatggcagagtttcgacgaggtgggctccgggcaaccgcagggccaagactctctaggaccagggactccaagggacagaaaagtgacgccaatgccccctttgcccagtggagcacagagcgtgtgtgtgcatggctggaggactttggcctggctcagtatgtgatctttgccaggcagtgggtatcttctggccacaccttattgacagccacccctcaggacatggaaaaggagctaggaattaagcacccactccacaggaagaagcttgttttagcagtgaaagccatcaacaccaaacaggaggagaagtctgcactgctagaccacatttgggtgacaaggtggcttgatgatattggcttaccccagtacaaagaccagtttcatgaatctagagttgacagacgaatgctgcaatacctaactgtgaacgatttactcttcttaaaagtcaccagccaactacatcatctcagcatcaaatgtgccattcacgtgctgcatgtcaacaagttcaacccccactgcctgcaccggcggccagctgatgagagtaacctttctccttcagaagttgtacagtggtccaaccacagggtgatggagtggttacgatctgtggacctggcagagtatgcacccaatcttcgagggagtggagtccatggaggcctcattatcctggagccacgcttcactggggacaccctggctatgcttctcaacatccccccacaaaagacgctcctcaggcgccacctgaccaccaagttcaatgccttgattggtccggaggctgaacaggagaagcgagagaaaatggcctcaccagcttacacaccactgaccaccacagccaaagtccggccaaggaaactaggattttcacacttcggaaacataagaaaaaagaagttcgatgaatcgacggactacatttgcccaatggagcccagtgacggtgtcagtgatagtcacagggtctacagtggctaccggggcctcagcccccttgatgcccctgaactggatgggctggaccaggtgggacagattagctgatgcccttgtcacctgccctctgtgcaccctgagagctcacagtaacactgtgtgtgtcaccatataactgcacctcacccccgcacgtgtgcatgactcgcagagaatattccagcaattgtgtacccctgggccagtctctttgaaccctgagggtggccaggatctggagctgcatctctaaggggccaggctttggggaccattgccaaaggtggactcaggaggaaagacacttaaagacacttttacatgtctagtaattcttgatgttcatcttcagcaccagtggaaacacatgaacttcgatgcaggtccagagaccatggacactcccacgaggctcagctctcaggcaccccctacacttcagttgagggaaaagctcaagtgccttaggcccgtggaccacagtcttggctgagatcaaagggatgagcaacagggacttctgccacagtgacaatggaattgtgttgtgccttacttcagaggtggtctcttctttcttgtaataaaagcaatatttatgcggaaagcaa

SEQ ID NO: 172407 - DNA, 545 bp, Homo sapiens
  Payload ID: 13893
  Gene Symbol: PPFIBP2
  Gene Name: PTPRF interacting protein, binding protein 2 (liprin beta 2)
  ENST ID: ENST00000530081
  CDS Start-End: 1-545
atgcctccaagatgtagctctcctacagtggggccacctccattgccacagaaatcactggaaaccagggctcagaaaaagctctcttgtagtctagaagacttgagaagtgaatctgtggataagtgtatggatgggaaccagcccttcccggtgttagaacccaaggacagccctttcttggcggagcacaaatatcccactttacctgggaagctttcaggagccacgcccaatggagaggctgccaaatctcctcccaccatctgccagcctgacgccacggggagcagcctgctgaggctgaatcgtggccggagtgtcagtgcccccgtattaggtactgtacccattccaggagacacagaaagtggctgggacgacactgctgtggtcaatgacctctcatccacatcatcgggcactgaatcaggtcctcagtctcctctgacaccagatggtaaacggaatcccaaaggcattaagaagttctggggaaaaatccgaagaactcagtcaggaaatttctacactgacacgctggg

SEQ ID NO: 172408 - DNA, 2965 bp, Homo sapiens
  Payload ID: 13893
  Gene Symbol: PPFIBP2
  Gene Name: PTPRF interacting protein, binding protein 2 (liprin beta 2)
  Uniprot ID: Q8ND30
  ENST ID: ENST00000530181
  CDS Start-End: 222-2423
aagaaattagaggttgagtgagcaagtgggacagatgaaaggtcagaagattgtggccagaggagagaatttcagagctgaagattttagaagcaaagcaaacacattctggatacacgtgagatccaagtggtgactgtgctactgagaagctgaacgaaatggaaagcaaagcctgttggagctgaggtcaaagaatgtgaagccagagtggatactgaatgggaaagttaataacaaggatgtggaagctattgaggagacggagtgcgcctaaagagctgctaagccgcacatctcttgagacccagaagctcgatctgatgactgaagtgtctgagctgaagctcaagctggttggcatggagaaggagcagagagagcaggaggagaagcagagaaaagcagaggagttactgcaagagctcaggcacctcaaaatcaaagtggaagagttggaaaatgaaaggaatcagtatgaatggaagctaaaggccactaaggctgaagtcgcccagctgcaagaacaggtggccctgaaagatgcagaaattgagcgtctgcacagccagctctcccggacagcagctctccacagtgagagtcacacagagagagaccaagaaattcaacgtctgaaaatggggatggaaactttgctgcttgccaatgaagataaggaccgtcggatagaggagcttacggggctgttaaaccagtaccggaaggtaaaggagattgtgatggtcactcaagggccttcggagagaactctctcaatcaatgaagaagaaccggagggaggtttcagcaagtggaacgctacaaataaggaccctgaagaattatttaaacaagagatgcctccaagatgtagctctcctacagtggggccacctccattgccacagaaatcactggaaaccagggctcagaaaaagctctcttgtagtctagaagacttgagaagtgaatctgtggataagtgtatggatgggaaccagcccttcccggtgttagaacccaaggacagccctttcttggcggagcacaaatatcccactttacctgggaagctttcaggagccacgcccaatggagaggctgccaaatctcctcccaccatctgccagcctgacgccacggggagcagcctgctgaggctgagagacacagaaagtggctgggacgacactgctgtggtcaatgacctctcatccacatcatcgggcactgaatcaggtcctcagtctcctctgacaccagatggtaaacggaatcccaaaggcattaagaagttctggggaaaaatccgaagaactcagtcaggaaatttctacactgacacgctggggatggcagagtttcgacgaggtgggctccgggcaaccgcagggccaagactctctaggaccagggactccaagggacagaaaagtgacgccaatgccccctttgcccagtggagcacagagcgtgtgtgtgcatggctggaggactttggcctggctcagtatgtgatctttgccaggcagtgggtatcttctggccacaccttattgacagccacccctcaggacatggaaaaggagctaggaattaagcacccactccacaggaagaagcttgttttagcagtgaaagccatcaacaccaaacaggaggagaagtctgcactgctagaccacatttgggtgacaaggtggcttgatgatattggcttaccccagtacaaagaccagtttcatgaatctagagttgacagacgaatgctgcaatacctaactgtgaacgatttactcttcttaaaagtcaccagccaactacatcatctcagcatcaaatgtgccattcacgtgctgcatgtcaacaagttcaacccccactgcctgcaccggcggccagctgatgagagtaacctttctccttcagaagttgtacagtggtccaaccacagggtgatggagtggttacgatctgtggacctggcagagtatgcacccaatcttcgagggagtggagtccatggaggcctcattatcctggagccacgcttcactggggacaccctggctatgcttctcaacatccccccacaaaagacgctcctcaggcgccacctgaccaccaagttcaatgccttgattggtccggaggctgaacaggagaagcgagagaaaatggcctcaccagcttacacaccactgaccaccacagccaaagtccggccaaggaaactaggattttcacacttcggaaacataagaaaaaagaagttcgatgaatcgacggactacatttgcccaatggagcccagtgacggtgtcagtgatagtcacagggtctacagtggctaccggggcctcagcccccttgatgcccctgaactggatgggctggaccaggtgggacagattagctgatgcccttgtcacctgccctctgtgcaccctgagagctcacagtaacactgtgtgtgtcaccatataactgcacctcacccccgcacgtgtgcatgactcgcagagaatattccagcaattgtgtacccctgggccagtctctttgaaccctgagggtggccaggatctggagctgcatctctaaggggccaggctttggggaccattgccaaaggtggactcaggaggaaagacacttaaagacacttttacatgtctagtaattcttgatgttcatcttcagcaccagtggaaacacatgaacttcgatgcaggtccagagaccatggacactcccacgaggctcagctctcaggcaccccctacacttcagttgagggaaaagctcaagtgccttaggcccgtggaccacagtcttggctgagatcaaagggatgagcaacagggacttctgccacagtgacaatggaattgtgttgtgccttacttcagaggtggtctcttctttcttgtaataaaagcaatatttatgcggaaagcaa

SEQ ID NO: 172409 - DNA, 5360 bp, Homo sapiens
  Payload ID: 13894
  Gene Symbol: PUM1
  Gene Name: pumilio RNA-binding family member 1
  Uniprot ID: Q14671
  ENST ID: ENST00000257075
  CDS Start-End: 95-3655
ggagtgaaaggtaagggggagcgagagcgccagagagagaagatcggggggctgaaatccatcttcatcctaccgctccgcccgtgttggtggaatgagcgttgcatgtgtcttgaagagaaaagcagtgctttggcaggactctttcagcccccacctgaaacatcaccctcaagaaccagctaatcccaacatgcctgttgttttgacatctggaacagggtcgcaagcgcagccacaaccagctgcaaatcaggctcttgcagctgggactcactccagccctgtcccaggatctataggagttgcaggccgttcccaggacgacgctatggtggactacttctttcagaggcagcatggtgagcagcttgggggaggaggaagtggaggaggcggctataataatagcaaacatcgatggcctactggggataacattcatgcagaacatcaggtgcgttccatggatgaactgaatcatgattttcaagcacttgctctggagggaagagcgatgggagagcagctcttgccaggtaaaaagttttgggaaacagatgaatccagcaaagatggaccaaaaggaatattcctgggtgatcaatggcgagacagtgcctggggaacatcagatcattcagtttcccagccaatcatggtgcagagaagacctggtcagagtttccatgtgaacagtgaggtcaattctgtactgtccccacgatcggagagtgggggactaggcgttagcatggtggagtatgtgttgagctcatccccgggcgattcctgtctaagaaaaggaggatttggcccaagggatgcagacagtgatgaaaacgacaaaggtgaaaagaagaacaagggtacgtttgatggagataagctaggagatttgaaggaggagggtgatgtgatggacaagaccaatggtttaccagtgcagaatgggattgatgcagacgtcaaagattttagccgtacccctggtaattgccagaactctgctaatgaagtggatcttctgggtccaaaccagaatggttctgagggcttagcccagctgaccagcaccaatggtgccaagcctgtggaggatttctccaacatggagtcccagagtgtccccttggaccccatggaacatgtgggcatggagcctcttcagtttgattattcaggcacgcaggtacctgtggactcagcagcagcaactgtgggactttttgactacaattctcaacaacagctgttccaaagacctaatgcgcttgctgtccagcagttgacagctgctcagcagcagcagtatgcactggcagctgctcatcagccgcacatcggtttagctcccgctgcgtttgtccccaatccatacatcatcagcgctgctcccccagggacggacccctacacagctggattggctgcagcagcgacactaggcccagctgtggtccctcaccagtattatggagttactccctggggagtctaccctgccagtcttttccagcagcaagctgccgctgccgctgcagcaactaattcagctaatcaacagaccaccccacaggctcagcaaggacagcagcaggttctccgtggaggagccagccaacgtcctttgaccccaaaccagaaccagcagggacagcaaacggatccccttgtggcagctgcagcagtgaattctgcccttgcatttggacaaggtctggcagcaggcatgccaggttatccggtgttggctcctgctgcttactatgaccaaactggtgcccttgtagtgaatgcaggcgcgagaaatggtcttggagctcctgttcgacttgtagctcctgccccagtcatcattagttcctcagctgcacaagcagctgttgcagcagccgcagcttcagcaaatggagcagctggtggtcttgctggaacaacaaatggaccatttcgccctttaggaacacagcagcctcagccccagccccagcagcagcccaataacaacctggcatccagttctttctacggcaacaactctctgaacagcaattcacagagcagctccctcttctcccagggctctgcccagcctgccaacacatccttgggattcggaagtagcagttctctcggcgccaccctgggatccgcccttggagggtttggaacagcagttgcaaactccaacactggcagtggctcccgccgtgactccctgactggcagcagtgacctttataagaggacatcgagcagcttgacccccattggacacagtttttataacggccttagcttttcctcctctcctggacccgtgggcatgcctctccctagtcagggaccaggacattcacagacaccacctccttccctctcttcacatggatcctcttcaagcttaaacctgggaggactcacgaatggcagtggaagatacatctctgctgctccaggcgctgaagccaagtaccgcagtgcaagcagcgcctccagcctcttcagcccgagcagcactcttttctcttcctctcgtttgcgatatggaatgtctgatgtcatgccttctggcaggagcaggcttttggaagattttcgaaacaaccggtaccccaatttacaactgcgggagattgctggacatataatggaattttcccaagaccagcatgggtccagattcattcagctgaaactggagcgtgccacaccagctgagcgccagcttgtcttcaatgaaatcctccaggctgcctaccaactcatggtggatgtgtttggtaattacgtcattcagaagttctttgaatttggcagtcttgaacagaagctggctttggcagaacggattcgaggccacgtcctgtcattggcactacagatgtatggctgccgtgttatccagaaagctcttgagtttattccttcagaccagcagaatgagatggttcgggaactagatggccatgtcttgaagtgtgtgaaagatcagaatggcaatcacgtggttcagaaatgcattgaatgtgtacagccccagtctttgcaatttatcatcgatgcgtttaagggacaggtatttgccttatccacacatccttatggctgccgagtgattcagagaatcctggagcactgtctccctgaccagacactccctattttagaggagcttcaccagcacacagagcagcttgtacaggatcaatatggaaattatgtaatccaacatgtactggagcacggtcgtcctgaggataaaagcaaaattgtagcagaaatccgaggcaatgtacttgtattgagtcagcacaaatttgcaagcaatgttgtggagaagtgtgttactcacgcctcacgtacggagcgcgctgtgctcatcgatgaggtgtgcaccatgaacgacggtccccacagtgccttatacaccatgatgaaggaccagtatgccaactacgtggtccagaagatgattgacgtggcggagccaggccagcggaagatcgtcatgcataagatccggccccacatcgcaactcttcgtaagtacacctatggcaagcacattctggccaagctggagaagtactacatgaagaacggtgttgacttagggcccatctgtggcccccctaatggtatcatctgaggcagtgtcacccgctgttccctcattcccgctgacctcactggcccactggcaaatccaaccagcaaccagaaatgttctagtgtagagtctgagacgggcaagtggttgctccaggattactccctcctccaaaaaaggaatcaaatccacgagtggaaaagcctttgtaaatttaattttattacacataacatgtactattttttttaattgactaattgccctgctgttttactggtgtataggatacttgtacataggtaaccaatgtacatgggaggccacatattttgttcactgttgtatctatatttcacatgtggaaactttcagggtggttggtttaacaaaaaaaaaaagctttaaaaaaaaaagaaaaaaaggaaaaggtttttagctcatttgcctggccggcaagttttgcaaatagctcttccccacctcctcattttagtaaaaaacaaacaaaaacaaaaaaacctgagaagtttgaattgtagttaaatgaccccaaactggcatttaacactgtttataaaaaatatatatatatatatatatatatataatgaaaaaggtttcagagttgctaaagcttcagtttgtgacattaagtttatgaaattctaaaaaatgccttttttggagactatattatgctgaagaaggctgttcgtgaggaggagatgcgagcacccagaacgtcttttgaggctgggcgggtgtgattgtttactgcctactggatttttttctattaacattgaaaggtaaaatctgattatttagcatgagaaaaaaaaatccaactctgcttttggtcttgcttctataaatatatagtgtatacttggtgtagactttgcatatatacaaatttgtagtattttcttgttttgatgtctaatctgtatctataatgtaccctagtagtcgaacatacttttgattgtacaattgtacatttgtatacctgtaatgtaaatgtggagaagtttgaatcaacataaacacgttttttggtaagaaaagagaattagccagccctgtgcattcagtgtatattctcaccttttatggtcgtagcatatagtgttgtatattgtaaattgtaatttcaaccagaagtaaatttttttcttttgaaggaataaatgttctttatacagcctagttaatgtttaaaaagaaaaaaatagcttggttttatttgtcatctagtctcaagtatagcgagattctttctaaatgttattcaagattgagttctcactagtgtttttttaatcctaaaaaagtaatgttttgattttgtgacagtcaaaaggacgtgcaaaagtctagccttgcccgagctttccttacaatcagagcccctctcaccttgtaaagtgtgaatcgcccttcccttttgtacagaagatgaactgtattttgcattttgtctacttgtaagtgaatgtaacatactgtcaattttccttgtttgaatatagaattgtaacactacacggtgtacatttccagagccttgtgtatatttccaatgaacttttttgcaagcacacttgtaaccatatgtgtataattaacaaacctgtgtatgcttatgcctgggcaactattttttgtaactcttgtgtagattgtctctaaacaatgtgtgatctttattttgaaaaatacagaactttggaatctg

SEQ ID NO: 172410 - DNA, 4242 bp, Homo sapiens
  Payload ID: 13894
  Gene Symbol: PUM1
  Gene Name: pumilio RNA-binding family member 1
  ENST ID: ENST00000373741
  CDS Start-End: 207-3881
aaccccgcgtgcccagctccaggccgtgttctcccaggtgcgggccggcgggaccccgccttcggccctggcggcgcgcgctcgcctagcgggcgggcactcgcgcgcagcgtttgtgttgcctgcgagtttcccgagttcacacaggccctgggttggcatggcaaccaggcaacctgttccagagccgccagccttctccgcacatgccgctgccaccgccggggccggggccggagcctatcccaggatgcaccgcgccaacccagtccccagtgggccgccatgttgtcggagtgaaaggtgttggtggaatgagcgttgcatgtgtcttgaagagaaaagcagtgctttggcaggactctttcagcccccacctgaaacatcaccctcaagaaccagctaatcccaacatgcctgttgttttgacatctggaacagggtcgcaagcgcagccacaaccagctgcaaatcaggctcttgcagctgggactcactccagccctgtcccaggatctataggagttgcaggccgttcccaggacgacgctatggtggactacttctttcagaggcagcatggtgagcagcttgggggaggaggaagtggaggaggcggctataataatagcaaacatcgatggcctactggggataacattcatgcagaacatcaggtgcgttccatggatgaactgaatcatgattttcaagcacttgctctggagggaagagcgatgggagagcagctcttgccaggtaaaaagttttgggaaacagatgaatccagcaaagatggaccaaaaggaatattcctgggtgatcaatggcgagacagtgcctggggaacatcagatcattcagtttcccagccaatcatggtgcagagaagacctggtcagagtttccatgtgaacagtgaggtcaattctgtactgtccccacgatcggagagtgggggactaggcgttagcatggtggagtatgtgttgagctcatccccgggcgattcctgtctaagaaaaggaggatttggcccaagggatgcagacagtgatgaaaacgacaaaggtgaaaagaagaacaagggtacgtttgatggagataagctaggagatttgaaggaggagggtgatgtgatggacaagaccaatggtttaccagtgcagaatgggattgatgcagacgtcaaagattttagccgtacccctggtaattgccagaactctgctaatgaagtggatcttctgggtccaaaccagaatggttctgagggcttagcccagctgaccagcaccaatggtgccaagcctgtggaggatttctccaacatggagtcccagagtgtccccttggaccccatggaacatgtgggcatggagcctcttcagtttgattattcaggcacgcaggtacctgtggactcagcagcagcaactgtgggactttttgactacaattctcaacaacagctgttccaaagacctaatgcgcttgctgtccagcagttgacagctgctcagcagcagcagtatgcactggcagctgctcatcagccgcacatcggtttagctcccgctgcgtttgtccccaatccatacatcatcagcgctgctcccccagggacggacccctacacagctggattggctgcagcagcgacactaggcccagctgtggtccctcaccagtattatggagttactccctggggagtctaccctgccagtcttttccagcagcaagctgccgctgccgctgcagcaactaattcagctaatcaacagaccaccccacaggctcagcaaggacagcagcaggttctccgtggaggagccagccaacgtcctttgaccccaaaccagaaccagcagggacagcaaacggatccccttgtggcagctgcagcagtgaattctgcccttgcatttggacaaggtctggcagcaggcatgccaggttatccggtgttggctcctgctgcttactatgaccaaactggtgcccttgtagtgaatgcaggcgcgagaaatggtcttggagctcctgttcgacttgtagctcctgccccagtcatcattagttcctcagctgcacaagcagctgttgcagcagccgcagcttcagcaaatggagcagctggtggtcttgctggaacaacaaatggaccatttcgccctttaggaacacagcagcctcagccccagccccagcagcagcccaataacaacctggcatccagttctttctacggcaacaactctctgaacagcaattcacagagcagctccctcttctcccagggctctgcccagcctgccaacacatccttgggattcggaagtagcagttctctcggcgccaccctgggatccgcccttggagggtttggaacagcagttgcaaactccaacactggcagtggctcccgccgtgactccctgactggcagcagtgacctttataagaggacatcgagcagcttgacccccattggacacagtttttataacggccttagcttttcctcctctcctggacccgtgggcatgcctctccctagtcagggaccaggacattcacagacaccacctccttccctctcttcacatggatcctcttcaagcttaaacctgggaggactcacgaatggcagtggaagatacatctctgctgctccaggcgctgaagccaagtaccgcagtgcaagcagcgcctccagcctcttcagcccgagcagcactcttttctcttcctctcgtttgcgatatggaatgtctgatgtcatgccttctggcaggagcaggcttttggaagattttcgaaacaaccggtaccccaatttacaactgcgggagattgctggacatataatggaattttcccaagaccagcatgggtccagattcattcagctgaaactggagcgtgccacaccagctgagcgccagcttgtcttcaatgaaatcctccaggctgcctaccaactcatggtggatgtgtttggtaattacgtcattcagaagttctttgaatttggcagtcttgaacagaagctggctttggcagaacggattcgaggccacgtcctgtcattggcactacagatgtatggctgccgtgttatccagaaagctcttgagtttattccttcagaccagcaggtaattaatgagatggttcgggaactagatggccatgtcttgaagtgtgtgaaagatcagaatggcaatcacgtggttcagaaatgcattgaatgtgtacagccccagtctttgcaatttatcatcgatgcgtttaagggacaggtatttgccttatccacacatccttatggctgccgagtgattcagagaatcctggagcactgtctccctgaccagacactccctattttagaggagcttcaccagcacacagagcagcttgtacaggatcaatatggaaattatgtaatccaacatgtactggagcacggtcgtcctgaggataaaagcaaaattgtagcagaaatccgaggcaatgtacttgtattgagtcagcacaaatttgcaagcaatgttgtggagaagtgtgttactcacgcctcacgtacggagcgcgctgtgctcatcgatgaggtgtgcaccatgaacgacggtccccacagtgccttatacaccatgatgaaggaccagtatgccaactacgtggtccagaagatgattgacgtggcggagccaggccagcggaagatcgtcatgcataagatccggccccacatcgcaactcttcgtaagtacacctatggcaagcacattctggccaagctggagaagtactacatgaagaacggtgttgacttagggcccatctgtggcccccctaatggtatcatctgaggcagtgtcacccgctgttccctcattcccgctgacctcactggcccactggcaaatccaaccagcaaccagaaatgttctagtgtagagtctgagacgggcaagtggttgctccaggattactccctcctccaaaaaaggaatcaaatccacgagtggaaaagcctttgtaaatttaattttattacacataacatgtactattttttttaattgactaattgccctgctgttttactggtgtataggatacttgtacataggtaaccaatgtacatgggaggccacatattttgttcactgttgtatctatatttcacatgtggaaactttcagggtggttggtttaacaaaaaaaaaa

SEQ ID NO: 172411 - DNA, 3515 bp, Homo sapiens
  Payload ID: 13894
  Gene Symbol: PUM1
  Gene Name: pumilio RNA-binding family member 1
  Uniprot ID: Q14671
  ENST ID: ENST00000373742
  CDS Start-End: 1-3384
atgccgctgccaccgccggggccggggccggagcctatcccaggatgcaccgcgccaacccagtccccagtgggccgccatgttgtcggagtgaaaggtgttggtggaatgagcgttgcatgtgtcttgaagagaaaagcagtgctttggcaggactctttcagcccccacctgaaacatcaccctcaagaaccagctaatcccaacatgcctgttgttttgacatctggaacagggtcgcaagcgcagccacaaccagctgcaaatcaggctcttgcagctgggactcactccagccctgtcccaggatctataggagttgcaggccgttcccaggacgacgctatggtggactacttctttcagaggcagcatggtgagcagcttgggggaggaggaagtggaggaggcggctataataatagcaaacatcgatggcctactggggataacattcatgcagaacatcaggtgcgttccatggatgaactgaatcatgattttcaagcacttgctctggagggaagagcgatgggagagggcccaagggatgcagacagtgatgaaaacgacaaaggtgaaaagaagaacaagggtacgtttgatggagataagctaggagatttgaaggaggagggtgatgtgatggacaagaccaatggtttaccagtgcagaatgggattgatgcagacgtcaaagattttagccgtacccctggtaattgccagaactctgctaatgaagtggatcttctgggtccaaaccagaatggttctgagggcttagcccagctgaccagcaccaatggtgccaagcctgtggaggatttctccaacatggagtcccagagtgtccccttggaccccatggaacatgtgggcatggagcctcttcagtttgattattcaggcacgcaggtacctgtggactcagcagcagcaactgtgggactttttgactacaattctcaacaacagctgttccaaagacctaatgcgcttgctgtccagcagttgacagctgctcagcagcagcagtatgcactggcagctgctcatcagccgcacatcgcaggtttagctcccgctgcgtttgtccccaatccatacatcatcagcgctgctcccccagggacggacccctacacagctggattggctgcagcagcgacactaggcccagctgtggtccctcaccagtattatggagttactccctggggagtctaccctgccagtcttttccagcagcaagctgccgctgccgctgcagcaactaattcagctaatcaacagaccaccccacaggctcagcaaggacagcagcaggttctccgtggaggagccagccaacgtcctttgaccccaaaccagaaccagcagggacagcaaacggatccccttgtggcagctgcagcagtgaattctgcccttgcatttggacaaggtctggcagcaggcatgccaggttatccggtgttggctcctgctgcttactatgaccaaactggtgcccttgtagtgaatgcaggcgcgagaaatggtcttggagctcctgttcgacttgtagctcctgccccagtcatcattagttcctcagctgcacaagcagctgttgcagcagccgcagcttcagcaaatggagcagctggtggtcttgctggaacaacaaatggaccatttcgccctttaggaacacagcagcctcagccccagccccagcagcagcccaataacaacctggcatccagttctttctacggcaacaactctctgaacagcaattcacagagcagctccctcttctcccagggctctgcccagcctgccaacacatccttgggattcggaagtagcagttctctcggcgccaccctgggatccgcccttggagggtttggaacagcagttgcaaactccaacactggcagtggctcccgccgtgactccctgactggcagcagtgacctttataagaggacatcgagcagcttgacccccattggacacagtttttataacggccttagcttttcctcctctcctggacccgtgggcatgcctctccctagtcagggaccaggacattcacagacaccacctccttccctctcttcacatggatcctcttcaagcttaaacctgggaggactcacgaatggcagtggaagatacatctctgctgctccaggcgctgaagccaagtaccgcagtgcaagcagcgcctccagcctcttcagcccgagcagcactcttttctcttcctctcgtttgcgatatggaatgtctgatgtcatgccttctggcaggagcaggcttttggaagattttcgaaacaaccggtaccccaatttacaactgcgggagattgctggacatataatggaattttcccaagaccagcatgggtccagattcattcagctgaaactggagcgtgccacaccagctgagcgccagcttgtcttcaatgaaatcctccaggctgcctaccaactcatggtggatgtgtttggtaattacgtcattcagaagttctttgaatttggcagtcttgaacagaagctggctttggcagaacggattcgaggccacgtcctgtcattggcactacagatgtatggctgccgtgttatccagaaagctcttgagtttattccttcagaccagcagaatgagatggttcgggaactagatggccatgtcttgaagtgtgtgaaagatcagaatggcaatcacgtggttcagaaatgcattgaatgtgtacagccccagtctttgcaatttatcatcgatgcgtttaagggacaggtatttgccttatccacacatccttatggctgccgagtgattcagagaatcctggagcactgtctccctgaccagacactccctattttagaggagcttcaccagcacacagagcagcttgtacaggatcaatatggaaattatgtaatccaacatgtactggagcacggtcgtcctgaggataaaagcaaaattgtagcagaaatccgaggcaatgtacttgtattgagtcagcacaaatttgcaagcaatgttgtggagaagtgtgttactcacgcctcacgtacggagcgcgctgtgctcatcgatgaggtgtgcaccatgaacgacggtccccacagtgccttatacaccatgatgaaggaccagtatgccaactacgtggtccagaagatgattgacgtggcggagccaggccagcggaagatcgtcatgcataagatccggccccacatcgcaactcttcgtaagtacacctatggcaagcacattctggccaagctggagaagtactacatgaagaacggtgttgacttagggcccatctgtggcccccctaatggtatcatctgaggcagtgtcacccgctgttccctcattcccgctgacctcactggcccactggcaaatccaaccagcaaccagaaatgttctagtgtagagtctgagacgggcaagtggttgctccaggattactccctcct

SEQ ID NO: 172412 - DNA, 5375 bp, Homo sapiens
  Payload ID: 13894
  Gene Symbol: PUM1
  Gene Name: pumilio RNA-binding family member 1
  ENST ID: ENST00000373747
  CDS Start-End: 101-3670
gttgtcggagtgaaaggtaagggggagcgagagcgccagagagagaagatcggggggctgaaatccatcttcatcctaccgctccgcccgtgttggtggaatgagcgttgcatgtgtcttgaagagaaaagcagtgctttggcaggactctttcagcccccacctgaaacatcaccctcaagaaccagctaatcccaacatgcctgttgttttgacatctggaacagggtcgcaagcgcagccacaaccagctgcaaatcaggctcttgcagctgggactcactccagccctgtcccaggatctataggagttgcaggccgttcccaggacgacgctatggtggactacttctttcagaggcagcatggtgagcagcttgggggaggaggaagtggaggaggcggctataataatagcaaacatcgatggcctactggggataacattcatgcagaacatcaggtgcgttccatggatgaactgaatcatgattttcaagcacttgctctggagggaagagcgatgggagagcagctcttgccaggtaaaaagttttgggaaacagatgaatccagcaaagatggaccaaaaggaatattcctgggtgatcaatggcgagacagtgcctggggaacatcagatcattcagtttcccagccaatcatggtgcagagaagacctggtcagagtttccatgtgaacagtgaggtcaattctgtactgtccccacgatcggagagtgggggactaggcgttagcatggtggagtatgtgttgagctcatccccgggcgattcctgtctaagaaaaggaggatttggcccaagggatgcagacagtgatgaaaacgacaaaggtgaaaagaagaacaagggtacgtttgatggagataagctaggagatttgaaggaggagggtgatgtgatggacaagaccaatggtttaccagtgcagaatgggattgatgcagacgtcaaagattttagccgtacccctggtaattgccagaactctgctaatgaagtggatcttctgggtccaaaccagaatggttctgagggcttagcccagctgaccagcaccaatggtgccaagcctgtggaggatttctccaacatggagtcccagagtgtccccttggaccccatggaacatgtgggcatggagcctcttcagtttgattattcaggcacgcaggtacctgtggactcagcagcagcaactgtgggactttttgactacaattctcaacaacagctgttccaaagacctaatgcgcttgctgtccagcagttgacagctgctcagcagcagcagtatgcactggcagctgctcatcagccgcacatcgcaggtttagctcccgctgcgtttgtccccaatccatacatcatcagcgctgctcccccagggacggacccctacacagctggattggctgcagcagcgacactaggcccagctgtggtccctcaccagtattatggagttactccctggggagtctaccctgccagtcttttccagcagcaagctgccgctgccgctgcagcaactaattcagctaatcaacagaccaccccacaggctcagcaaggacagcagcaggttctccgtggaggagccagccaacgtcctttgaccccaaaccagaaccagcagggacagcaaacggatccccttgtggcagctgcagcagtgaattctgcccttgcatttggacaaggtctggcagcaggcatgccaggttatccggtgttggctcctgctgcttactatgaccaaactggtgcccttgtagtgaatgcaggcgcgagaaatggtcttggagctcctgttcgacttgtagctcctgccccagtcatcattagttcctcagctgcacaagcagctgttgcagcagccgcagcttcagcaaatggagcagctggtggtcttgctggaacaacaaatggaccatttcgccctttaggaacacagcagcctcagccccagccccagcagcagcccaataacaacctggcatccagttctttctacggcaacaactctctgaacagcaattcacagagcagctccctcttctcccagggctctgcccagcctgccaacacatccttgggattcggaagtagcagttctctcggcgccaccctgggatccgcccttggagggtttggaacagcagttgcaaactccaacactggcagtggctcccgccgtgactccctgactggcagcagtgacctttataagaggacatcgagcagcttgacccccattggacacagtttttataacggccttagcttttcctcctctcctggacccgtgggcatgcctctccctagtcagggaccaggacattcacagacaccacctccttccctctcttcacatggatcctcttcaagcttaaacctgggaggactcacgaatggcagtggaagatacatctctgctgctccaggcgctgaagccaagtaccgcagtgcaagcagcgcctccagcctcttcagcccgagcagcactcttttctcttcctctcgtttgcgatatggaatgtctgatgtcatgccttctggcaggagcaggcttttggaagattttcgaaacaaccggtaccccaatttacaactgcgggagattgctggacatataatggaattttcccaagaccagcatgggtccagattcattcagctgaaactggagcgtgccacaccagctgagcgccagcttgtcttcaatgaaatcctccaggctgcctaccaactcatggtggatgtgtttggtaattacgtcattcagaagttctttgaatttggcagtcttgaacagaagctggctttggcagaacggattcgaggccacgtcctgtcattggcactacagatgtatggctgccgtgttatccagaaagctcttgagtttattccttcagaccagcaggtaattaatgagatggttcgggaactagatggccatgtcttgaagtgtgtgaaagatcagaatggcaatcacgtggttcagaaatgcattgaatgtgtacagccccagtctttgcaatttatcatcgatgcgtttaagggacaggtatttgccttatccacacatccttatggctgccgagtgattcagagaatcctggagcactgtctccctgaccagacactccctattttagaggagcttcaccagcacacagagcagcttgtacaggatcaatatggaaattatgtaatccaacatgtactggagcacggtcgtcctgaggataaaagcaaaattgtagcagaaatccgaggcaatgtacttgtattgagtcagcacaaatttgcaagcaatgttgtggagaagtgtgttactcacgcctcacgtacggagcgcgctgtgctcatcgatgaggtgtgcaccatgaacgacggtccccacagtgccttatacaccatgatgaaggaccagtatgccaactacgtggtccagaagatgattgacgtggcggagccaggccagcggaagatcgtcatgcataagatccggccccacatcgcaactcttcgtaagtacacctatggcaagcacattctggccaagctggagaagtactacatgaagaacggtgttgacttagggcccatctgtggcccccctaatggtatcatctgaggcagtgtcacccgctgttccctcattcccgctgacctcactggcccactggcaaatccaaccagcaaccagaaatgttctagtgtagagtctgagacgggcaagtggttgctccaggattactccctcctccaaaaaaggaatcaaatccacgagtggaaaagcctttgtaaatttaattttattacacataacatgtactattttttttaattgactaattgccctgctgttttactggtgtataggatacttgtacataggtaaccaatgtacatgggaggccacatattttgttcactgttgtatctatatttcacatgtggaaactttcagggtggttggtttaacaaaaaaaaaaagctttaaaaaaaaaagaaaaaaaggaaaaggtttttagctcatttgcctggccggcaagttttgcaaatagctcttccccacctcctcattttagtaaaaaacaaacaaaaacaaaaaaacctgagaagtttgaattgtagttaaatgaccccaaactggcatttaacactgtttataaaaaatatatatatatatatatatatatataatgaaaaaggtttcagagttgctaaagcttcagtttgtgacattaagtttatgaaattctaaaaaatgccttttttggagactatattatgctgaagaaggctgttcgtgaggaggagatgcgagcacccagaacgtcttttgaggctgggcgggtgtgattgtttactgcctactggatttttttctattaacattgaaaggtaaaatctgattatttagcatgagaaaaaaaaatccaactctgcttttggtcttgcttctataaatatatagtgtatacttggtgtagactttgcatatatacaaatttgtagtattttcttgttttgatgtctaatctgtatctataatgtaccctagtagtcgaacatacttttgattgtacaattgtacatttgtatacctgtaatgtaaatgtggagaagtttgaatcaacataaacacgttttttggtaagaaaagagaattagccagccctgtgcattcagtgtatattctcaccttttatggtcgtagcatatagtgttgtatattgtaaattgtaatttcaaccagaagtaaatttttttcttttgaaggaataaatgttctttatacagcctagttaatgtttaaaaagaaaaaaatagcttggttttatttgtcatctagtctcaagtatagcgagattctttctaaatgttattcaagattgagttctcactagtgtttttttaatcctaaaaaagtaatgttttgattttgtgacagtcaaaaggacgtgcaaaagtctagccttgcccgagctttccttacaatcagagcccctctcaccttgtaaagtgtgaatcgcccttcccttttgtacagaagatgaactgtattttgcattttgtctacttgtaagtgaatgtaacatactgtcaattttccttgtttgaatatagaattgtaacactacacggtgtacatttccagagccttgtgtatatttccaatgaacttttttgcaagcacacttgtaaccatatgtgtataattaacaaacctgtgtatgcttatgcctgggcaactattttttgtaactcttgtgtagattgtctctaaacaatgtgtgatctttattttgaaaaatacagaactttggaatctg

SEQ ID NO: 172413 - DNA, 4043 bp, Homo sapiens
  Payload ID: 13894
  Gene Symbol: PUM1
  Gene Name: pumilio RNA-binding family member 1
  Uniprot ID: Q14671
  ENST ID: ENST00000426105
  CDS Start-End: 92-3658
gtgaaaggtaagggggagcgagagcgccagagagagaagatcggggggctgaaatccatcttcatcctaccgctccgcccgtgttggtggaatgagcgttgcatgtgtcttgaagagaaaagcagtgctttggcaggactctttcagcccccacctgaaacatcaccctcaagaaccagctaatcccaacatgcctgttgttttgacatctggaacagggtcgcaagcgcagccacaaccagctgcaaatcaggctcttgcagctgggactcactccagccctgtcccaggatctataggagttgcaggccgttcccaggacgacgctatggtggactacttctttcagaggcagcatggtgagcagcttgggggaggaggaagtggaggaggcggctataataatagcaaacatcgatggcctactggggataacattcatgcagaacatcaggtgcgttccatggatgaactgaatcatgattttcaagcacttgctctggagggaagagcgatgggagagcagctcttgccaggtaaaaagttttgggaaacagatgaatccagcaaagatggaccaaaaggaatattcctgggtgatcaatggcgagacagtgcctggggaacatcagatcattcagtttcccagccaatcatggtgcagagaagacctggtcagagtttccatgtgaacagtgaggtcaattctgtactgtccccacgatcggagagtgggggactaggcgttagcatggtggagtatgtgttgagctcatccccgggcgattcctgtctaagaaaaggaggatttggcccaagggatgcagacagtgatgaaaacgacaaaggtgaaaagaagaacaagggtacgtttgatggagataagctaggagatttgaaggaggagggtgatgtgatggacaagaccaatggtttaccagtgcagaatgggattgatgcagacgtcaaagattttagccgtacccctggtaattgccagaactctgctaatgaagtggatcttctgggtccaaaccagaatggttctgagggcttagcccagctgaccagcaccaatggtgccaagcctgtggaggatttctccaacatggagtcccagagtgtccccttggaccccatggaacatgtgggcatggagcctcttcagtttgattattcaggcacgcaggtacctgtggactcagcagcagcaactgtgggactttttgactacaattctcaacaacagctgttccaaagacctaatgcgcttgctgtccagcagttgacagctgctcagcagcagcagtatgcactggcagctgctcatcagccgcacatcggtttagctcccgctgcgtttgtccccaatccatacatcatcagcgctgctcccccagggacggacccctacacagctggattggctgcagcagcgacactaggcccagctgtggtccctcaccagtattatggagttactccctggggagtctaccctgccagtcttttccagcagcaagctgccgctgccgctgcagcaactaattcagctaatcaacagaccaccccacaggctcagcaaggacagcagcaggttctccgtggaggagccagccaacgtcctttgaccccaaaccagaaccagcagggacagcaaacggatccccttgtggcagctgcagcagtgaattctgcccttgcatttggacaaggtctggcagcaggcatgccaggttatccggtgttggctcctgctgcttactatgaccaaactggtgcccttgtagtgaatgcaggcgcgagaaatggtcttggagctcctgttcgacttgtagctcctgccccagtcatcattagttcctcagctgcacaagcagctgttgcagcagccgcagcttcagcaaatggagcagctggtggtcttgctggaacaacaaatggaccatttcgccctttaggaacacagcagcctcagccccagccccagcagcagcccaataacaacctggcatccagttctttctacggcaacaactctctgaacagcaattcacagagcagctccctcttctcccagggctctgcccagcctgccaacacatccttgggattcggaagtagcagttctctcggcgccaccctgggatccgcccttggagggtttggaacagcagttgcaaactccaacactggcagtggctcccgccgtgactccctgactggcagcagtgacctttataagaggacatcgagcagcttgacccccattggacacagtttttataacggccttagcttttcctcctctcctggacccgtgggcatgcctctccctagtcagggaccaggacattcacagacaccacctccttccctctcttcacatggatcctcttcaagcttaaacctgggaggactcacgaatggcagtggaagatacatctctgctgctccaggcgctgaagccaagtaccgcagtgcaagcagcgcctccagcctcttcagcccgagcagcactcttttctcttcctctcgtttgcgatatggaatgtctgatgtcatgccttctggcaggagcaggcttttggaagattttcgaaacaaccggtaccccaatttacaactgcgggagattgctggacatataatggaattttcccaagaccagcatgggtccagattcattcagctgaaactggagcgtgccacaccagctgagcgccagcttgtcttcaatgaaatcctccaggctgcctaccaactcatggtggatgtgtttggtaattacgtcattcagaagttctttgaatttggcagtcttgaacagaagctggctttggcagaacggattcgaggccacgtcctgtcattggcactacagatgtatggctgccgtgttatccagaaagctcttgagtttattccttcagaccagcaggtaattaatgagatggttcgggaactagatggccatgtcttgaagtgtgtgaaagatcagaatggcaatcacgtggttcagaaatgcattgaatgtgtacagccccagtctttgcaatttatcatcgatgcgtttaagggacaggtatttgccttatccacacatccttatggctgccgagtgattcagagaatcctggagcactgtctccctgaccagacactccctattttagaggagcttcaccagcacacagagcagcttgtacaggatcaatatggaaattatgtaatccaacatgtactggagcacggtcgtcctgaggataaaagcaaaattgtagcagaaatccgaggcaatgtacttgtattgagtcagcacaaatttgcaagcaatgttgtggagaagtgtgttactcacgcctcacgtacggagcgcgctgtgctcatcgatgaggtgtgcaccatgaacgacggtccccacagtgccttatacaccatgatgaaggaccagtatgccaactacgtggtccagaagatgattgacgtggcggagccaggccagcggaagatcgtcatgcataagatccggccccacatcgcaactcttcgtaagtacacctatggcaagcacattctggccaagctggagaagtactacatgaagaacggtgttgacttagggcccatctgtggcccccctaatggtatcatctgaggcagtgtcacccgctgttccctcattcccgctgacctcactggcccactggcaaatccaaccagcaaccagaaatgttctagtgtagagtctgagacgggcaagtggttgctccaggattactccctcctccaaaaaaggaatcaaatccacgagtggaaaagcctttgtaaatttaattttattacacataacatgtactattttttttaattgactaattgccctgctgttttactggtgtataggatacttgtacataggtaaccaatgtacatgggaggccacatattttgttcactgttgtatctatatttcacatgtggaaactttcagggtggttggtttaacaaaaaaaaaaagctttaaaaaaaaaagaaaaaaa

SEQ ID NO: 172414 - DNA, 4631 bp, Homo sapiens
  Payload ID: 13894
  Gene Symbol: PUM1
  Gene Name: pumilio RNA-binding family member 1
  ENST ID: ENST00000424085
  CDS Start-End: 92-2926
gtgaaaggtaagggggagcgagagcgccagagagagaagatcggggggctgaaatccatcttcatcctaccgctccgcccgtgttggtggaatgagcgttgcatgtgtcttgaagagaaaagcagtgctttggcaggactctttcagcccccacctgaaacatcaccctcaagaaccagctaatcccaacatgcctgttgttttgacatctggaacagggtcgcaagcgcagccacaaccagctgcaaatcaggctcttgcagctgggactcactccagccctgtcccaggatctataggagttgcaggccgttcccaggacgacgctatggtggactacttctttcagaggcagcatggtgagcagcttgggggaggaggaagtggaggaggcggctataataatagcaaacatcgatggcctactggggataacattcatgcagaacatcaggtgcgttccatggatgaactgaatcatgattttcaagcacttgctctggagggaagagcgatgggagagctgttccaaagacctaatgcgcttgctgtccagcagttgacagctgctcagcagcagcagtatgcactggcagctgctcatcagccgcacatcggtttagctcccgctgcgtttgtccccaatccatacatcatcagcgctgctcccccagggacggacccctacacagctggattggctgcagcagcgacactaggcccagctgtggtccctcaccagtattatggagttactccctggggagtctaccctgccagtcttttccagcagcaagctgccgctgccgctgcagcaactaattcagctaatcaacagaccaccccacaggctcagcaaggacagcagcaggttctccgtggaggagccagccaacgtcctttgaccccaaaccagaaccagcagggacagcaaacggatccccttgtggcagctgcagcagtgaattctgcccttgcatttggacaaggtctggcagcaggcatgccaggttatccggtgttggctcctgctgcttactatgaccaaactggtgcccttgtagtgaatgcaggcgcgagaaatggtcttggagctcctgttcgacttgtagctcctgccccagtcatcattagttcctcagctgcacaagcagctgttgcagcagccgcagcttcagcaaatggagcagctggtggtcttgctggaacaacaaatggaccatttcgccctttaggaacacagcagcctcagccccagccccagcagcagcccaataacaacctggcatccagttctttctacggcaacaactctctgaacagcaattcacagagcagctccctcttctcccagggctctgcccagcctgccaacacatccttgggattcggaagtagcagttctctcggcgccaccctgggatccgcccttggagggtttggaacagcagttgcaaactccaacactggcagtggctcccgccgtgactccctgactggcagcagtgacctttataagaggacatcgagcagcttgacccccattggacacagtttttataacggccttagcttttcctcctctcctggacccgtgggcatgcctctccctagtcagggaccaggacattcacagacaccacctccttccctctcttcacatggatcctcttcaagcttaaacctgggaggactcacgaatggcagtggaagatacatctctgctgctccaggcgctgaagccaagtaccgcagtgcaagcagcgcctccagcctcttcagcccgagcagcactcttttctcttcctctcgtttgcgatatggaatgtctgatgtcatgccttctggcaggagcaggcttttggaagattttcgaaacaaccggtaccccaatttacaactgcgggagattgctggacatataatggaattttcccaagaccagcatgggtccagattcattcagctgaaactggagcgtgccacaccagctgagcgccagcttgtcttcaatgaaatcctccaggctgcctaccaactcatggtggatgtgtttggtaattacgtcattcagaagttctttgaatttggcagtcttgaacagaagctggctttggcagaacggattcgaggccacgtcctgtcattggcactacagatgtatggctgccgtgttatccagaaagctcttgagtttattccttcagaccagcagaatgagatggttcgggaactagatggccatgtcttgaagtgtgtgaaagatcagaatggcaatcacgtggttcagaaatgcattgaatgtgtacagccccagtctttgcaatttatcatcgatgcgtttaagggacaggtatttgccttatccacacatccttatggctgccgagtgattcagagaatcctggagcactgtctccctgaccagacactccctattttagaggagcttcaccagcacacagagcagcttgtacaggatcaatatggaaattatgtaatccaacatgtactggagcacggtcgtcctgaggataaaagcaaaattgtagcagaaatccgaggcaatgtacttgtattgagtcagcacaaatttgcaagcaatgttgtggagaagtgtgttactcacgcctcacgtacggagcgcgctgtgctcatcgatgaggtgtgcaccatgaacgacggtccccacagtgccttatacaccatgatgaaggaccagtatgccaactacgtggtccagaagatgattgacgtggcggagccaggccagcggaagatcgtcatgcataagatccggccccacatcgcaactcttcgtaagtacacctatggcaagcacattctggccaagctggagaagtactacatgaagaacggtgttgacttagggcccatctgtggcccccctaatggtatcatctgaggcagtgtcacccgctgttccctcattcccgctgacctcactggcccactggcaaatccaaccagcaaccagaaatgttctagtgtagagtctgagacgggcaagtggttgctccaggattactccctcctccaaaaaaggaatcaaatccacgagtggaaaagcctttgtaaatttaattttattacacataacatgtactattttttttaattgactaattgccctgctgttttactggtgtataggatacttgtacataggtaaccaatgtacatgggaggccacatattttgttcactgttgtatctatatttcacatgtggaaactttcagggtggttggtttaacaaaaaaaaaaagctttaaaaaaaaaagaaaaaaaggaaaaggtttttagctcatttgcctggccggcaagttttgcaaatagctcttccccacctcctcattttagtaaaaaacaaacaaaaacaaaaaaacctgagaagtttgaattgtagttaaatgaccccaaactggcatttaacactgtttataaaaaatatatatatatatatatatatatataatgaaaaaggtttcagagttgctaaagcttcagtttgtgacattaagtttatgaaattctaaaaaatgccttttttggagactatattatgctgaagaaggctgttcgtgaggaggagatgcgagcacccagaacgtcttttgaggctgggcgggtgtgattgtttactgcctactggatttttttctattaacattgaaaggtaaaatctgattatttagcatgagaaaaaaaaatccaactctgcttttggtcttgcttctataaatatatagtgtatacttggtgtagactttgcatatatacaaatttgtagtattttcttgttttgatgtctaatctgtatctataatgtaccctagtagtcgaacatacttttgattgtacaattgtacatttgtatacctgtaatgtaaatgtggagaagtttgaatcaacataaacacgttttttggtaagaaaagagaattagccagccctgtgcattcagtgtatattctcaccttttatggtcgtagcatatagtgttgtatattgtaaattgtaatttcaaccagaagtaaatttttttcttttgaaggaataaatgttctttatacagcctagttaatgtttaaaaagaaaaaaatagcttggttttatttgtcatctagtctcaagtatagcgagattctttctaaatgttattcaagattgagttctcactagtgtttttttaatcctaaaaaagtaatgttttgattttgtgacagtcaaaaggacgtgcaaaagtctagccttgcccgagctttccttacaatcagagcccctctcaccttgtaaagtgtgaatcgcccttcccttttgtacagaagatgaactgtattttgcattttgtctacttgtaagtgaatgtaacatactgtcaattttccttgtttgaatatagaattgtaacactacacggtgtacatttccagagccttgtgtatatttccaatgaacttttttgcaagcacacttgtaaccatatgtgtataattaacaaacctgtgtatgcttatgcctgggcaactattttttgtaactcttgtgtagattgtctctaaacaatgtgtgatctttattttgaaaaatacagaactttggaatctg

SEQ ID NO: 172415 - DNA, 3936 bp, Homo sapiens
  Payload ID: 13894
  Gene Symbol: PUM1
  Gene Name: pumilio RNA-binding family member 1
  Uniprot ID: Q14671
  ENST ID: ENST00000440538
  CDS Start-End: 81-3569
gggggagcgagagcgccagagagagaagatcggggggctgaaatccatcttcatcctaccgctccgcccgtgttggtggaatgagcgttgcatgtgtcttgaagagaaaagcagtgctttggcaggactctttcagcccccacctgaaacatcaccctcaagaaccagctaatcccaacatgcctgttgttttgacatctggaacagggtcgcaagcgcagccacaaccagctgcaaatcaggctcttgcagctgggactcactccagccctgtcccaggatctataggagttgcaggccgttcccaggacgacgctatggtggactacttctttcagaggcagcatggtgagcagcttgggggaggaggaagtggaggaggcggctataataatagcaaacatcgatggcctactggggataacattcatgcagaacatcaggtgcgttccatggatgaactgaatcatgattttcaagcacttgctctggagggaagagcgatgggagagcagctcttgccaggtaaaaagttttgggaaacagatgaatccagcaaagatggaccaaaaggaatattcctgggtgatcaatggcgagacagtgcctggggaacatcagatcattcagtttcccagccaatcatggtgcagagaagacctggtcagagtttccatgtgaacagtgaggtcaattctgtactgtccccacgatcggagagtgggggactaggcgttagcatggtggagtatgtgttgagctcatccccgggcgattcctgtctaagaaaaggaggatttggcccaagggatgcagacagtgatgaaaacgacaaaggtgaaaagaagaacaagggtacgtttgatggagataagctaggagatttgaaggaggagggtgatgtgatggacaagaccaatggtttaccagtgcagaatgggattgatgcagacgtcaaagattttagccgtacccctggtaattgccagaactctgctaatgaagtggatcttctgggtccaaaccagaatggttctgagggcttagcccagctgaccagcaccaatggtgccaagcctgtggaggatttctccaacatggagtcccagagtgtccccttggaccccatggaacatgtgggcatggagcctcttcagtttgattattcaggcacgcaggtacctgtggactcagcagcagcaactgtgggactttttgactacaattctcaacaacagctgttccaaagacctaatgcgcttgctgtccagcagttgacagctgctcagcagcagcagtatgcactggcagctgctcatcagccgcacatcgcaggtttagctcccgctgcgtttgtccccaatccatacatcatcagcgctgctcccccagggacggacccctacacagctggattggctgcagcagcgacactaggcccagctgtggtccctcaccagtattatggagttactccctggggagtctaccctgccagtcttttccagcagcaagctgccgctgccgctgcagcaactaattcagctaatcaacagaccaccccacaggctcagcaaggacagcagcaggttctccgtggaggagccagccaacgtcctttgaccccaaaccagaaccagcagggacagcaaacggatccccttgtggcagctgcagcagtgaattctgcccttgcatttggacaaggtctggcagcaggcatgccaggttatccggtgttggctcctgctgcttactatgaccaaactggtgcccttgtagtgaatgcaggcgcgagaaatggtcttggagctcctgttcgacttgtagctcctgccccagtcatcattagttcctcagctgcacaagcaggaacacagcagcctcagccccagccccagcagcagcccaataacaacctggcatccagttctttctacggcaacaactctctgaacagcaattcacagagcagctccctcttctcccagggctctgcccagcctgccaacacatccttgggattcggaagtagcagttctctcggcgccaccctgggatccgcccttggagggtttggaacagcagttgcaaactccaacactggcagtggctcccgccgtgactccctgactggcagcagtgacctttataagaggacatcgagcagcttgacccccattggacacagtttttataacggccttagcttttcctcctctcctggacccgtgggcatgcctctccctagtcagggaccaggacattcacagacaccacctccttccctctcttcacatggatcctcttcaagcttaaacctgggaggactcacgaatggcagtggaagatacatctctgctgctccaggcgctgaagccaagtaccgcagtgcaagcagcgcctccagcctcttcagcccgagcagcactcttttctcttcctctcgtttgcgatatggaatgtctgatgtcatgccttctggcaggagcaggcttttggaagattttcgaaacaaccggtaccccaatttacaactgcgggagattgctggacatataatggaattttcccaagaccagcatgggtccagattcattcagctgaaactggagcgtgccacaccagctgagcgccagcttgtcttcaatgaaatcctccaggctgcctaccaactcatggtggatgtgtttggtaattacgtcattcagaagttctttgaatttggcagtcttgaacagaagctggctttggcagaacggattcgaggccacgtcctgtcattggcactacagatgtatggctgccgtgttatccagaaagctcttgagtttattccttcagaccagcaggtaattaatgagatggttcgggaactagatggccatgtcttgaagtgtgtgaaagatcagaatggcaatcacgtggttcagaaatgcattgaatgtgtacagccccagtctttgcaatttatcatcgatgcgtttaagggacaggtatttgccttatccacacatccttatggctgccgagtgattcagagaatcctggagcactgtctccctgaccagacactccctattttagaggagcttcaccagcacacagagcagcttgtacaggatcaatatggaaattatgtaatccaacatgtactggagcacggtcgtcctgaggataaaagcaaaattgtagcagaaatccgaggcaatgtacttgtattgagtcagcacaaatttgcaagcaatgttgtggagaagtgtgttactcacgcctcacgtacggagcgcgctgtgctcatcgatgaggtgtgcaccatgaacgacggtccccacagtgccttatacaccatgatgaaggaccagtatgccaactacgtggtccagaagatgattgacgtggcggagccaggccagcggaagatcgtcatgcataagatccggccccacatcgcaactcttcgtaagtacacctatggcaagcacattctggccaagctggagaagtactacatgaagaacggtgttgacttagggcccatctgtggcccccctaatggtatcatctgaggcagtgtcacccgctgttccctcattcccgctgacctcactggcccactggcaaatccaaccagcaaccagaaatgttctagtgtagagtctgagacgggcaagtggttgctccaggattactccctcctccaaaaaaggaatcaaatccacgagtggaaaagcctttgtaaatttaattttattacacataacatgtactattttttttaattgactaattgccctgctgttttactggtgtataggatacttgtacataggtaaccaatgtacatgggaggccacatattttgttcactgttgtatctatatttcacatgtggaaactttcagggtggttggtttaacaaaaaaaaaaagcttt

SEQ ID NO: 172416 - DNA, 683 bp, Homo sapiens
  Payload ID: 13894
  Gene Symbol: PUM1
  Gene Name: pumilio RNA-binding family member 1
  ENST ID: ENST00000529846
  CDS Start-End: 1-683
gctggacatataatggaattttcccaagaccagcatgggtccagattcattcagctgaaactggagcgtgccacaccagctgagcgccagcttgtcttcaatgaaatcctccaggctgcctaccaactcatggtggatgtgtttggtaattacgtcattcagaagttctttgaatttggcagtcttgaacagaagctggctttggcagaacggattcgaggccacgtcctgtcattggcactacagatgtatggctgccgtgttatccagaaagctcttgagtttattccttcagaccagcaggtaattaatgagatggttcgggaactagatggccatgtcttgaagtgtgtgaaagatcagaatggcaatcacgtggttcagaaatgcattgaatgtgtacagccccagtctttgcaatttatcatcgatgcgtttaagggacaggatcaatatggaaattatgtaatccaacatgtactggagcacggtcgtcctgaggataaaagcaaaattgtagcagaaatccgaggcaatgtacttgtattgagtcagcacaaatttgcaagcaatgttgtggagaagtgtgttactcacgcctcacgtacggagcgcgctgtgctcatcgatgaggtgtgcaccatgaacgacggtccccacagtgccttatacaccatgatgaa

SEQ ID NO: 172417 - DNA, 549 bp, Homo sapiens
  Payload ID: 13894
  Gene Symbol: PUM1
  Gene Name: pumilio RNA-binding family member 1
  ENST ID: ENST00000531867
  CDS Start-End: 262-549
cactctgtcgcccaagcgggtgtgcagcctcccgctcctgggctcaaatgatcctcccacctcagcctccctagtagctgggactataggcacatgccaccatgcctggctaattatttttagtagagataggtcttgctatgttgcccaggctggtcttgaactcctgggctcaagctgtctgcccacctcagcctcccaaagtgctgggattgtaggtatgagccaccacacccaactgaggcttctggtgttggtggaatgagcgttgcatgtgtcttgaagagaaaagcagtgctttggcaggactctttcagcccccacctgaaacatcaccctcaagaaccagctaatcccaacatgcctgttgttttgacatctggaacagggtcgcaagcgcagccacaaccagctgcaaatcaggctcttgcagctgggactcactccagccctgtcccaggatctataggagttgcaggccgttcccaggacgacgctatggtggactacttctttcagaggcagcatggtgagcagcttgggggagga

SEQ ID NO: 172418 - DNA, 652 bp, Homo sapiens
  Payload ID: 13894
  Gene Symbol: PUM1
  Gene Name: pumilio RNA-binding family member 1
  ENST ID: ENST00000527498
  CDS Start-End: 1-273
tccctgactggcagcagtgacctttataagaggacatcgagcagcttgacccccattggacacagtttttataacggccttagcttttcctcctctcctggacccgtgggcatgcctctccctagtcagggaccaggacattcacagacaccacctccttccctctcttcacatggatcctcttcaagcttaaacctgggagcaggcttttggaagattttcgaaacaaccggtaccccaatttacaactgcgggagattgctggacatataatggaattttcccaagaccagcatgggtccagattcattcagctgaaactggagcgtgccacaccagctgagcgccagcttgtcttcaatgaaatcctccaggctgcctaccaactcatggtggatgtgtttggtaattacgtcattcagaagttctttgaatttggcagtcttgaacagaagctggctttggcagaacggattcgaggccacgtcctgtcattggcactacagatgtatggctgccgtgttatccagaaagctcttgagtttattccttcagaccagcaggtaattaatgagatggttcgggaactagatggccatgtcttgaagtgtgtgaaagatcagaatggcaatcacgtggttcagaaatgcat

SEQ ID NO: 172419 - DNA, 1103 bp, Homo sapiens
  Payload ID: 13894
  Gene Symbol: PUM1
  Gene Name: pumilio RNA-binding family member 1
  ENST ID: ENST00000525948
  CDS Start-End: 92-376
gtgaaaggtaagggggagcgagagcgccagagagagaagatcggggggctgaaatccatcttcatcctaccgctccgcccgtgttggtggaatgagcgttgcatgtgtcttgaagagaaaagcagtgctttggcaggactctttcagcccccacctgaaacatcaccctcaagaaccagctaatcccaacatgcctgttgttttgacatctggaacagggtcgcaagcgcagccacaaccagctgcaaatcaggctcttgcagctgggactcactccagccctgtcccaggatctataggagttgcaggccgttcccaggacgacgctatggtggactacttctttcagaggcagcatggtgcgttccatggatgaactgaatcatgattttcaagcacttgctctggagggaagagcgatgggagagcagctcttgccaggtaaaaagttttgggaaacagatgaatccagcaaagatggaccaaaaggaatattcctgggtgatcaatggcgagacagtgcctggggaacatcagatcattcagtttcccagccaatcatggtgcagagaagacctggtcagagtttccatgtgaacagtgaggtcaattctgtactgtccccacgatcggagagtgggggactaggcgttagcatggtggagtatgtgttgagctcatccccgggcgattcctgtctaagaaaaggaggatttggcccaagggatgcagacagtgatgaaaacgacaaaggtgaaaagaagaacaagggtacgtttgatggagataagctaggagatttgaaggaggagggtgatgtgatggacaagaccaatggtttaccagtgcagaatgggattgatgcagacgtcaaagattttagccgtacccctggtaattgccagaactctgctaatgaagtggatcttctgggtccaaaccagaatggttctgagggcttagcccagctgaccagcaccaatggtgccaagcctgtggaggatttctccaacatggagtcccagagtgtccccttggaccccatggaacatgtgggcatggagcctcttcagtttgattattcaggcacgcaggtacctgtg

SEQ ID NO: 172420 - DNA, 650 bp, Homo sapiens
  Payload ID: 13894
  Gene Symbol: PUM1
  Gene Name: pumilio RNA-binding family member 1
  ENST ID: ENST00000525997
  CDS Start-End: 1-650
tggaattttcccaagaccagcatgggtccagattcattcagctgaaactggagcgtgccacaccagctgagcgccagcttgtcttcaatgaaatcctccaggctgcctaccaactcatggtggatgtgtttggtaattacgtcattcagaagttctttgaatttggcagtcttgaacagaagctggctttggcagaacggattcgaggccacgtcctgtcattggcactacagatgtatggctgccgtgttatccagaaagctcttgagtttattccttcagaccagcaggtatttgccttatccacacatccttatggctgccgagtgattcagagaatcctggagcactgtctccctgaccagacactccctattttagaggagcttcaccagcacacagagcagcttgtacaggatcaatatggaaattatgtaatccaacatgtactggagcacggtcgtcctgaggataaaagcaaaattgtagcagaaatccgaggcaatgtacttgtattgagtcagcacaaatttgcaagcaatgttgtggagaagtgtgttactcacgcctcacgtacggagcgcgctgtgctcatcgatgaggtgtgcaccatgaacgacggtccccacagtgccttatacaccatgatg

SEQ ID NO: 172421 - DNA, 3068 bp, Homo sapiens
  Payload ID: 13894
  Gene Symbol: PUM1
  Gene Name: pumilio RNA-binding family member 1
  ENST ID: ENST00000498419
  CDS Start-End: 1-2701
ttttagccgtacccctggtaattgccagaactctgctaatgaagtggatcttctgggtccaaaccagaatggttctgagggcttagcccagctgaccagcaccaatggtgccaagcctgtggaggatttctccaacatggagtcccagagtgtccccttggaccccatggaacatgtgggcatggagcctcttcagtttgattattcaggcacgcaggtacctgtggactcagcagcagcaactgtgggactttttgactacaattctcaacaacagctgttccaaagacctaatgcgcttgctgtccagcagttgacagctgctcagcagcagcagtatgcactggcagctgctcatcagccgcacatcggtatgttttcagcaggtttagctcccgctgcgtttgtccccaatccatacatcatcagcgctgctcccccagggacggacccctacacagctggattggctgcagcagcgacactaggcccagctgtggtccctcaccagtattatggagttactccctggggagtctaccctgccagtcttttccagcagcaagctgccgctgccgctgcagcaactaattcagctaatcaacagaccaccccacaggctcagcaaggacagcagcaggttctccgtggaggagccagccaacgtcctttgaccccaaaccagaaccagcagggacagcaaacggatccccttgtggcagctgcagcagtgaattctgcccttgcatttggacaaggtctggcagcaggcatgccaggttatccggtgttggctcctgctgcttactatgaccaaactggtgcccttgtagtgaatgcaggcgcgagaaatggtcttggagctcctgttcgacttgtagctcctgccccagtcatcattagttcctcagctgcacaagcagctgttgcagcagccgcagcttcagcaaatggagcagctggtggtcttgctggaacaacaaatggaccatttcgccctttaggaacacagcagcctcagccccagccccagcagcagcccaataacaacctggcatccagttctttctacggcaacaactctctgaacagcaattcacagagcagctccctcttctcccagggctctgcccagcctgccaacacatccttgggattcggaagtagcagttctctcggcgccaccctgggatccgcccttggagggtttggaacagcagttgcaaactccaacactggcagtggctcccgccgtgactccctgactggcagcagtgacctttataagaggacatcgagcagcttgacccccattggacacagtttttataacggccttagcttttcctcctctcctggacccgtgggcatgcctctccctagtcagggaccaggacattcacagacaccacctccttccctctcttcacatggatcctcttcaagcttaaacctgggaggactcacgaatggcagtggaagatacatctctgctgctccaggcgctgaagccaagtaccgcagtgcaagcagcgcctccagcctcttcagcccgagcagcactcttttctcttcctctcgtttgcgatatggaatgtctgatgtcatgccttctggcaggagcaggcttttggaagattttcgaaacaaccggtaccccaatttacaactgcgggagattgctggacatataatggaattttcccaagaccagcatgggtccagattcattcagctgaaactggagcgtgccacaccagctgagcgccagcttgtcttcaatgaaatcctccaggctgcctaccaactcatggtggatgtgtttggtaattacgtcattcagaagttctttgaatttggcagtcttgaacagaagctggctttggcagaacggattcgaggccacgtcctgtcattggcactacagatgtatggctgccgtgttatccagaaagctcttgagtttattccttcagaccagcaggtaattaatgagatggttcgggaactagatggccatgtcttgaagtgtgtgaaagatcagaatggcaatcacgtggttcagaaatgcattgaatgtgtacagccccagtctttgcaatttatcatcgatgcgtttaagggacaggtatttgccttatccacacatccttatggctgccgagtgattcagagaatcctggagcactgtctccctgaccagacactccctattttagaggagcttcaccagcacacagagcagcttgtacaggatcaatatggaaattatgtaatccaacatgtactggagcacggtcgtcctgaggataaaagcaaaattgtagcagaaatccgaggcaatgtacttgtattgagtcagcacaaatttgcaagcaatgttgtggagaagtgtgttactcacgcctcacgtacggagcgcgctgtgctcatcgatgaggtgtgcaccatgaacgacggtccccacagtgccttatacaccatgatgaaggaccagtatgccaactacgtggtccagaagatgattgacgtggcggagccaggccagcggaagatcgtcatgcataagatccggccccacatcgcaactcttcgtaagtacacctatggcaagcacattctggccaagctggagaagtactacatgaagaacggtgttgacttagggcccatctgtggcccccctaatggtatcatctgaggcagtgtcacccgctgttccctcattcccgctgacctcactggcccactggcaaatccaaccagcaaccagaaatgttctagtgtagagtctgagacgggcaagtggttgctccaggattactccctcctccaaaaaaggaatcaaatccacgagtggaaaagcctttgtaaatttaattttattacacataacatgtactattttttttaattgactaattgccctgctgttttactggtgtataggatacttgtacataggtaaccaatgtacatgggaggccacatattttgttcactgttgtatctatatttcacatgtggaaactttcagggtggttggtttaacaaaaaaaaaaagcttt

SEQ ID NO: 172422 - DNA, 582 bp, Homo sapiens
  Payload ID: 13894
  Gene Symbol: PUM1
  Gene Name: pumilio RNA-binding family member 1
  ENST ID: ENST00000530669
  CDS Start-End: 1-231
tttatcatcgatgcgtttaagggacaggtatttgccttatccacacatccttatggctgccgagtgattcagagaatcctggagcactgtctccctgaccagacactccctattttagaggagcttcaccagcacacagagcagcttgtacaggtagtggagttgccagtagaggaactgcgaacacctgtgggcttgtgcagggccagagtttgtgtgttttgtcagtgatcaatatggaaattatgtaatccaacatgtactggagcacggtcgtcctgaggataaaagcaaaattgtagcagaaatccgaggcaatgtacttgtattgagtcagcacaaatttgcaagcaatgttgtggagaagtgtgttactcacgcctcacgtacggagcgcgctgtgctcatcgatgaggtgtgcaccatgaacgacggtccccacagtgccttatacaccatgatgaaggaccagtatgccaactacgtggtccagaagatgattgacgtggcggagccaggccagcggaagatcgtcatgcataagatccggccccacatcgcaactcttcgtaagtacaccta

SEQ ID NO: 172423 - DNA, 793 bp, Homo sapiens
  Payload ID: 13894
  Gene Symbol: PUM1
  Gene Name: pumilio RNA-binding family member 1
  ENST ID: ENST00000532678
  CDS Start-End: 1-793
caatggtttaccagtgcagaatgggattgatgcagacgtcaaagattttagccgtacccctggtaattgccagaactctgctaatgaagtggatcttctgggtccaaaccagaatggttctgagggcttagcccagctgaccagcaccaatggtgccaagcctgtggaggatttctccaacatggagtcccagagtgtccccttggaccccatggaacatgtgggcatggagcctcttcagtttgattattcaggcacgcaggtacctgtggactcagcagcagcaactgtgggactttttgactacaattctcaacaacagctgttccaaagacctaatgcgcttgctgtccagcagttgacagctgctcagcagcagcagtatgcactggcagctgctcatcagccgcacatcggcccagctgtggtccctcaccagtattatggagttactccctggggagtctaccctgccagtcttttccagcagcaagctgccgctgccgctgcagcaactaattcagctaatcaacagaccaccccacaggctcagcaaggacagcagcaggttctccgtggaggagccagccaacgtcctttgaccccaaaccagaaccagcagggacagcaaacggatccccttgtggcagctgcagcagtgaattctgcccttgcatttggacaaggtctggcagcaggcatgccaggttatccggtgttggctcctgctgcttactatgaccaaactggtgcccttgtagtgaatgcaggcgcgagaaatggtcttggagct

SEQ ID NO: 172424 - DNA, 4528 bp, Homo sapiens
  Payload ID: 13894
  Gene Symbol: PUM1
  Gene Name: pumilio RNA-binding family member 1
  ENST ID: ENST00000525843
  CDS Start-End: 1-3376
ccagtccccagtgggccgccatgttgtcggagtgaaaggtgttggtggaatgagcgttgcatgtgtcttgaagagaaaagcagtgctttggcaggactctttcagcccccacctgaaacatcaccctcaagaaccagctaatcccaacatgcctgttgttttgacatctggaacagggtcgcaagcgcagccacaaccagctgcaaatcaggctcttgcagctgggactcactccagccctgtcccaggatctataggagttgcaggccgttcccaggacgacgctatggtggactacttctttcagaggcagcatggtgagcagcttgggggaggaggaagtggaggaggcggctataataatagcaaacatcgatggcctactggggataacattcatgcagaacatcaggtgcgttccatggatgaactgaatcatgattttcaagcacttgctctggagggaagagcgatgggagagcagctcttgccaggtaaaaagttttgggaaacagatgaatccagcaaagatggaccaaaaggaatattcctgggtgatcaatggcgagacagtgcctggggaacatcagatcattcagtttcccagccaatcatggtgcagagaagacctggtcagagtttccatgtgaacagtgaggtcaattctgtactgtccccacgatcggagagtgggggactaggcgttagcatggtggagtatgtgttgagctcatccccgggcgattcctgtctaagaaaaggaggatttggcccaagggatgcagacagtgatgaaaacgacaaaggtgaaaagaagaacaagggtacgtttgatggagataagctaggagatttgaaggaggagggtgatgtgatggacaagaccaatggtttaccagtgcagaatgggattgatgcagacgtcaaagattttagccgtacccctggtaattgccagaactctgctaatgaagtggatcttctgggtccaaaccagaatggttctgagggcttagcccagctgaccagcaccaatggtgccaagcctgtggaggatttctccaacatggagtcccagagtgtccccttggaccccatggaacatgtgggcatggagcctcttcagtttgattattcaggcacgcaggtacctgtggactcagcagcagcaactgtgggactttttgactacaattctcaacaacagctgttccaaagacctaatgcgcttgctgtccagcagttgacagctgctcagcagcagcagtatgcactggcagctgctcatcagccgcacatcgcaggtttagctcccgctgcgtttgtccccaatccatacatcatcagcgctgctcccccagggacggacccctacacagctggattggctgcagcagcgacactaggcccagctgtggtccctcaccagtattatggagttactccctggggagtctaccctgccagtcttttccagcagcaagctgccgctgccgctgcagcaactaattcagctaatcaacagaccaccccacaggctcagcaaggacagcagcaggttctccgtggaggagccagccaacgtcctttgaccccaaaccagaaccagcagggacagcaaacggatccccttgtggcagctgcagcagtgaattctgcccttgcatttggacaaggtctggcagcaggcatgccaggttatccggtgttggctcctgctgcttactatgaccaaactggtgcccttgtagtgaatgcaggcgcgagaaatggtcttggagctcctgttcgacttgtagctcctgccccagtcatcattagttcctcagctgcacaagcagctgttgcagcagccgcagcttcagcaaatggagcagctggtggtcttgctggaacaacaaatggaccatttcgccctttaggaacacagcagcctcagccccagccccagcagcagcccaataacaacctggcatccagttctttctacggcaacaactctctgaacagcaattcacagagcagctccctcttctcccagggctctgcccagcctgccaacacatccttgggattcggaagtagcagttctctcggcgccaccctgggatccgcccttggagggtttggaacagcaggaggactcacgaatggcagtggaagatacatctctgctgctccaggcgctgaagccaagtaccgcagtgcaagcagcgcctccagcctcttcagcccgagcagcactcttttctcttcctctcgtttgcgatatggaatgtctgatgtcatgccttctggcaggagcaggcttttggaagattttcgaaacaaccggtaccccaatttacaactgcgggagattgctggacatataatggaattttcccaagaccagcatgggtccagattcattcagctgaaactggagcgtgccacaccagctgagcgccagcttgtcttcaatgaaatcctccaggctgcctaccaactcatggtggatgtgtttggtaattacgtcattcagaagttctttgaatttggcagtcttgaacagaagctggctttggcagaacggattcgaggccacgtcctgtcattggcactacagatgtatggctgccgtgttatccagaaagctcttgagtttattccttcagaccagcagaatgagatggttcgggaactagatggccatgtcttgaagtgtgtgaaagatcagaatggcaatcacgtggttcagaaatgcattgaatgtgtacagccccagtctttgcaatttatcatcgatgcgtttaagggacaggtatttgccttatccacacatccttatggctgccgagtgattcagagaatcctggagcactgtctccctgaccagacactccctattttagaggagcttcaccagcacacagagcagcttgtacaggatcaatatggaaattatgtaatccaacatgtactggagcacggtcgtcctgaggataaaagcaaaattgtagcagaaatccgaggcaatgtacttgtattgagtcagcacaaatttgcaagcaatgttgtggagaagtgtgttactcacgcctcacgtacggagcgcgctgtgctcatcgatgaggtgtgcaccatgaacgacggtccccacagtgccttatacaccatgatgaaggaccagtatgccaactacgtggtccagaagatgattgacgtggcggagccaggccagcggaagatcgtcatgcataagatccggccccacatcgcaactcttcgtaagtacacctatggcaagcacattctggccaagctggagaagtactacatgaagaacggtgttgacttagggcccatctgtggcccccctaatggtatcatctgaggcagtgtcacccgctgttccctcattcccgctgacctcactggcccactggcaaatccaaccagcaaccagaaatgttctagtgtagagtctgagacgggcaagtggttgctccaggattactccctcctccaaaaaaggaatcaaatccacgagtggaaaagcctttgtaaatttaattttattacacataacatgtactattttttttaattgactaattgccctgctgttttactggtgtataggatacttgtacataggtaaccaatgtacatgggaggccacatattttgttcactgttgtatctatatttcacatgtggaaactttcagggtggttggtttaacaaaaaaaaaaagctttaaaaaaaaaagaaaaaaaggaaaaggtttttagctcatttgcctggccggcaagttttgcaaatagctcttccccacctcctcattttagtaaaaaacaaacaaaaacaaaaaaacctgagaagtttgaattgtagttaaatgaccccaaactggcatttaacactgtttataaaaaatatatatatatatatatatatatataatgaaaaaggtttcagagttgctaaagcttcagtttgtgacattaagtttatgaaattctaaaaaatgccttttttggagactatattatgctgaagaaggctgttcgtgaggaggagatgcgagcacccagaacgtcttttgaggctgggcgggtgtgattgtttactgcctactggatttttttctattaacattgaaaggtaaaatctgattatttagcatgagaaaaaaaaatccaactctgcttttggtcttgcttctataaatatatagtgtatacttggtgtagactttgcatatatacaaatttgtagtattttcttgttttgatgtctaatctgtatctataatgtaccctagtagtcgaacatacttttgattgtacaattgtacatttgtatacctgtaatgtaaatgtggagaagtttgaatcaacataaacacgttttttggtaagaaaagagaattagccagccctgtgcattcagtgtatattctcaccttttatggtcgtagcatatagtgttgtatattgtaaattgtaatttcaaccagaagtaaatttttttcttttgaagg

SEQ ID NO: 172425 - DNA, 586 bp, Homo sapiens
  Payload ID: 13894
  Gene Symbol: PUM1
  Gene Name: pumilio RNA-binding family member 1
  ENST ID: ENST00000526215
  CDS Start-End: 73-357
gagagcgccagagagagaagatcggggggctgaaatccatcttcatcctaccgctccgcccgtgttggtggaatgagcgttgcatgtgtcttgaagagaaaagcagtgctttggcaggactctttcagcccccacctgaaacatcaccctcaagaaccagctaatcccaacatgcctgttgttttgacatctggaacagggtcgcaagcgcagccacaaccagctgcaaatcaggctcttgcagctgggactcactccagccctgtcccaggatctataggagttgcaggccgttcccaggacgacgctatggtggactacttctttcagaggcagcatggtgcgttccatggatgaactgaatcatgattttcaagcacttgctctggagggaagagcgatgggagagcagctcttgccaggtaaaaagttttgggaaacagatgaatccagcaaagatggaccaaaaggaatattcctgggtgatcaatggcgagacagtgcctggggaacatcagctgttccaaagacctaatgcgcttgctgtccagcagttgacagctgctcagcagcagcagtatgcact

SEQ ID NO: 172426 - DNA, 906 bp, Homo sapiens
  Payload ID: 13894
  Gene Symbol: PUM1
  Gene Name: pumilio RNA-binding family member 1
  ENST ID: ENST00000480602
  CDS Start-End: 80-454
ggggagcgagagcgccagagagagaagatcggggggctgaaatccatcttcatcctaccgctccgcccgtgttggtggaatgagcgttgcatgtgtcttgaagagaaaagcagtgctttggcaggactctttcagcccccacctgaaacatcaccctcaagaaccagctaatcccaacatgcctgttgttttgacatctggaacagggtcgcaagcgcagccacaaccagctgcaaatcaggctcttgcagctgggactcactccagccctgtcccaggatctataggagttgcaggccgttcccaggacgacgctatggtggactacttctttcagaggcagcatggtgagcagcttgggggaggaggaagtggaggaggcggctataataatagcaaacatcgatggcctactggggataacattcatgcagaacatcaggaggtattatgaaactttcgtgttgattgaatgagggaagacgagaggttcttcagttttgcgctcaggtgcgttccatggatgaactgaatcatgattttcaagcacttgctctggagggaagagcgatgggagagcagctcttgccaggtaaaaagttttgggaaacagatgaatccagcaaagatggaccaaaaggaatattcctgggtgatcaatggcgagacagtgcctggggaacatcagatcattcagtttcccagccaatcatggtgcagagaagacctggtcagagtttccatgtgaacagtgaggtcaattctgtactgtccccacgatcggagagtgggggactaggcgttagcatggtggagtatgtgttgagctcatccccgggcgattcctgtctaagaaaaggaggatttggcccaagggatgcagacagtgatgaaaacgacaaaggt

SEQ ID NO: 172427 - DNA, 6002 bp, Homo sapiens
  Payload ID: 13895
  Gene Symbol: PUM2
  Gene Name: pumilio RNA-binding family member 2
  ENST ID: ENST00000319801
  CDS Start-End: 320-3109
ttcaacaggtttgatctgtggatgaaatgaatcatgattttcaagctcttgcattagaatctcggggaatgggagagatgcagaaaagagtccaagtctctcctttgggccacaagagggcaccctgcagctagctaaccctccccttcttcagaacagcgttttccaaagagtatgtcattttcagaggactgatttaaggcttttgcctaccaaaaagttttgggaacctgatgattcaacaaaagatggacaaaaaggcatatttcttggggatgatgaatggagagagactgcatggggagcttctcaccattcaatgtcccagcctattatggtacagagaagatctggacagggttttcatggaaacagtgaagtaaatgcaatactgtctccgcgatcagaaagtggaggccttggtgtgagcatggtagaatatgtattaagttcttctcctgctgataaattggattctcgatttaggaagggaaattttggcactagagatgctgaaacagatggacctgagaaaggagatcaaaaaggcaaggcttctccatttgaggaggaccaaaacagagatcttaaacaaggagatgatgatgattctaaaataaatggcagaggtttgccaaatggaatggatgccgattgcaaagattttaatcgtactcctggaagtcgtcaagcctctccaactgaagtagttgagcgcttgggccccaatactaatccctcagaaggactggggcctcttcctaatcctacagctaataaaccacttgttgaagaattttcaaatcctgaaactcagaatctggatgccatggaacaagttggtctggaatccttacagtttgactatcctggtaatcaggtaccaatggactcttcaggagctactgtaggcctttttgactacaattcccagcagcagctctttcagaggactaatgcactaacagttcaacagttaactgcagctcaacagcagcaatatgcattagcagcagctcagcagccacatatagctggtgtattctcagcaggccttgctccagctgcatttgtgccaaatccatacattattagtgctgctcctccagggaccgatccgtatactgcagcaggattggctgcagcagctacattagcaggtccagcagtggttccacctcagtattacggcgttccatggggggtgtatccagccaacttatttcagcagcaagctgcagctgcggcaaataacacagccagtcagcaagcagcatcacaagctcagcctggacagcaacaggttctccgtgctggagcaggtcagcgtcctcttactcccaatcagggtcagcaagggcagcaagcagaatcacttgcggcagctgcagcagcaaatccaacattggcttttggtcagggtcttgctactggcatgccaggctatcaagtactagctccaactgcctattatgatcagactggtgccttagtggttggccctggagcaaggactggccttggagctccagttcggttaatggctccaacacctgttttaattagttcagcagcagcacaagctgcagcagcagcagcagctggaggaactgcaagtagccttacaggcagcacaaatggtctgtttcggccaattggcactcagccaccacagcagcagcaacagcagccaagcactaatctgcaatctaattcattttatggaagcagttctttgactaatagctcccagagtagttctttattttctcatggacctggtcaacctggaagtacatctcttggctttggaagtggtaactctttgggtgctgctataggctcagccctcagtggatttggttcatcaggaggactgacaaatggtagtggtcgatatatctctgcagcacctggagcagaagcaaaatatcgaagtgcttcaagcacttccagtctatttagctccagcagccagctctttcctccttcccggcttcggtataataggtctgatattatgccttctggccgcagtagattattggaagatttcagaaacaaccgcttcccaaaccttcagcttagagacttgattggacatatagttgagttttctcaagaccagcatggttctagattcatacagcaaaaactagagagagctactccagctgagcgacagatggtatttaatgaaattctgcaagcagcctatcaattaatgactgatgtttttggcaactatgttatacagaagttttttgagtttgggagtctggatcaaaaattagccctggctactcgtattcgtggtcatgttctacccttagccttgcagatgtatggctgccgcgttattcagaaagcattagaatctatttcttctgaccagcagagtgaaatggtaaaggagctggatggtcatgtgctcaaatgtgtgaaagatcagaatggaaaccatgttgtacaaaaatgtatcgaatgtgttcagccacagtcactacagttcatcattgatgctttcaagggacaagtatttgtgctttcaactcatccttatggctgcagagtaattcagcgcatcctagagcattgcactgcagaacagaccttacctatcttagaagaactccaccaacatacagagcagttggtacaggatcagtatggcaattatgttattcagcatgtactggaacacggtcgacctgaagacaagagcaaaattgtttccgaaatcaggggaaaggttttagccctgagtcaacacaaatttgccagcaatgtagtagaaaagtgtgttactcatgcctcccgtgctgagagagctttactgattgacgaggtttgctgccagaatgatggtcctcacagtgccttatacaccatgatgaaggaccagtatgccaattacgtggttcaaaagatgattgatatggctgaacctgctcagagaaagataatcatgcacaagattcgacctcacattactactttgcgcaaatacacatacgggaagcatatactggccaagttggaaaagtattatttgaagaatagcccggacctaggacctattggaggaccaccaaatggaatgctgtaaattacaggagcaagagaaagaagataatttaaccatgtgaaaagaatttttttgtgtgtgaattatcaaaacacaactcaactatgaatcttcaatttttttttaaagcaaaactatttattgactttattcatccatttgtaaattttttaaggttcttgtgtatatttggggggtgggggatgaattataaattatattcagccctgagtggagacctatcagattggattgctggcaaagcacagaatgcctgtatatgatgtaactgtatcaaaaataaaaagctgtcacatattttgtaaatttttaccttgtaaagtcacaaaaatagtttttaaaggaaaaagtacagtattcttttaataaactggctcacagtctggtaggtctacaaccccatagcacaacaggtttatagagatgtatatagaattatagtccttatttttttcctttgcgtgaaaccttttataacagattaacaatcaactgcataaatattattaatattttaaaaagagttaagttgtattttgataattcacaaactatcatgcaaataacgagtaagtagacaagaataaagtggtttgagatgaaaagaacctaacattatttacagtagatgtggttttaatacaattactgccctaaaatgtctctggcaatgtacagaaatattgtatatacttacatatgtaattgttgtaagagttaaatacaaaatcatggtgacacttccaattaagtgcactaaatgaaaagttaagtcacttattaacttttcagtttggtttgcaatgagaaagagtggaaatttgtattttgttttgcttatagaattacagacatgttgaggaagtgttgagctttattttgctttttcatagaggcagaaagtaggaaccagatagagatgaaaaggggccactgaaaagtgaatttgatagctcagcatttaagcatgattacatattcagatagctctttttgctttctataaatatatgcattgtgtgtgtagtaatagatgtaagtttacactttgaaaggaaatcttgtttcaatgtttattataaaagccttgctaatttagtagtgatgctttccttggttgtacaggtgtacatttgtaaaccttcatgctgtaaatggaatttgttttatctctttgggatacatttgcattttagtgtacatttacgtccctgccctctttgacctggcaatatagtgttgtataatgtaaatttatttctccaaatcgagagtgattttttaaaaattttttatctttatatggtttcagaagtatgaaccagctttctttttattattgtgagatcattttgttttataacatagttgttgactgttaatatggacctgctagaatttggatcactttcaattgaagtcagggtattgtgcataatagaaagtattggactgagatatttggttaccatggaggccaatgcttttttcatcttattaaatgtgatgtgacttttttctttgtacagaagagtactgtatttttgaatagcctactcccaagtaagagcaaatctgtatgataacattttttcctctggacataagacataacagtaacacgatgtacatttacaagcggccttatgtacatttcccaacaatctttttaaggcaaaattgtgaccatatgtgtataattaaaatcgtttttaatcctttgcctatgaaaatattttggaaaaaaacttgctgtgtatattcagtttctgaaagataaagaaagtgctttgtattttgttgaagtcagtattttgtataaacatttatgttgacccacttatgttcagtgctgaaaactaaaatgaacatgctattctgtcagctgaatatggaagagatctttttttactagagatctgcagaagaaacgcaatcttctgagcacaatatggaatctaaaggttttatcacttagttgttcatattatgaacctaaaaataatggcataaagtttggggatgccaggcatactttttcatgtttggtgttgagttattttacttttctaacccaacattccttggtgagaccattaaatccaaacacttgtcaccgttccttctcatagtcactctgggtcatcagcatgtcccagtcactgcagcaacgccttgtgtttgtttcatttttttaaaacccacacaaagccgctgtctcactttttcctactttaccaacctcagagtatttcggcccgtatcgaacttttgttctcagtatcagcccatggtttcaggatcaaagctgtcatgttggagattggtaatggctttcctgtctttgtacagttgaattcctagtcttccttcatccttgccctctgttggcacaggcattatctctgcaattttagaaaatgacaagtagagaatactacattgagaaactaaaccctcttcttggggtcctgatactcattcccatttgtcccagtgctgacaacccaatcttcccaatactttcaggcctgctctacaaaagtacctgttcttgtagaaattttacagtctgccattttgggtgcccaccccaatttttaccttttagtaagttggcatgaaattttggtaaaatctgaaaatcacatttcagaataaaacaattgggcaaaactacctaggctttactcttgagtgtctccttttgatagggattgtttctggaccagtttgtctaagtcctggctcttattggttcatatgaaataatgttaacttcacttctttgtatattatgtataaattagaaaatgaaaaatgtgtgaataacattgtatgaaataaacctggtcttgtgtttttctctagataaaatacccctctgtacctc

SEQ ID NO: 172428 - DNA, 6112 bp, Homo sapiens
  Payload ID: 13895
  Gene Symbol: PUM2
  Gene Name: pumilio RNA-binding family member 2
  Uniprot ID: Q8TB72
  ENST ID: ENST00000338086
  CDS Start-End: 24-3218
aacaggtttgatctgtggatgaaatgaatcatgattttcaagctcttgcattagaatctcggggaatgggagagcttttgcctaccaaaaagttttgggaacctgatgattcaacaaaagatggacaaaaaggcatatttcttggggatgatgaatggagagagactgcatggggagcttctcaccattcaatgtcccagcctattatggtacagagaagatctggacagggttttcatggaaacagtgaagtaaatgcaatactgtctccgcgatcagaaagtggaggccttggtgtgagcatggtagaatatgtattaagttcttctcctgctgataaattggattctcgatttaggaagggaaattttggcactagagatgctgaaacagatggacctgagaaaggagatcaaaaaggcaaggcttctccatttgaggaggaccaaaacagagatcttaaacaaggagatgatgatgattctaaaataaatggcagaggtttgccaaatggaatggatgccgattgcaaagattttaatcgtactcctggaagtcgtcaagcctctccaactgaagtagttgagcgcttgggccccaatactaatccctcagaaggactggggcctcttcctaatcctacagctaataaaccacttgttgaagaattttcaaatcctgaaactcagaatctggatgccatggaacaagttggtctggaatccttacagtttgactatcctggtaatcaggtaccaatggactcttcaggagctactgtaggcctttttgactacaattcccagcagcagctctttcagaggactaatgcactaacagttcaacagttaactgcagctcaacagcagcaatatgcattagcagcagctcagcagccacatatagctggtgtattctcagcaggccttgctccagctgcatttgtgccaaatccatacattattagtgctgctcctccagggaccgatccgtatactgcagcaggattggctgcagcagctacattagcaggtccagcagtggttccacctcagtattacggcgttccatggggggtgtatccagccaacttatttcagcagcaagctgcagctgcggcaaataacacagccagtcagcaagcagcatcacaagctcagcctggacagcaacaggttctccgtgctggagcaggtcagcgtcctcttactcccaatcagggtcagcaagggcagcaagcagaatcacttgcggcagctgcagcagcaaatccaacattggcttttggtcagggtcttgctactggcatgccaggctatcaagtactagctccaactgcctattatgatcagactggtgccttagtggttggccctggagcaaggactggccttggagctccagttcggttaatggctccaacacctgttttaattagttcagcagcagcacaagctgcagcagcagcagcagctggaggaactgcaagtagccttacaggcagcacaaatggtctgtttcggccaattggcactcagccaccacagcagcagcaacagcagccaagcactaatctgcaatctaattcattttatggaagcagttctttgactaatagctcccagagtagttctttattttctcatggacctggtcaacctggaagtacatctcttggctttggaagtggtaactctttgggtgctgctataggctcagccctcagtggatttggttcatcagttggcagttctgcaagtagtagtgccacaaggagagagtctctatctactagctctgacttgtacaaaagatctagtagcagcctagcacccatagggcaaccattttacaatagtctgggattttcctcctctccaagtccaataggcatgcctctgccaagccaaactccaggacattcacttacgccaccgccatcactttcatcacatggatcctcatccagtttgcatttaggaggactgacaaatggtagtggtcgatatatctctgcagcacctggagcagaagcaaaatatcgaagtgcttcaagcacttccagtctatttagctccagcagccagctctttcctccttcccggcttcggtataataggtctgatattatgccttctggccgcagtagattattggaagatttcagaaacaaccgcttcccaaaccttcagcttagagacttgattggacatatagttgagttttctcaagaccagcatggttctagattcatacagcaaaaactagagagagctactccagctgagcgacagatggtatttaatgaaattctgcaagcagcctatcaattaatgactgatgtttttggcaactatgttatacagaagttttttgagtttgggagtctggatcaaaaattagccctggctactcgtattcgtggtcatgttctacccttagccttgcagatgtatggctgccgcgttattcagaaagcattagaatctatttcttctgaccagcagagtgaaatggtaaaggagctggatggtcatgtgctcaaatgtgtgaaagatcagaatggaaaccatgttgtacaaaaatgtatcgaatgtgttcagccacagtcactacagttcatcattgatgctttcaagggacaagtatttgtgctttcaactcatccttatggctgcagagtaattcagcgcatcctagagcattgcactgcagaacagaccttacctatcttagaagaactccaccaacatacagagcagttggtacaggatcagtatggcaattatgttattcagcatgtactggaacacggtcgacctgaagacaagagcaaaattgtttccgaaatcaggggaaaggttttagccctgagtcaacacaaatttgccagcaatgtagtagaaaagtgtgttactcatgcctcccgtgctgagagagctttactgattgacgaggtttgctgccagaatgatggtcctcacagtgccttatacaccatgatgaaggaccagtatgccaattacgtggttcaaaagatgattgatatggctgaacctgctcagagaaagataatcatgcacaagattcgacctcacattactactttgcgcaaatacacatacgggaagcatatactggccaagttggaaaagtattatttgaagaatagcccggacctaggacctattggaggaccaccaaatggaatgctgtaaattacaggagcaagagaaagaagataatttaaccatgtgaaaagaatttttttgtgtgtgaattatcaaaacacaactcaactatgaatcttcaatttttttttaaagcaaaactatttattgactttattcatccatttgtaaattttttaaggttcttgtgtatatttggggggtgggggatgaattataaattatattcagccctgagtggagacctatcagattggattgctggcaaagcacagaatgcctgtatatgatgtaactgtatcaaaaataaaaagctgtcacatattttgtaaatttttaccttgtaaagtcacaaaaatagtttttaaaggaaaaagtacagtattcttttaataaactggctcacagtctggtaggtctacaaccccatagcacaacaggtttatagagatgtatatagaattatagtccttatttttttcctttgcgtgaaaccttttataacagattaacaatcaactgcataaatattattaatattttaaaaagagttaagttgtattttgataattcacaaactatcatgcaaataacgagtaagtagacaagaataaagtggtttgagatgaaaagaacctaacattatttacagtagatgtggttttaatacaattactgccctaaaatgtctctggcaatgtacagaaatattgtatatacttacatatgtaattgttgtaagagttaaatacaaaatcatggtgacacttccaattaagtgcactaaatgaaaagttaagtcacttattaacttttcagtttggtttgcaatgagaaagagtggaaatttgtattttgttttgcttatagaattacagacatgttgaggaagtgttgagctttattttgctttttcatagaggcagaaagtaggaaccagatagagatgaaaaggggccactgaaaagtgaatttgatagctcagcatttaagcatgattacatattcagatagctctttttgctttctataaatatatgcattgtgtgtgtagtaatagatgtaagtttacactttgaaaggaaatcttgtttcaatgtttattataaaagccttgctaatttagtagtgatgctttccttggttgtacaggtgtacatttgtaaaccttcatgctgtaaatggaatttgttttatctctttgggatacatttgcattttagtgtacatttacgtccctgccctctttgacctggcaatatagtgttgtataatgtaaatttatttctccaaatcgagagtgattttttaaaaattttttatctttatatggtttcagaagtatgaaccagctttctttttattattgtgagatcattttgttttataacatagttgttgactgttaatatggacctgctagaatttggatcactttcaattgaagtcagggtattgtgcataatagaaagtattggactgagatatttggttaccatggaggccaatgcttttttcatcttattaaatgtgatgtgacttttttctttgtacagaagagtactgtatttttgaatagcctactcccaagtaagagcaaatctgtatgataacattttttcctctggacataagacataacagtaacacgatgtacatttacaagcggccttatgtacatttcccaacaatctttttaaggcaaaattgtgaccatatgtgtataattaaaatcgtttttaatcctttgcctatgaaaatattttggaaaaaaacttgctgtgtatattcagtttctgaaagataaagaaagtgctttgtattttgttgaagtcagtattttgtataaacatttatgttgacccacttatgttcagtgctgaaaactaaaatgaacatgctattctgtcagctgaatatggaagagatctttttttactagagatctgcagaagaaacgcaatcttctgagcacaatatggaatctaaaggttttatcacttagttgttcatattatgaacctaaaaataatggcataaagtttggggatgccaggcatactttttcatgtttggtgttgagttattttacttttctaacccaacattccttggtgagaccattaaatccaaacacttgtcaccgttccttctcatagtcactctgggtcatcagcatgtcccagtcactgcagcaacgccttgtgtttgtttcatttttttaaaacccacacaaagccgctgtctcactttttcctactttaccaacctcagagtatttcggcccgtatcgaacttttgttctcagtatcagcccatggtttcaggatcaaagctgtcatgttggagattggtaatggctttcctgtctttgtacagttgaattcctagtcttccttcatccttgccctctgttggcacaggcattatctctgcaattttagaaaatgacaagtagagaatactacattgagaaactaaaccctcttcttggggtcctgatactcattcccatttgtcccagtgctgacaacccaatcttcccaatactttcaggcctgctctacaaaagtacctgttcttgtagaaattttacagtctgccattttgggtgcccaccccaatttttaccttttagtaagttggcatgaaattttggtaaaatctgaaaatcacatttcagaataaaacaattgggcaaaactacctaggctttactcttgagtgtctccttttgatagggattgtttctggaccagtttgtctaagtcctggctcttattggttcatatgaaataatgttaacttcacttctttgtatattatgtataaattagaaaatgaaaaatgtgtgaataacattgtatgaaataaacctggtcttgtgtttttctctagataaaatacccctctgtacctca

SEQ ID NO: 172429 - DNA, 6251 bp, Homo sapiens
  Payload ID: 13895
  Gene Symbol: PUM2
  Gene Name: pumilio RNA-binding family member 2
  Uniprot ID: Q8TB72
  ENST ID: ENST00000361078
  CDS Start-End: 332-3358
ggggggaggggagggcaggcggcggtggcagccatgttgttgtgagtctctgtgtctcaccctcggtacttcggtggttcggaggaggagggggaggagaaggaggaggtggggtggggggggagggtggtaggtggagaaagaagacattgccgccaccgaaggcggaggagggggaggaccgccaagagcgacgccgccgtgtgcccaacggtcggtgtccccggctgaggcagcgcggccgcagcagccctgtttgatctgtggatgaaatgaatcatgattttcaagctcttgcattagaatctcggggaatgggagagaccattcaatgtcccagcctattatggtacagagaagatctggacagggttttcatggaaacagtgaagtaaatgcaatactgtctccgcgatcagaaagtggaggccttggtgtgagcatggtagaatatgtattaagttcttctcctgctgataaattggattctcgatttaggaagggaaattttggcactagagatgctgaaacagatggacctgagaaaggagatcaaaaaggcaaggcttctccatttgaggaggaccaaaacagagatcttaaacaaggagatgatgatgattctaaaataaatggcagaggtttgccaaatggaatggatgccgattgcaaagattttaatcgtactcctggaagtcgtcaagcctctccaactgaagtagttgagcgcttgggccccaatactaatccctcagaaggactggggcctcttcctaatcctacagctaataaaccacttgttgaagaattttcaaatcctgaaactcagaatctggatgccatggaacaagttggtctggaatccttacagtttgactatcctggtaatcaggtaccaatggactcttcaggagctactgtaggcctttttgactacaattcccagcagcagctctttcagaggactaatgcactaacagttcaacagttaactgcagctcaacagcagcaatatgcattagcagcagctcagcagccacatatagctggtgtattctcagcaggccttgctccagctgcatttgtgccaaatccatacattattagtgctgctcctccagggaccgatccgtatactgcagcaggattggctgcagcagctacattagcaggtccagcagtggttccacctcagtattacggcgttccatggggggtgtatccagccaacttatttcagcagcaagctgcagctgcggcaaataacacagccagtcagcaagcagcatcacaagctcagcctggacagcaacaggttctccgtgctggagcaggtcagcgtcctcttactcccaatcagggtcagcaagggcagcaagcagaatcacttgcggcagctgcagcagcaaatccaacattggcttttggtcagggtcttgctactggcatgccaggctatcaagtactagctccaactgcctattatgatcagactggtgccttagtggttggccctggagcaaggactggccttggagctccagttcggttaatggctccaacacctgttttaattagttcagcagcagcacaagctgcagcagcagcagcagctggaggaactgcaagtagccttacaggcagcacaaatggtctgtttcggccaattggcactcagccaccacagcagcagcaacagcagccaagcactaatctgcaatctaattcattttatggaagcagttctttgactaatagctcccagagtagttctttattttctcatggacctggtcaacctggaagtacatctcttggctttggaagtggtaactctttgggtgctgctataggctcagccctcagtggatttggttcatcagttggcagttctgcaagtagtagtgccacaaggagagagtctctatctactagctctgacttgtacaaaagatctagtagcagcctagcacccatagggcaaccattttacaatagtctgggattttcctcctctccaagtccaataggcatgcctctgccaagccaaactccaggacattcacttacgccaccgccatcactttcatcacatggatcctcatccagtttgcatttaggaggactgacaaatggtagtggtcgatatatctctgcagcacctggagcagaagcaaaatatcgaagtgcttcaagcacttccagtctatttagctccagcagccagctctttcctccttcccggcttcggtataataggtctgatattatgccttctggccgcagtagattattggaagatttcagaaacaaccgcttcccaaaccttcagcttagagacttgattggacatatagttgagttttctcaagaccagcatggttctagattcatacagcaaaaactagagagagctactccagctgagcgacagatggtatttaatgaaattctgcaagcagcctatcaattaatgactgatgtttttggcaactatgttatacagaagttttttgagtttgggagtctggatcaaaaattagccctggctactcgtattcgtggtcatgttctacccttagccttgcagatgtatggctgccgcgttattcagaaagcattagaatctatttcttctgaccagcagagtgaaatggtaaaggagctggatggtcatgtgctcaaatgtgtgaaagatcagaatggaaaccatgttgtacaaaaatgtatcgaatgtgttcagccacagtcactacagttcatcattgatgctttcaagggacaagtatttgtgctttcaactcatccttatggctgcagagtaattcagcgcatcctagagcattgcactgcagaacagaccttacctatcttagaagaactccaccaacatacagagcagttggtacaggatcagtatggcaattatgttattcagcatgtactggaacacggtcgacctgaagacaagagcaaaattgtttccgaaatcaggggaaaggttttagccctgagtcaacacaaatttgccagcaatgtagtagaaaagtgtgttactcatgcctcccgtgctgagagagctttactgattgacgaggtttgctgccagaatgatggtcctcacagtgccttatacaccatgatgaaggaccagtatgccaattacgtggttcaaaagatgattgatatggctgaacctgctcagagaaagataatcatgcacaagattcgacctcacattactactttgcgcaaatacacatacgggaagcatatactggccaagttggaaaagtattatttgaagaatagcccggacctaggacctattggaggaccaccaaatggaatgctgtaaattacaggagcaagagaaagaagataatttaaccatgtgaaaagaatttttttgtgtgtgaattatcaaaacacaactcaactatgaatcttcaatttttttttaaagcaaaactatttattgactttattcatccatttgtaaattttttaaggttcttgtgtatatttggggggtgggggatgaattataaattatattcagccctgagtggagacctatcagattggattgctggcaaagcacagaatgcctgtatatgatgtaactgtatcaaaaataaaaagctgtcacatattttgtaaatttttaccttgtaaagtcacaaaaatagtttttaaaggaaaaagtacagtattcttttaataaactggctcacagtctggtaggtctacaaccccatagcacaacaggtttatagagatgtatatagaattatagtccttatttttttcctttgcgtgaaaccttttataacagattaacaatcaactgcataaatattattaatattttaaaaagagttaagttgtattttgataattcacaaactatcatgcaaataacgagtaagtagacaagaataaagtggtttgagatgaaaagaacctaacattatttacagtagatgtggttttaatacaattactgccctaaaatgtctctggcaatgtacagaaatattgtatatacttacatatgtaattgttgtaagagttaaatacaaaatcatggtgacacttccaattaagtgcactaaatgaaaagttaagtcacttattaacttttcagtttggtttgcaatgagaaagagtggaaatttgtattttgttttgcttatagaattacagacatgttgaggaagtgttgagctttattttgctttttcatagaggcagaaagtaggaaccagatagagatgaaaaggggccactgaaaagtgaatttgatagctcagcatttaagcatgattacatattcagatagctctttttgctttctataaatatatgcattgtgtgtgtagtaatagatgtaagtttacactttgaaaggaaatcttgtttcaatgtttattataaaagccttgctaatttagtagtgatgctttccttggttgtacaggtgtacatttgtaaaccttcatgctgtaaatggaatttgttttatctctttgggatacatttgcattttagtgtacatttacgtccctgccctctttgacctggcaatatagtgttgtataatgtaaatttatttctccaaatcgagagtgattttttaaaaattttttatctttatatggtttcagaagtatgaaccagctttctttttattattgtgagatcattttgttttataacatagttgttgactgttaatatggacctgctagaatttggatcactttcaattgaagtcagggtattgtgcataatagaaagtattggactgagatatttggttaccatggaggccaatgcttttttcatcttattaaatgtgatgtgacttttttctttgtacagaagagtactgtatttttgaatagcctactcccaagtaagagcaaatctgtatgataacattttttcctctggacataagacataacagtaacacgatgtacatttacaagcggccttatgtacatttcccaacaatctttttaaggcaaaattgtgaccatatgtgtataattaaaatcgtttttaatcctttgcctatgaaaatattttggaaaaaaacttgctgtgtatattcagtttctgaaagataaagaaagtgctttgtattttgttgaagtcagtattttgtataaacatttatgttgacccacttatgttcagtgctgaaaactaaaatgaacatgctattctgtcagctgaatatggaagagatctttttttactagagatctgcagaagaaacgcaatcttctgagcacaatatggaatctaaaggttttatcacttagttgttcatattatgaacctaaaaataatggcataaagtttggggatgccaggcatactttttcatgtttggtgttgagttattttacttttctaacccaacattccttggtgagaccattaaatccaaacacttgtcaccgttccttctcatagtcactctgggtcatcagcatgtcccagtcactgcagcaacgccttgtgtttgtttcatttttttaaaacccacacaaagccgctgtctcactttttcctactttaccaacctcagagtatttcggcccgtatcgaacttttgttctcagtatcagcccatggtttcaggatcaaagctgtcatgttggagattggtaatggctttcctgtctttgtacagttgaattcctagtcttccttcatccttgccctctgttggcacaggcattatctctgcaattttagaaaatgacaagtagagaatactacattgagaaactaaaccctcttcttggggtcctgatactcattcccatttgtcccagtgctgacaacccaatcttcccaatactttcaggcctgctctacaaaagtacctgttcttgtagaaattttacagtctgccattttgggtgcccaccccaatttttaccttttagtaagttggcatgaaattttggtaaaatctgaaaatcacatttcagaataaaacaattgggcaaaactacctaggctttactcttgagtgtctccttttgatagggattgtttctggaccagtttgtctaagtcctggctcttattggttcatatgaaataatgttaacttcacttctttgtatattatgtataaattagaaaatgaaaaatgtgtgaataacattgtatgaaataaacctggtcttgtgtttttctctagataaaatacccctctgtacctc

SEQ ID NO: 172430 - DNA, 3594 bp, Homo sapiens
  Payload ID: 13895
  Gene Symbol: PUM2
  Gene Name: pumilio RNA-binding family member 2
  Uniprot ID: Q8TB72
  ENST ID: ENST00000403432
  CDS Start-End: 125-3319
attgccgccaccgaaggcggaggagggggaggaccgccaagagcgacgccgccgtgtgcccaacggtcggtgtccccggctgaggcagcgcggccgcagcagccctgtttgatctgtggatgaaatgaatcatgattttcaagctcttgcattagaatctcggggaatgggagagcttttgcctaccaaaaagttttgggaacctgatgattcaacaaaagatggacaaaaaggcatatttcttggggatgatgaatggagagagactgcatggggagcttctcaccattcaatgtcccagcctattatggtacagagaagatctggacagggttttcatggaaacagtgaagtaaatgcaatactgtctccgcgatcagaaagtggaggccttggtgtgagcatggtagaatatgtattaagttcttctcctgctgataaattggattctcgatttaggaagggaaattttggcactagagatgctgaaacagatggacctgagaaaggagatcaaaaaggcaaggcttctccatttgaggaggaccaaaacagagatcttaaacaaggagatgatgatgattctaaaataaatggcagaggtttgccaaatggaatggatgccgattgcaaagattttaatcgtactcctggaagtcgtcaagcctctccaactgaagtagttgagcgcttgggccccaatactaatccctcagaaggactggggcctcttcctaatcctacagctaataaaccacttgttgaagaattttcaaatcctgaaactcagaatctggatgccatggaacaagttggtctggaatccttacagtttgactatcctggtaatcaggtaccaatggactcttcaggagctactgtaggcctttttgactacaattcccagcagcagctctttcagaggactaatgcactaacagttcaacagttaactgcagctcaacagcagcaatatgcattagcagcagctcagcagccacatatagctggtgtattctcagcaggccttgctccagctgcatttgtgccaaatccatacattattagtgctgctcctccagggaccgatccgtatactgcagcaggattggctgcagcagctacattagcaggtccagcagtggttccacctcagtattacggcgttccatggggggtgtatccagccaacttatttcagcagcaagctgcagctgcggcaaataacacagccagtcagcaagcagcatcacaagctcagcctggacagcaacaggttctccgtgctggagcaggtcagcgtcctcttactcccaatcagggtcagcaagggcagcaagcagaatcacttgcggcagctgcagcagcaaatccaacattggcttttggtcagggtcttgctactggcatgccaggctatcaagtactagctccaactgcctattatgatcagactggtgccttagtggttggccctggagcaaggactggccttggagctccagttcggttaatggctccaacacctgttttaattagttcagcagcagcacaagctgcagcagcagcagcagctggaggaactgcaagtagccttacaggcagcacaaatggtctgtttcggccaattggcactcagccaccacagcagcagcaacagcagccaagcactaatctgcaatctaattcattttatggaagcagttctttgactaatagctcccagagtagttctttattttctcatggacctggtcaacctggaagtacatctcttggctttggaagtggtaactctttgggtgctgctataggctcagccctcagtggatttggttcatcagttggcagttctgcaagtagtagtgccacaaggagagagtctctatctactagctctgacttgtacaaaagatctagtagcagcctagcacccatagggcaaccattttacaatagtctgggattttcctcctctccaagtccaataggcatgcctctgccaagccaaactccaggacattcacttacgccaccgccatcactttcatcacatggatcctcatccagtttgcatttaggaggactgacaaatggtagtggtcgatatatctctgcagcacctggagcagaagcaaaatatcgaagtgcttcaagcacttccagtctatttagctccagcagccagctctttcctccttcccggcttcggtataataggtctgatattatgccttctggccgcagtagattattggaagatttcagaaacaaccgcttcccaaaccttcagcttagagacttgattggacatatagttgagttttctcaagaccagcatggttctagattcatacagcaaaaactagagagagctactccagctgagcgacagatggtatttaatgaaattctgcaagcagcctatcaattaatgactgatgtttttggcaactatgttatacagaagttttttgagtttgggagtctggatcaaaaattagccctggctactcgtattcgtggtcatgttctacccttagccttgcagatgtatggctgccgcgttattcagaaagcattagaatctatttcttctgaccagcagagtgaaatggtaaaggagctggatggtcatgtgctcaaatgtgtgaaagatcagaatggaaaccatgttgtacaaaaatgtatcgaatgtgttcagccacagtcactacagttcatcattgatgctttcaagggacaagtatttgtgctttcaactcatccttatggctgcagagtaattcagcgcatcctagagcattgcactgcagaacagaccttacctatcttagaagaactccaccaacatacagagcagttggtacaggatcagtatggcaattatgttattcagcatgtactggaacacggtcgacctgaagacaagagcaaaattgtttccgaaatcaggggaaaggttttagccctgagtcaacacaaatttgccagcaatgtagtagaaaagtgtgttactcatgcctcccgtgctgagagagctttactgattgacgaggtttgctgccagaatgatggtcctcacagtgccttatacaccatgatgaaggaccagtatgccaattacgtggttcaaaagatgattgatatggctgaacctgctcagagaaagataatcatgcacaagattcgacctcacattactactttgcgcaaatacacatacgggaagcatatactggccaagttggaaaagtattatttgaagaatagcccggacctaggacctattggaggaccaccaaatggaatgctgtaaattacaggagcaagagaaagaagataatttaaccatgtgaaaagaatttttttgtgtgtgaattatcaaaacacaactcaactatgaatcttcaatttttttttaaagcaaaactatttattgactttattcatccatttgtaaattttttaaggttcttgtgtatatttggggggtgggggatgaattataaattatattcagccctgagtggagacctatcagattggattgctggcaaagcacagaatgcctgtatatgatgtaactgtatc

SEQ ID NO: 172431 - DNA, 955 bp, Homo sapiens
  Payload ID: 13895
  Gene Symbol: PUM2
  Gene Name: pumilio RNA-binding family member 2
  ENST ID: ENST00000442400
  CDS Start-End: 76-955
gaggcagaggaagactgtctccagaattacttgggaagtaaaaatctgcgaggcttggtttgatctgtggatgaaatgaatcatgattttcaagctcttgcattagaatctcggggaatgggagagcttttgcctaccaaaaagttttgggaacctgatgattcaacaaaagatggacaaaaaggcatatttcttggggatgatgaatggagagagactgcatggggagcttctcaccattcaatgtcccagcctattatggtacagagaagatctggacagggttttcatggaaacagtgaagtaaatgcaatactgtctccgcgatcagaaagtggaggccttggtgtgagcatggtagaatatgtattaagttcttctcctgctgataaattggattctcgatttaggaagggaaattttggcactagagatgctgaaacagatggacctgagaaaggagatcaaaaaggcaaggcttctccatttgaggaggaccaaaacagagatcttaaacaaggagatgatgatgattctaaaataaatggcagaggtttgccaaatggaatggatgccgattgcaaagattttaatcgtactcctggaagtcgtcaagcctctccaactgaagtagttgagcgcttgggccccaatactaatccctcagaaggactggggcctcttcctaatcctacagctaataaaccacttgttgaagaattttcaaatcctgaaactcagaatctggatgccatggaacaagttggtctggaatccttacagtttgactatcctggtaatcaggtaccaatggactcttcaggagctactgtaggcctttttgactacaattcccagcagcagctctttcagaggactaatgcactaacagttcaacagttaactgcagctcaacagcagcaatatgcattagcagcagctcagcagccacata

SEQ ID NO: 172432 - DNA, 546 bp, Homo sapiens
  Payload ID: 13895
  Gene Symbol: PUM2
  Gene Name: pumilio RNA-binding family member 2
  ENST ID: ENST00000424110
  CDS Start-End: 443-546
attgccgccaccgaaggcggaggagggggaggaccgccaagagcgacgccgccgtgtgcccaacggtcggtgtccccggctgaggcagcgcggccgcagcagccctgaaacagtcataacctcaaaaatgactttttaattcaaatataagattatactgggtcttggccaaagaaaagtttctgtcgtatatttctgtgttggtgctttcgtgctacagaggcgtagttgagtagctgcagcagagatcatatggcctgcaaagcctaaaatgttgactcctacactaggggtatgatttatcccaacagtaagaatggattcaaagagctaagagacctctcaaaattatccagaggttctttaacttatgtgacctcatctatttggaccactgataaaaacctgaaagtaagcaaaaaaggtttgatctgtggatgaaatgaatcatgattttcaagctcttgcattagaatctcggggaatgggagagcttttgcctaccaaaaagttttgggaacctgatgattcaacaaaagatggaca

SEQ ID NO: 172433 - DNA, 547 bp, Homo sapiens
  Payload ID: 13895
  Gene Symbol: PUM2
  Gene Name: pumilio RNA-binding family member 2
  ENST ID: ENST00000429419
  CDS Start-End: 44-166
gaggcagcgcggccgcagcagccctgtttgatctgtggatgaaatgaatcatgattttcaagctcttgcattagaatctcggggaatgggagagaccattcaatgtcccagcctattatggtacagagaagatctggacagggttttcatggaaacagtgaagtaaatgcaatactgtctccgcgatcagaaagtggaggccttggtgtgagcatggtagaatatgtattaagttcttctcctgctgataaattggattctcgatttaggaagggaaattttggcactagagatgctgaaacagatggacctgagaaaggagatcaaaaaggcaaggcttctccatttgaggaggaccaaaacagagatcttaaacaaggagatgatgatgattctaaaataaatggcagaggtttgccaaatggaatggatgccgattgcaaagattttaatcgtactcctggaagtcgtcaagcctctccaactgaagtagttgagcgcttgggccccaatactaatccctcagaaggactggggcctcttccta

SEQ ID NO: 172434 - DNA, 584 bp, Homo sapiens
  Payload ID: 13895
  Gene Symbol: PUM2
  Gene Name: pumilio RNA-binding family member 2
  ENST ID: ENST00000432105
  CDS Start-End: 88-195
agcattagtgaggaggcagaggaagactgtctccagaattacttgggaagtaaaaatctgcgaggcttggtttgatctgtggatgaaatgaatcatgattttcaagctcttgcattagaatctcggggaatgggagagatgcagaaaagagtccaagtctctcctttgggccacaagagggcaccctgcagctagctaaccctccccttcttcagaacagcgttttccaaagagtatgtcattttcagaggactgatttaaggcttttgcctaccaaaaagttttgggaacctgatgattcaacaaaagatggacaaaaaggcatatttcttggggatgatgaatggagagagactgcatggggagcttctcaccattcaatgtcccagcctattatggtacagagaagatctggacagggttttcatggaaacagtgaagtaaatgcaatactgtctccgcgatcagaaagtggaggccttggtgtgagcatggtagaatatgtattaagttcttctcctgctgataaattggattctcgatttaggaagggaaattttggcactagagatgctgaaacagat

SEQ ID NO: 172435 - DNA, 4352 bp, Homo sapiens
  Payload ID: 13895
  Gene Symbol: PUM2
  Gene Name: pumilio RNA-binding family member 2
  ENST ID: ENST00000440577
  CDS Start-End: 1-2631
cgatttaggaagggaaattttggcactagagatgctgaaacagatggacctgagaaaggagatcaaaaaggcaaggcttctccatttgaggaggaccaaaacagagatcttaaacaaggagatgatgatgattctaaaataaatggcagaggtttgccaaatggaatggatgccgattgcaaagattttaatcgtactcctggaagtcgtcaagcctctccaactgaagtagttgagcgcttgggccccaatactaatccctcagaaggactggggcctcttcctaatcctacagctaataaaccacttgttgaagaattttcaaatcctgaaactcagaatctggatgccatggaacaagttggtctggaatccttacagtttgactatcctggtaatcaggtaccaatggactcttcaggagctactgtaggcctttttgactacaattcccagcagcagctctttcagaggactaatgcactaacagttcaacagttaactgcagctcaacagcagcaatatgcattagcagcagctcagcagccacatatagctggtgtattctcagcaggccttgctccagctgcatttgtgccaaatccatacattattagtgctgctcctccagggaccgatccgtatactgcagcaggattggctgcagcagctacattagcaggtccagcagtggttccacctcagtattacggcgttccatggggggtgtatccagccaacttatttcagcagcaagctgcagctgcggcaaataacacagccagtcagcaagcagcatcacaagctcagcctggacagcaacaggttctccgtgctggagcaggtcagcgtcctcttactcccaatcagggtcagcaagggcagcaagcagaatcacttgcggcagctgcagcagcaaatccaacattggcttttggtcagggtcttgctactggcatgccaggctatcaagtactagctccaactgcctattatgatcagactggtgccttagtggttggccctggagcaaggactggccttggagctccagttcggttaatggctccaacacctgttttaattagttcagcagcagcacaagctgcagcagcagcagcagctggaggaactgcaagtagccttacaggcagcacaaatggtctgtttcggccaattggcactcagccaccacagcagcagcaacagcagccaagcactaatctgcaatctaattcattttatggaagcagttctttgactaatagctcccagagtagttctttattttctcatggacctggtcaacctggaagtacatctcttggctttggaagtggtaactctttgggtgctgctataggctcagccctcagtggatttggttcatcaggaggactgacaaatggtagtggtcgatatatctctgcagcacctggagcagaagcaaaatatcgaagtgcttcaagcacttccagtctatttagctccagcagccagctctttcctccttcccggcttcggtataataggtctgatattatgccttctggccgcagtagattattggaagatttcagaaacaaccgcttcccaaaccttcagcttagagacttgattggacatatagttgagttttctcaagaccagcatggttctagattcatacagcaaaaactagagagagctactccagctgagcgacagatggtatttaatgaaattctgcaagcagcctatcaattaatgactgatgtttttggcaactatgttatacagaagttttttgagtttgggagtctggatcaaaaattagccctggctactcgtattcgtggtcatgttctacccttagccttgcagatgtatggctgccgcgttattcagaaagcattagaatctatttcttctgaccagcagagtgaaatggtaaaggagctggatggtcatgtgctcaaatgtgtgaaagatcagaatggaaaccatgttgtacaaaaatgtatcgaatgtgttcagccacagtcactacagttcatcattgatgctttcaagggacaagtatttgtgctttcaactcatccttatggctgcagagtaattcagcgcatcctagagcattgcactgcagaacagaccttacctatcttagaagaactccaccaacatacagagcagttggtacaggatcagtatggcaattatgttattcagcatgtactggaacacggtcgacctgaagacaagagcaaaattgtttccgaaatcaggggaaaggttttagccctgagtcaacacaaatttgccagcaatgtagtagaaaagtgtgttactcatgcctcccgtgctgagagagctttactgattgacgaggtttgctgccagaatgatggtcctcacagtgccttatacaccatgatgaaggaccagtatgccaattacgtggttcaaaagatgattgatatggctgaacctgctcagagaaagataatcatgcacaagattcgacctcacattactactttgcgcaaatacacatacgggaagcatatactggccaagttggaaaagtattatttgaagaatagcccggacctaggacctattggaggaccaccaaatggaatgctgtaaattacaggagcaagagaaagaagataatttaaccatgtgaaaagaatttttttgtgtgtgaattatcaaaacacaactcaactatgaatcttcaatttttttttaaagcaaaactatttattgactttattcatccatttgtaaattttttaaggttcttgtgtatatttggggggtgggggatgaattataaattatattcagccctgagtggagacctatcagattggattgctggcaaagcacagaatgcctgtatatgatgtaactgtatcaaaaataaaaagctgtcacatattttgtaaatttttaccttgtaaagtcacaaaaatagtttttaaaggaaaaagtacagtattcttttaataaactggctcacagtctggtaggtctacaaccccatagcacaacaggtttatagagatgtatatagaattatagtccttatttttttcctttgcgtgaaaccttttataacagattaacaatcaactgcataaatattattaatattttaaaaagagttaagttgtattttgataattcacaaactatcatgcaaataacgagtaagtagacaagaataaagtggtttgagatgaaaagaacctaacattatttacagtagatgtggttttaatacaattactgccctaaaatgtctctggcaatgtacagaaatattgtatatacttacatatgtaattgttgtaagagttaaatacaaaatcatggtgacacttccaattaagtgcactaaatgaaaagttaagtcacttattaacttttcagtttggtttgcaatgagaaagagtggaaatttgtattttgttttgcttatagaattacagacatgttgaggaagtgttgagctttattttgctttttcatagaggcagaaagtaggaaccagatagagatgaaaaggggccactgaaaagtgaatttgatagctcagcatttaagcatgattacatattcagatagctctttttgctttctataaatatatgcattgtgtgtgtagtaatagatgtaagtttacactttgaaaggaaatcttgtttcaatgtttattataaaagccttgctaatttagtagtgatgctttccttggttgtacaggtgtacatttgtaaaccttcatgctgtaaatggaatttgttttatctctttgggatacatttgcattttagtgtacatttacgtccctgccctctttgacctggcaatatagtgttgtataatgtaaatttatttctccaaatcgagagtgattttttaaaaattttttatctttatatggtttcagaagtatgaaccagctttctttttattattgtgagatcattttgttttataacatagttgttgactgttaatatggacctgctagaatttggatcactttcaattgaagtcagggtattgtgcataatagaaagtattggactgagatatttggttaccatggaggccaatgcttttttcatcttattaaatgtgatgtgacttttttctttgtacagaagagtactgtatttttgaatagcctactcccaagtaagagcaaatctgtatgataacattttttcctctggacataagacataacagtaacacgatgtacatttacaagcggccttatgtacatttcccaacaatctttttaaggcaaaattgtgaccatatgtgtataattaaaatcgtttttaatcctt

SEQ ID NO: 172436 - DNA, 525 bp, Homo sapiens
  Payload ID: 13895
  Gene Symbol: PUM2
  Gene Name: pumilio RNA-binding family member 2
  ENST ID: ENST00000446940
  CDS Start-End: 116-223
gattcggcgcgctggaggttagagaccgagctgtcggccctagggttcggaaagaggggagaggccgggtggccccagagaagcatgcggattgcaagtttgatctgtggatgaaatgaatcatgattttcaagctcttgcattagaatctcggggaatgggagagatgcagaaaagagtccaagtctctcctttgggccacaagagggcaccctgcagctagctaaccctccccttcttcagaacagcgttttccaaagagtatgtcattttcagaggactgatttaaggcttttgcctaccaaaaagttttgggaacctgatgattcaacaaaagatggacaaaaaggcatatttcttggggatgatgaatggagagagactgcatggggagcttctcaccattcaatgtcccagcctattatggtacagagaagatctggacagggttttcatggaaacagtgaagtaaatgcaatactgtctccgcgatcagaaagtggaggccttggtgtgagcatggta

SEQ ID NO: 172437 - DNA, 2321 bp, Homo sapiens
  Payload ID: 13896
  Gene Symbol: PUM3
  Gene Name: pumilio RNA-binding family member 3
  Uniprot ID: Q15397
  ENST ID: ENST00000397885
  CDS Start-End: 208-2154
gcctcaagaggaggcataacagcagcggaccaatagaaattccgaatttttgtattctctgggaagctccacctcttagtccctgatccgccgcggaagatgaaaaaaagcggcccgggggcggagcaaggcaaggaagcggaagcggagaggcggtcgggatccgctgcgcgagctgtctcggtcccacgtgtgcgagttgctacgatggaagttaaagggaaaaagcaattcacaggaaagagtacaaagacagcacaagaaaaaaacagatttcataaaaatagtgattctggttcttcaaagacatttccaacaaggaaagttgctaaagaaggtggacctaaagtcacatctaggaactttgagaaaagtatcacaaaacttgggaaaaagggtgtaaagcagttcaagaataagcagcaaggggacaaatcaccaaagaacaaattccagccggcaaataaattcaacaagaagagaaaattccagccagatggtagaagcgatgaatcagcagccaagaagcccaaatgggatgacttcaaaaagaagaagaaagaactgaagcaaagcagacaactcagtgataaaaccaactatgacattgttgttcgggcaaagcagatgtgggagattttaagaagaaaagactgtgacaaagaaaaaagagtaaagttaatgagtgatttgcagaagttgattcaagggaaaattaaaactattgcatttgcacacgattcaactcgtgtgatccagtgttacattcagtatggtaatgaagaacagagaaaacaggcttttgaagaattgcgagatgatttggttgagttaagtaaagccaaatattcgagaaatattgttaagaaatttctcatgtatggaagtaaaccacagattgcagagataatcagaagttttaaaggccacgtgaggaagatgctgcggcatgcggaagcatcagccatcgtggagtacgcatacaatgacaaagccattttggagcagaggaacatgctgacggaagagctctatgggaacacatttcagctttacaagtcagcagatcaccgaactctggacaaagtgttagaggtacagccagaaaaattagaacttattatggatgaaatgaaacagattctaactccaatggcccaaaaggaagctgtgattaagcactcattggtgcataaagtattcttggacttttttacctatgcaccccccaaactcagatcagaaatgattgaagccatccgcgaagcggtggtctacctggcacacacacacgatggcgccagagtggccatgcactgcctgtggcatggcacgcccaaggacaggaaagtgattgtgaaaacaatgaagacttatgttgaaaaggtggctaatggccaatactcccatttggttttactggcggcatttgattgtattgatgatactaagcttgtgaagcagataatcatatcagaaattatcagttcattgcctagcatagtaaatgacaaatatggaaggaaggtcctattgtacttactaagccccagagatcctgcacatacagtacgagaaatcattgaagttctgcaaaaaggagatggaaatgcacacagtaagaaagatacagaggtccgcagacgggagctcctagaatccatttctccagctttgttaagctacctgcaagaacacgcccaagaagtggtgctagataagtctgcgtgtgtgttggtgtctgacattctgggatctgccactggagacgttcagcctaccatgaatgccatcgccagcttggcagcaacaggactgcatcctggtggcaaggacggagagcttcacattgcagaacatcctgcaggacatctagttctgaagtggttaatagagcaagataaaaagatgaaagaaaatgggagagaaggttgttttgcaaaaacacttgtagagcatgttggtatgaagaacctgaagtcctgggctagtgtaaatcgaggtgccattattctttctagcctcctccagagttgtgacctggaagttgcaaacaaagtcaaagctgcactgaaaagcttgattcctacattggaaaaaaccaaaagcaccagcaaaggaatagaaattctacttgaaaaactgagcacataggtggaaagagttaagagcaagatggaatgattttttctgttctctgttctgtttcccaatgcagaaaagaaggggtagggtccaccatactggtaattggggtactctgtatatgtgtttcttctttgtatacgaatctatttatataaattgtttttttaaatggt

SEQ ID NO: 172438 - DNA, 340 bp, Homo sapiens
  Payload ID: 13896
  Gene Symbol: PUM3
  Gene Name: pumilio RNA-binding family member 3
  ENST ID: ENST00000490444
  CDS Start-End: 1-150
gccattattctttctagcctcctccagagttgtgacctggaagttgcaaacaaagtcaaagctgcactgaaaagcttgattcctacattggaaaaaaccaaaagcaccagcaaaggaatagaaattctacttgaaaaactgagcacataggtggaaagagttaagagcaagatggaatgattttttctgttctctgttctgtttcccaatgcagaaaagaagggaacatccagtcatcaagttccaatgtgttgggcatgaagtcatcattagacaggatgacctttcatcacttggaatatgatcagagaagcagaatttgcctagctcattcagaaga

SEQ ID NO: 172439 - DNA, 1509 bp, Homo sapiens
  Payload ID: 13897
  Gene Symbol: PNP
  Gene Name: purine nucleoside phosphorylase
  Uniprot ID: P00491
  ENST ID: ENST00000361505
  CDS Start-End: 147-1016
ataagccagagcctagaccagtgagccaactgtgcgaaccagacccggcagccttgctcagttcagcatagcggagcggatccgatcggatcggagcggatcggagcacaccggagcaggctcatcgagaaggcgtctgcgagaccatggagaacggatacacctatgaagattataagaacactgcagaatggcttctgtctcacactaagcaccgacctcaagttgcaataatctgtggttctggattaggaggtctgactgataaattaactcaggcccagatctttgactacggtgaaatccccaactttccccgaagtacagtgccaggtcatgctggccgactggtgtttgggttcctgaatggcagggcctgtgtgatgatgcagggcaggttccacatgtatgaagggtacccactctggaaggtgacattcccagtgagggttttccaccttctgggtgtggacaccctggtagtcaccaatgcagcaggagggctgaaccccaagtttgaggttggagatatcatgctgatccgtgaccatatcaacctacctggtttcagtggtcagaaccctctcagagggcccaatgatgaaaggtttggagatcgtttccctgccatgtctgatgcctacgaccggactatgaggcagagggctctcagtacctggaaacaaatgggggagcaacgtgagctacaggaaggcacctatgtgatggtggcaggccccagctttgagactgtggcagaatgtcgtgtgctgcagaagctgggagcagacgctgttggcatgagtacagtaccagaagttatcgttgcacggcactgtggacttcgagtctttggcttctcactcatcactaacaaggtcatcatggattatgaaagcctggagaaggccaaccatgaagaagtcttagcagctggcaaacaagctgcacagaaattggaacagtttgtctccattcttatggccagcattccactccctgacaaagccagttgacctgccttggagtcgtctggcatctcccacacaagacccaagtagctgctaccttctttggccccttgctggagtcatgtgcctctgtccttaggttgtagcagaaaggaaaagattcctgtccttcacctttcccactttcttctaccagacccttctggtgccagatcctcttctcaaagctgggattacaggtgtgagcatagtgagaccttggcgctacaaaataaagctgttctcattcctgttctttcttacacaagagctggagcccgtgccctaccacacatctgtggagatgcccaggatttgactcgggccttagaactttgcatagcagctgctactagctctttgagataatacattccgaggggctcagttctgccttatctaaatcaccagagaccaaacaaggactaatccaatacctcttggattttatttaatgtcataatgttgtcagaataaagagaaagatgaaataatttca

SEQ ID NO: 172440 - DNA, 557 bp, Homo sapiens
  Payload ID: 13897
  Gene Symbol: PNP
  Gene Name: purine nucleoside phosphorylase
  ENST ID: ENST00000553418
  CDS Start-End: 277-557
cgacccagcttcccttgtccagggagcaactcagacacagtctcgcttcatttttattctggggttgtacaatctaagggccggcccgcgtgctcgcttgccattggctggggactccagggcaagggatataagccagagcctagaccagtgagccaactgtgcgaaccagacccggcagccttgctcagttcagcatagcggagcggatccgatcggatcggagcggatcggagcacaccggagcaggctcatcgagaaggcgtctgcgagaccatggagaacggatacacctatgaagattataagaacactgcagaatggcttctgtctcacactaagcaccgacctcaagttgcaataatctgtggttctggattaggaggtctgactgataaattaactcaggcccagatctttgactacggtgaaatccccaactttccccgaagtacagtgccaggtcatgctggccgactggtgtttgggttcctgaatggcagggcctgtgtgatgatgcagggcaggttccacatgtatgaagggtacccactctg

SEQ ID NO: 172441 - DNA, 554 bp, Homo sapiens
  Payload ID: 13897
  Gene Symbol: PNP
  Gene Name: purine nucleoside phosphorylase
  ENST ID: ENST00000554065
  CDS Start-End: 371-554
ttggttagttgtgttcagctctgtcacacctcattgccacctctgaaagcaacgtttggtcttcccagatggatgtgagagaactggacttggaactgggagaaaagtaacacgggttgattcttgctagtgtaggggttctggatacacctatgaagattataagaacactgcagaatggcttctgtctcacactaagcaccgacctcaagttgcaataatctgtggttctggattaggaggtctgactgataaattaactcaggcccagatctttgactacggtgaaatccccaactttccccgaagtacagtgccaggtcatgctggccgactggtgtttgggttcctgaatggcagggcctgtgtgatgatgcagggcaggttccacatgtatgaagggtacccactctggaaggtgacattcccagtgagggttttccaccttctgggtgtggacaccctggtagtcaccaatgcagcaggagggctgaaccccaagtttgaggttggagatatcatgctgatccgtgaccatatcaacctacctggtt

SEQ ID NO: 172442 - DNA, 770 bp, Homo sapiens
  Payload ID: 13897
  Gene Symbol: PNP
  Gene Name: purine nucleoside phosphorylase
  ENST ID: ENST00000553591
  CDS Start-End: 108-770
gagggcaccaggcccgcaggacccttggggaggggcaggtgctgtgacccgggaacctggcacactgggcccagagggagctggcggagggagcgagcgcccaggggatgcagagaggcctggcactgagcctagtgtcgggagcaaggcggcagagtcatgcggcagccagcgcgggcagggacgcacgcgggaatcgagctggggtggcgccaccggagcaggaaggggacagatacacctatgaagattataagaacactgcagaatggcttctgtctcacactaagcaccgacctcaagttgcaataatctgtggttctggattaggaggtctgactgataaattaactcaggcccagatctttgactacggtgaaatccccaactttccccgaagtacagtgccaggtcatgctggccgactggtgtttgggttcctgaatggcagggcctgtgtgatgatgcagggcaggttccacatgtatgaagggtacccactctggaaggtgacattcccagtgagggttttccaccttctgggtgtggacaccctggtagtcaccaatgcagcaggagggctgaaccccaagtttgaggttggagatatcatgctgatccgtgaccatatcaacctacctggtttcagtggtcagaaccctctcagagggcccaatgatgaaaggtttggagatcgtttccctgccatgtctgatgcctacgaccggactatgaggcagagggctctcagtacctggaaacaaatgggg

SEQ ID NO: 172443 - DNA, 2697 bp, Homo sapiens
  Payload ID: 13898
  Gene Symbol: P2RX1
  Gene Name: purinergic receptor P2X, ligand gated ion channel, 1
  Uniprot ID: P51575
  ENST ID: ENST00000225538
  CDS Start-End: 276-1475
gggaatttatttgtccatgggcgaggctggcctgcagtctgttgccttccaggggccaagagctgctctgatcacccagggattctctctccaacccaagtgcctccagctgacctctggctcctgtcctctggctccacctgcaccgccctgctcttcctaaggggccaggaagcccccagaagctctaccatcgacgtgggtggtggcacccggctcaccctgagagcagaggccgtgcagggggctcagttctgagccccagccggcccaccatggcacggcggttccaggaggagctggccgccttcctcttcgagtatgacaccccccgcatggtgctggtgcgtaataagaaggtgggcgttatcttccgactgatccagctggtggtcctggtctacgtcatcgggtgggtgtttctctatgagaagggctaccagacctcgagcggcctcatcagcagtgtctctgtgaaactcaagggcctggccgtgacccagctccctggcctcggcccccaggtctgggatgtggctgactacgtcttcccagcccagggggacaactccttcgtggtcatgaccaatttcatcgtgaccccgaagcagactcaaggctactgcgcagagcacccagaagggggcatatgcaaggaagacagtggctgtacccctgggaaggccaagaggaaggcccaaggcatccgcacgggcaagtgtgtggccttcaacgacactgtgaagacgtgtgagatctttggctggtgccccgtggaggtggatgacgacatcccgcgccctgcccttctccgagaggccgagaacttcactcttttcatcaagaacagcatcagctttccacgcttcaaggtcaacaggcgcaacctggtggaggaggtgaatgctgcccacatgaagacctgcctctttcacaagaccctgcaccccctgtgcccagtcttccagcttggctacgtggtgcaagagtcaggccagaacttcagcaccctggctgagaagggtggagtggttggcatcaccatcgactggcactgtgacctggactggcacgtacggcactgcagacccatctatgagttccatgggctgtacgaagagaaaaatctctccccaggcttcaacttcaggtttgccaggcactttgtggagaacgggaccaactaccgtcacctcttcaaggtgtttgggattcgctttgacatcctggtggacggcaaggccgggaagtttgacatcatccctacaatgaccaccatcggctctggaattggcatctttggggtggccacagttctctgtgacctgctgctgcttcacatcctgcctaagaggcactactacaagcagaagaagttcaaatacgctgaggacatggggccaggggcggctgagcgtgacctcgcagctaccagctccaccctgggcctgcaggagaacatgaggacatcctgatgctcgggccccaactcctgactgggtgcagcgtgaggcttcagcctggagccctggtgggtcccagccagggcagaggggcctccccaggaagtctcctaccctctcagccaggcagagagcagtttgccagaagctcagggtgcatagtaggagagacctgtgcaaatctgagctccggctccgaccccacacaccctgagggagccctaccctagcctcagccgctcctggtggggaatggctggggctgggcaggaccctcccacacacctgcaccctagcttcgtgcttctctctccggactctcattatccaacccgctgcctccatttctctagatctgtgctctccgatgtggcagtcagtaaccataggtgactaaattaaactaaaataaaatagaatgaaacacaaaattcaattcctcggctgaactagccacatttcaactgctcagtagatacgtgtggttagtggctgccatactggacagctcggggcattttcactgtcaaagaaagttctattagacagccctgcttgagccctgtttcttcctggccttcggtttccctggggaacttatcgacaatgcaagctcctgggcccacccccagacctcctgaaccaaaagctccagggctggccgtatgatctgtgtggatggcaaactccccaggccattctgggacctaagtttaagaagtgccgtcctcgaactttctgactctaagctcctgagcgggagtcagacttagccctgagcctgcacttcctgttcaggtgcagacactgaacagggtctcaaacaccttcagcatgtgtgttgtgtgctcacgtgccacacagtgtctcatgcacacaacccagtgtacacaccacctacgtgcacacagcatccttccacactgtgtatgtgaacagcttgggccctgcaaacacaaccatctacacacatctacacccccaagcacacacacatggtccgtgccatgtcacctccatagggaaaggcttctctccaagtgtgccaggccaggacagccctcccagccatgaatccttactcagctacctcgggttggggtgggagccccagccaaatcctgggctccctgcctgtggctcagccccagctcccaaggcctgcctggctctgtctgaacagaaggtctgggggaagcgacgggtggagtacaataaagggaatgaggacaaa

SEQ ID NO: 172444 - DNA, 1126 bp, Homo sapiens
  Payload ID: 13898
  Gene Symbol: P2RX1
  Gene Name: purinergic receptor P2X, ligand gated ion channel, 1
  ENST ID: ENST00000571637
  CDS Start-End: 252-425
ggctggcctgcagtctgttgccttccaggggccaagagctgctctgatcacccagggattctctctccaacccaagtgcctccagctgacctctggctcctgtcctctggctccacctgcaccgccctgctcttcctaaggggccaggaagcccccagaagctctaccatcgacgtgggtggtggcacccggctcaccctgagagcagaggccgtgcagggggctcagttctgagccccagccggcccaccatggcacggcggttccaggaggagctggccgccttcctcttcgagtatgacaccccccgcatggtgctggtgcgtaataagaaggtgggcgttatcttccgactgatccagctggtggtcctggtctacgtcatcgggggaaggccttcctggcaagccactgtgcgagaatagaaaatcctgccaactcgctgttgagatggggacgaggccggaggggaagccctgcccgggggccttcggtgaacaggaggcagagtctctgggttctgaggagccggctcagtgttatggttcctttgagtggttagtggtgttcagggccagggcaccaccaaccacagccactgagtcctcgacctctgaccgcctgccaaaccaggccgccactgacacacagaggccataccccacacccgtcaccccatatgacaagttagagagagacagactctgctgccagcttccctgcctgagcaagggacatccagggacgtttgaggcccccggagcagagaaactctcacattctgaatacctggtgccttcatgttggcatgtcaggcggaggacagagattggttctggtcccagggatgatagttcctttctgggcatctccggacctgtcccaccgggctgggagtgcagaatcagaggcagcgtgggacgctcctgcagtatggttgtctcgggagccaagacaggcctggcagaggctggcacacttgtgagtgtgcatatggagctctgtgcctatatgtgtctgggtgggtgtttctctatgagaagggctaccagacctcgagcggcctcatcagcagtgtctctgtgaaactcaagggcctggccgtgacccagctccctggcctcgg

SEQ ID NO: 172445 - DNA, 1200 bp, Homo sapiens
  Payload ID: 13899
  Gene Symbol: P2RX2
  Gene Name: purinergic receptor P2X, ligand gated ion channel, 2
  Uniprot ID: Q9UBL9
  ENST ID: ENST00000352418
  CDS Start-End: 1-1200
atggccgccgcccagcccaagtaccccgccggggcgaccgcccggcgcctggcccggggctgctggtccgccctctgggactacgagacgcccaaggtgatcgtggtacgtattcatcgtgcagaaaagctaccaggagagcgagacgggccccgagagctccatcatcaccaaggtcaaggggatcaccacgtccgagcacaaagtgtgggacgtggaggagtacgtgaagccccccgaggcctgaggactgggcgctgtgtgccctattaccaggggccctccaagacctgcgaggtgttcggctggtgcccggtggaagatggggcctctgtcagccaatttctgggtacgatggccccaaatttcaccatcctcatcaagaacagcatccactaccccaaattccacttctccaagggcaacatcgccgaccgcacagacgggtacctgaagcgctgcacgttccacgaggcctccgacctctactgccccatcttcaagctgggctttatcgtggagaaggctggggagagcttcacagagctcgcacacaagggtggtgtcatcggggtcattatcaactgggactgtgacctggacctgcctgcatcggagtgcaaccccaagtactccttccggaggcttgaccccaagcacgtgcctgcctcgtcaggctacaacttcaggtttgccaaatactacaagatcaatggcaccaccacccgcacgctcatcaaggcctacgggatccgcattgacgtcattgtgcatggacaggccgggaagttcagcctgattcccaccattattaatctggccacagctctgacttccgtcggggtgggctccttcctgtgcgactggatcttgctaacattcatgaacaaaaacaaggtctacagccataagaaatttgacaaggtgtgtacgccgagccacccctcaggtagctggcctgtgacccttgcccgtgtattgggccaggcccctcccgaacccggccaccgctccgaggaccagcaccccagccctccatcaggccaggagggccaacaaggggcagagtgtggcccagccttcccgcccctgcggccttgccccatctctgccccttctgagcagatggtggacactcctgcctccgagcctgcccaagcctccacacccacagaccccaaaggtttggctcaactctga

SEQ ID NO: 172446 - DNA, 1494 bp, Homo sapiens
  Payload ID: 13899
  Gene Symbol: P2RX2
  Gene Name: purinergic receptor P2X, ligand gated ion channel, 2
  Uniprot ID: Q9UBL9
  ENST ID: ENST00000343948
  CDS Start-End: 1-1494
atggccgccgcccagcccaagtaccccgccggggcgaccgcccggcgcctggcccggggctgctggtccgccctctgggactacgagacgcccaaggtgatcgtggtgaggaaccggcgcctgggggtcctgtaccgcgccgtgcagctgctcatcctgctctacttcgtgtggtacgtattcatcgtgcagaaaagctaccaggagagcgagacgggccccgagagctccatcatcaccaaggtcaaggggatcaccacgtccgagcacaaagtgtgggacgtggaggagtacgtgaagccccccgaggggggcagcgtgttcagcatcatcaccagggtcgaggccacccactcccagacccagggaacctgccccgagagcataagggtccacaacgccacctgcctctccgacgccgactgcgtggctggggagctggacatgctgggaaacggcctgaggactgggcgctgtgtgccctattaccaggggccctccaagacctgcgaggtgttcggctggtgcccggtggaagatggggcctctgtcagccaatttctgggtacgatggccccaaatttcaccatcctcatcaagaacagcatccactaccccaaattccacttctccaagggcaacatcgccgaccgcacagacgggtacctgaagcgctgcacgttccacgaggcctccgacctctactgccccatcttcaagctgggctttatcgtggagaaggctggggagagcttcacagagctcgcacacaagggtggtgtcatcggggtcattatcaactgggactgtgacctggacctgcctgcatcggagtgcaaccccaagtactccttccggaggcttgaccccaagcacgtgcctgcctcgtcaggctacaacttcaggtttgccaaatactacaagatcaatggcaccaccacccgcacgctcatcaaggcctacgggatccgcattgacgtcattgtgcatggacaggccgggaagttcagcctgattcccaccattattaatctggccacagctctgacttccgtcggggtggtaaggaaccctctctggggtcccagcgggtgcggggggtccaccaggcccttacacaccggtctctgctggccccagggctccttcctgtgcgactggatcttgctaacattcatgaacaaaaacaaggtctacagccataagaaatttgacaaggtgtgtacgccgagccacccctcaggtagctggcctgtgacccttgcccgtgtattgggccaggcccctcccgaacccggccaccgctccgaggaccagcaccccagccctccatcaggccaggagggccaacaaggggcagagtgtggcccagccttcccgcccctgcggccttgccccatctctgccccttctgagcagatggtggacactcctgcctccgagcctgcccaagcctccacacccacagaccccaaaggtttggctcaactctga

SEQ ID NO: 172447 - DNA, 1344 bp, Homo sapiens
  Payload ID: 13899
  Gene Symbol: P2RX2
  Gene Name: purinergic receptor P2X, ligand gated ion channel, 2
  Uniprot ID: Q9UBL9
  ENST ID: ENST00000350048
  CDS Start-End: 1-1344
atggccgccgcccagcccaagtaccccgccggggcgaccgcccggcgcctggcccggggctgctggtccgccctctgggactacgagacgcccaaggtgatcgtggtgaggaaccggcgcctgggggtcctgtaccgcgccgtgcagctgctcatcctgctctacttcgtgtggtacgtattcatcgtgcagaaaagctaccaggagagcgagacgggccccgagagctccatcatcaccaaggtcaaggggatcaccacgtccgagcacaaagtgtgggacgtggaggagtacgtgaagccccccgagagcataagggtccacaacgccacctgcctctccgacgccgactgcgtggctggggagctggacatgctgggaaacggcctgaggactgggcgctgtgtgccctattaccaggggccctccaagacctgcgaggtgttcggctggtgcccggtggaagatggggcctctgtcagccaatttctgggtacgatggccccaaatttcaccatcctcatcaagaacagcatccactaccccaaattccacttctccaagggcaacatcgccgaccgcacagacgggtacctgaagcgctgcacgttccacgaggcctccgacctctactgccccatcttcaagctgggctttatcgtggagaaggctggggagagcttcacagagctcgcacacaagggtggtgtcatcggggtcattatcaactgggactgtgacctggacctgcctgcatcggagtgcaaccccaagtactccttccggaggcttgaccccaagcacgtgcctgcctcgtcaggctacaacttcaggtttgccaaatactacaagatcaatggcaccaccacccgcacgctcatcaaggcctacgggatccgcattgacgtcattgtgcatggacaggccgggaagttcagcctgattcccaccattattaatctggccacagctctgacttccgtcggggtgggctccttcctgtgcgactggatcttgctaacattcatgaacaaaaacaaggtctacagccataagaaatttgacaaggtgtgtacgccgagccacccctcaggtagctggcctgtgacccttgcccgtgtattgggccaggcccctcccgaacccggccaccgctccgaggaccagcaccccagccctccatcaggccaggagggccaacaaggggcagagtgtggcccagccttcccgcccctgcggccttgccccatctctgccccttctgagcagatggtggacactcctgcctccgagcctgcccaagcctccacacccacagaccccaaaggtttggctcaactctga

SEQ ID NO: 172448 - DNA, 1140 bp, Homo sapiens
  Payload ID: 13899
  Gene Symbol: P2RX2
  Gene Name: purinergic receptor P2X, ligand gated ion channel, 2
  Uniprot ID: Q9UBL9
  ENST ID: ENST00000351222
  CDS Start-End: 1-1140
atggccgccgcccagcccaagtaccccgccggggcgaccgcccggcgcctggcccggggctgctggtccgccctctgggactacgagacgcccaaggtgatcgtgagcataagggtccacaacgccacctgcctctccgacgccgactgcgtggctggggagctggacatgctgggaaacggcctgaggactgggcgctgtgtgccctattaccaggggccctccaagacctgcgaggtgttcggctggtgcccggtggaagatggggcctctgtcagccaatttctgggtacgatggccccaaatttcaccatcctcatcaagaacagcatccactaccccaaattccacttctccaagggcaacatcgccgaccgcacagacgggtacctgaagcgctgcacgttccacgaggcctccgacctctactgccccatcttcaagctgggctttatcgtggagaaggctggggagagcttcacagagctcgcacacaagggtggtgtcatcggggtcattatcaactgggactgtgacctggacctgcctgcatcggagtgcaaccccaagtactccttccggaggcttgaccccaagcacgtgcctgcctcgtcaggctacaacttcaggtttgccaaatactacaagatcaatggcaccaccacccgcacgctcatcaaggcctacgggatccgcattgacgtcattgtgcatggacaggccgggaagttcagcctgattcccaccattattaatctggccacagctctgacttccgtcggggtgggctccttcctgtgcgactggatcttgctaacattcatgaacaaaaacaaggtctacagccataagaaatttgacaaggtgtgtacgccgagccacccctcaggtagctggcctgtgacccttgcccgtgtattgggccaggcccctcccgaacccggccaccgctccgaggaccagcaccccagccctccatcaggccaggagggccaacaaggggcagagtgtggcccagccttcccgcccctgcggccttgccccatctctgccccttctgagcagatggtggacactcctgcctccgagcctgcccaagcctccacacccacagaccccaaaggtttggctcaactctga

SEQ ID NO: 172449 - DNA, 1222 bp, Homo sapiens
  Payload ID: 13899
  Gene Symbol: P2RX2
  Gene Name: purinergic receptor P2X, ligand gated ion channel, 2
  Uniprot ID: Q9UBL9
  ENST ID: ENST00000348800
  CDS Start-End: 1-1215
atggccgccgcccagcccaagtaccccgccggggcgaccgcccggcgcctggcccggggctgctggtccgccctctgggactacgagacgcccaaggtgatcgtggtgaggaaccggcgcctgggggtcctgtaccgcgccgtgcagctgctcatcctgctctacttcgtgtggtacgtattcatcgtgcagaaaagctaccaggagagcgagacgggccccgagagctccatcatcaccaaggtcaaggggatcaccacgtccgagcacaaagtgtgggacgtggaggagtacgtgaagccccccgaggggggcagcgtgttcagcatcatcaccagggtcgaggccacccactcccagacccagggaacctgccccgagagcataagggtccacaacgccacctgcctctccgacgccgactgcgtggctggggagctggacatgctgggaaacggcctgaggactgggcgctgtgtgccctattaccaggggccctccaagacctgcgaggtgttcggctggtgcccggtggaagatggggcctctgtcagccaatttctgggtacgatggccccaaatttcaccatcctcatcaagaacagcatccactaccccaaattccacttctccaagggcaacatcgccgaccgcacagacgggtacctgaagcgctgcacgttccacgaggcctccgacctctactgccccatcttcaagctgggctttatcgtggagaaggctggggagagcttcacagagctcgcacacaagggtggtgtcatcggggtcattatcaactgggactgtgacctggacctgcctgcatcggagtgcaaccccaagtactccttccggaggcttgaccccaagcacgtgcctgcctcgtcaggctacaacttcaggtttgccaaatactacaagatcaatggcaccaccacccgcacgctcatcaaggcctacgggatccgcattgacgtcattgtgcatggacaggccgggaagttcagcctgattcccaccattattaatctggccacagctctgacttccgtcggggtgggctccttcctgtgcgactggatcttgctaacattcatgaacaaaaacaaggtctacagccataagaaatttgacaagatggtggacactcctgcctccgagcctgcccaagcctccacacccacagaccccaaaggtttggctcaactctgagctcctt

SEQ ID NO: 172450 - DNA, 1867 bp, Homo sapiens
  Payload ID: 13899
  Gene Symbol: P2RX2
  Gene Name: purinergic receptor P2X, ligand gated ion channel, 2
  Uniprot ID: Q9UBL9
  ENST ID: ENST00000389110
  CDS Start-End: 38-1453
ctgcagcgccttcctggaggtgggggccgcccgcgccatggccgccgcccagcccaagtaccccgccggggcgaccgcccggcgcctggcccggggctgctggtccgccctctgggactacgagacgcccaaggtgatcgtggtgaggaaccggcgcctgggggtcctgtaccgcgccgtgcagctgctcatcctgctctacttcgtgtggtacgtattcatcgtgcagaaaagctaccaggagagcgagacgggccccgagagctccatcatcaccaaggtcaaggggatcaccacgtccgagcacaaagtgtgggacgtggaggagtacgtgaagccccccgaggggggcagcgtgttcagcatcatcaccagggtcgaggccacccactcccagacccagggaacctgccccgagagcataagggtccacaacgccacctgcctctccgacgccgactgcgtggctggggagctggacatgctgggaaacggcctgaggactgggcgctgtgtgccctattaccaggggccctccaagacctgcgaggtgttcggctggtgcccggtggaagatggggcctctgtcagccaatttctgggtacgatggccccaaatttcaccatcctcatcaagaacagcatccactaccccaaattccacttctccaagggcaacatcgccgaccgcacagacgggtacctgaagcgctgcacgttccacgaggcctccgacctctactgccccatcttcaagctgggctttatcgtggagaaggctggggagagcttcacagagctcgcacacaagggtggtgtcatcggggtcattatcaactgggactgtgacctggacctgcctgcatcggagtgcaaccccaagtactccttccggaggcttgaccccaagcacgtgcctgcctcgtcaggctacaacttcaggtttgccaaatactacaagatcaatggcaccaccacccgcacgctcatcaaggcctacgggatccgcattgacgtcattgtgcatggacaggccgggaagttcagcctgattcccaccattattaatctggccacagctctgacttccgtcggggtgggctccttcctgtgcgactggatcttgctaacattcatgaacaaaaacaaggtctacagccataagaaatttgacaaggtgtgtacgccgagccacccctcaggtagctggcctgtgacccttgcccgtgtattgggccaggcccctcccgaacccggccaccgctccgaggaccagcaccccagccctccatcaggccaggagggccaacaaggggcagagtgtggcccagccttcccgcccctgcggccttgccccatctctgccccttctgagcagatggtggacactcctgcctccgagcctgcccaagcctccacacccacagaccccaaaggtttggctcaactctgagctcctttccatctcactggactgcagacccggcctggtggggccagagagtccccagctagggacctgcacgtggacgtgggcacctcagtagcggagcatctccacgaaacggggcaccacaggatccctgtgcaagggctgggggcacgctctggccccaggcttgtgccccaccctggcatacagcccctgacacctcctccccagctggtccctacagggctgctcacttcccatcacctctcacagccacctggaacccaagccagctgagctctgaggggctctgctcccggtcttgggccctgggaaccccaccccaccccaccccacaggcgttgtaaccttgaatctgcccagactcttcccttagaagtcacaacatactcagtccaataaacctgtgagcag

SEQ ID NO: 172451 - DNA, 1113 bp, Homo sapiens
  Payload ID: 13899
  Gene Symbol: P2RX2
  Gene Name: purinergic receptor P2X, ligand gated ion channel, 2
  Uniprot ID: Q9UBL9
  ENST ID: ENST00000449132
  CDS Start-End: 1-1113
atggccgccgcccagcccaagtaccccgccggggcgaccgcccggcgcctggcccggggctgctggtccgccctctgggactacgagacgcccaaggtgatcgtggtgaggaaccggcgcctgggggtcctgtaccgcgccgtgcagctgctcatcctgctctacttcgtgtggtacgtattcatcgtgcagaaaagctaccaggagagcgagacgggccccgagagctccatcatcaccaaggtcaaggggatcaccacgtccgagcacaaagtgtgggacgtggaggagtacgtgaagccccccgagagcataagggtccacaacgccacctgcctctccgacgccgactgcgtggctggggagctggacatgctgggaaacggggccctccaagacctgcgaggtgttcggctggtgcccggtggaagatggggcctctgtcagccaatttctgggtacgatggccccaaatttcaccatcctcatcaagaacagcatccactaccccaaattccacttctccaagggcaacatcgccgaccgcacagacgggtacctgaagcgctgcacgttccacgaggcctccgacctctactgccccatcttcaagctgggctttatcgtggagaaggctggggagagcttcacagagctcgcacacaaggcaggggtggtgtcatcggggtcattatcaactgggactgtgacctggacctgcctgcatcggagtgcaaccccaagtactccttccggaggcttgaccccaagcacgtgcctgcctcgtcaggctacaacttcaggtttgccaaatactacaagatcaatggcaccaccacccgcacgctcatcaaggcctacgggatccgcattgacgtcattgtgcatggacaggccgggaagttcagcctgattcccaccattattaatctggccacagctctgacttccgtcggggtgggctccttcctgtgcgactggatcttgctaacattcatgaacaaaaacaaggtctacagccataagaaatttgacaagatggtggacactcctgcctccgagcctgcccaagcctccacacccacagaccccaaaggtttggctcaactctga

SEQ ID NO: 172452 - DNA, 1881 bp, Homo sapiens
  Payload ID: 13899
  Gene Symbol: P2RX2
  Gene Name: purinergic receptor P2X, ligand gated ion channel, 2
  ENST ID: ENST00000542301
  CDS Start-End: 1-1050
atggccgccgcccagcccaagtaccccgccggggcgaccgcccggcgcctggcccggggctgctggtccgccctctgggactacgagacgcccaaggtgatcgtggtgaggaaccggcgcctgggggtcctgtaccgcgccgtgcagctgctcatcctgctctacttcgtgtggtacgtattcatcgtgcagaaaagctaccaggagagcgagacgggccccgagagctccatcatcaccaaggtcaaggggatcaccacgtccgagcacaaagtgtgggacgtggaggagtacgtgaagccccccgaggggggcagcgtgttcagcatcatcaccagggtcgaggccacccactcccagacccagggaacctgccccgagagcataagggtccacaacgccacctgcctctccgacgccgactgcgtggctggggagctggacatgctgggaaacggcctgaggactgggcgctgtgtgccctattaccaggggccctccaagacctgcgaggtgttcggctggtgcccggtggaagatggggcctctgtcagccaatttctgggtacgatggccccaaatttcaccatcctcatcaagaacagcatccactaccccaaattccacttctccaagggcaacatcgccgaccgcacagacgggtacctgaagcgctgcacgttccacgaggcctccgacctctactgccccatcttcaagctgggctttatcgtggagaaggctggggagagcttcacagagctcgcacacaagggtggtgtcatcggggtcattatcaactgggactgtgacctggacctgcctgcatcggagtgcaaccccaagtactccttccggaggcttgaccccaagcacgtgcctgcctcgtcaggctacaacttcaggtttgccaaatactacaagatcaatggcaccaccacccgcacgctcatcaaggcctacgggatccgcattgacgtcattgtgcatggacaggtgcctgcacctgctgggggccgggaagttcagcctgattcccaccattattaatctggccacagctctgacttccgtcggggtggtaaggaaccctctctggggtcccagcgggtgcggggggtccaccaggcccttacacaccggtctctgctggccccagggctccttcctgtgcgactggatcttgctaacattcatgaacaaaaacaaggtctacagccataagaaatttgacaaggtgtgtacgccgagccacccctcaggtagctggcctgtgacccttgcccgtgtattgggccaggcccctcccgaacccggccaccgctccgaggaccagcaccccagccctccatcaggccaggagggccaacaaggggcagagtgtggcccagccttcccgcccctgcggccttgccccatctctgccccttctgagcagatggtggacactcctgcctccgagcctgcccaagcctccacacccacagaccccaaaggtttggctcaactctgagctcctttccatctcactggactgcagacccggcctggtggggccagagagtccccagctagggacctgcacgtggacgtgggcacctcagtagcggagcatctccacgaaacggggcaccacaggatccctgtgcaagggctgggggcacgctctggccccaggcttgtgccccaccctggcatacagcccctgacacctcctccccagctggtccctacagggctgctcacttcccatcacctctcacagccacctggaacccaagccagctgagctctgaggggctctgctcccggtcttgggccctgggaaccccaccccaccccaccccacaggcgttgtaaccttgaatctgcccagactct

SEQ ID NO: 172453 - DNA, 1831 bp, Homo sapiens
  Payload ID: 13900
  Gene Symbol: P2RX3
  Gene Name: purinergic receptor P2X, ligand gated ion channel, 3
  Uniprot ID: P56373
  ENST ID: ENST00000263314
  CDS Start-End: 35-1228
ccccttctgagtgtcccctgagcactctctcagcatgaactgcatatccgacttcttcacctatgagaccaccaagtcggtggttgtgaagagctggaccatcgggatcatcaaccgagtagttcagcttctgatcatctcctactttgtagggtgggttttcttgcacgagaaggcttaccaggtacgggacacagccattgagtcctcggtggtaaccaaggtgaagggctccggactctacgccaacagagtcatggatgtgtctgattacgtgacgccacctcagggcacctcggtctttgtcatcatcaccaagatgattgttactgaaaatcagatgcaaggattctgcccagagagtgaggagaaataccgctgtgtatcagacagccagtgcgggcctgagcgcttgccaggtggggggatcctcactggccgctgcgtgaactacagctctgtgctccggacctgtgagatccagggctggtgccccacggaggtggacacagtggaaacgcccatcatgatggaagctgagaacttcactattttcatcaagaacagcatccgtttccccctcttcaactttgagaagggaaacctccttcccaacctgacagccagggacatgaagacctgccgcttccacccggacaaggaccctttctgccccatcttgcgggtaggggacgtggtcaagtttgcggggcaggattttgccaaactggcgcgcacggggggagttctgggcattaagatcggctgggtgtgcgacttggacaaggcctgggaccagtgcatccccaaatactccttcacccggctcgacagcgtttctgagaaaagcagcgtgtccccaggctacaacttcaggtttgccaagtactacaaaatggaaaatggcagtgagtaccgcaccctcctgaaggcttttggcatccgcttcgacgtgctggtatacgggaatgctggcaagttcaacatcatccccaccatcatcagctctgtggcggcctttacttctgtgggagtgggaactgttctctgtgacatcatcctgctcaacttcctcaagggggccgaccagtacaaagccaagaagtttgaggaggtgaatgagactacgctgaaaatcgcggctttgaccaacccagtgtaccccagcgaccagaccacagcggagaagcagtccaccgattcgggggccttctccataggccactagggcctctttccagggccccacactcacaaaggctccaggcctccccacagaggaccctgcctgagcaaggggcatgggagggaagaggggctctcatttctgctgctcattccatgagcatagctgggacccaagtgtctgggcctccgactgctccagcagacaggcagtgctccctgctgagaccccaatctcaccttcactccttgcctggccccatctgcttcctaggacccctggggcaggagcacctgagccatccccttcccaaagagtagagattataatgtaggacagatggccacaagggcctaccaagtgccaggcactttcacacacgttatctcatttaatccttagaataatcctatgaggtagatattagtttcccttgttttgaagataaaccaaggctcagagagactgagtcatttgccccaggccagatagccaggatgtgagagagctgggatttgaacgtccgtctgactaactccatcgcccacaccccatgagagaagaatgaactcccagggtccatcagccctgctgcttcagccgcctccaccctgacggtgattcggttaataaagagtaagcccc

SEQ ID NO: 172454 - DNA, 837 bp, Homo sapiens
  Payload ID: 13900
  Gene Symbol: P2RX3
  Gene Name: purinergic receptor P2X, ligand gated ion channel, 3
  ENST ID: ENST00000534820
  CDS Start-End: 1-153
aaataccgctgtgtatcagacagccagtgcgggcctgagcgcttgccaggtggggggatcctcactggccgctgcgtgaactacagctctgtgctccggacctgtgagatccagggctggtgccccacggaggtggacacagtggaaacgtaaggctccaagccagacaggaggagacaggcccccacctcagctcccctttgcccatgtgggagccgtgcgtctctgagcttgaggagggcccatcatgatggaagctgagaacttcactattttcatcaagaacagcatccgtttccccctcttcaactttgagaagggaaacctccttcccaacctgacagccagggacatgaagacctgccgcttccacccggacaaggaccctttctgccccatcttgcgggtaggggacgtggtcaagtttgcggggcaggattttgccaaactggcgcgcacgagtctcgatctgtctcccaggctagagtgcatggcgcgatttcggctcactgcaacctccgcctcccaggttcacgccattctcctgcctcagcttccggagtagctgggaccaagcccggctaatttttggtatttttagtagagtcaggggttcgccgtgttagccaggatggtctcgatctcctgacctcgtgatccgcccgcctcggcctcccaaagtgctgggattacaggcgtgaatcaccgcacccggccaccacagcacttctttactgagcagtatatgacatgtcactttccgttctccctgcctccgtctcccacctggaggatgggaggaaatcatttgtcaccacctccaccccacccccaccc

SEQ ID NO: 172455 - DNA, 1346 bp, Homo sapiens
  Payload ID: 13900
  Gene Symbol: P2RX3
  Gene Name: purinergic receptor P2X, ligand gated ion channel, 3
  ENST ID: ENST00000616487
  CDS Start-End: 77-1267
cctgtcctgtaggacctccctctcctgaggccaccactgggcccccttctgagtgtcccctgagcactctctcagcatgaactgcatatccgacttcttcacctatgagaccaccaagtcggtggttgtgaagagctggaccatcgggatcatcaaccgagtagttcagcttctgatcatctcctactttgtagggtgggttttcttgcacgagaaggcttaccaggtacgggacacagccattgagtcctcggtggtaaccaaggtgaagggctccggactctacgccaacagagtcatggatgtgtctgattacgtgacgccacctcagggcacctcggtctttgtcatcatcaccaagatgattgttactgaaaatcagatgcaaggattctgcccagagagtgaggagaaataccgctgtgtatcagacagccagtgcgggcctgagcgcttgccaggtggggggatcctcactggccgctgcgtgaactacagctctgtgctccggacctgtgagatccagggctggtgccccacggaggtggacacagtggaaacgcccatcatgatggaagctgagaacttcactattttcatcaagaacagcatccgtttccccctcttcaactttgagaagggaaacctccttcccaacctgacagccagggacatgaagacctgccgcttccacccggacaaggaccctttctgccccatcttgcgggtaggggacgtggtcaagtttgcggggcaggattttgccaaactggcgcgcacggggggagttctgggcattaagatcggctgggtgtgcgacttggacaaggcctgggaccagtgcatccccaaatactccttcacccggctcgacagcgtttctgagaaaagcagcgtgtccccaggctacaacttcaggtttgccaagtactacaaaatggaaaatggcagtgagtaccgcaccctcctgaaggcttttggcatccgcttcgacgtgctgtatacgggagctggcaagttcaacatcatccccaccatcatcagctctgtggcggcctttacttctgtgggagtgggaactgttctctgtgacatcatcctgctcaacttcctcaagggggccgaccagtacaaagccaagaagtttgaggaggtgaatgagactacgctgaaaatcgcggctttgaccaacccagtgtaccccagcgaccagaccacagcggagaagcagtccaccgattcgggggccttctccataggccactagggcctctttccagggccccacactcacaaaggctccaggcctccccacagaggaccctgcctgagcaaggggcatggga

SEQ ID NO: 172456 - DNA, 2032 bp, Homo sapiens
  Payload ID: 13901
  Gene Symbol: P2RX4
  Gene Name: purinergic receptor P2X, ligand gated ion channel, 4
  Uniprot ID: Q99571
  ENST ID: ENST00000337233
  CDS Start-End: 309-1475
ccgcaagtgctgggatgacaggtgtgagccaccgcccccggcccctcgcccgccttttgaaggagcctttcgtcctcaagggcgaggccactccccccccgcgagttccatgccccctagagggtcatcgttcccgacggggaggtggcgccctcccccgggccccgggccccgaccgcccgtgctgcctccttccgggccctcctccgcgatgacggcgccgccagcaggccaggcggactgggcggggctccgagcggggactgggacccagaccgactaggggactgggagcgggcggcgcggccatggcgggctgctgcgccgcgctggcggccttcctgttcgagtacgacacgccgcgcatcgtgctcatccgcagccgcaaagtggggctcatgaaccgcgccgtgcaactgctcatcctggcctacgtcatcgggtgggtgtttgtgtgggaaaagggctaccaggaaactgactccgtggtcagctccgttacgaccaaggtcaagggcgtggctgtgaccaacacttctaaacttggattccggatctgggatgtggcggattatgtgataccagctcaggaggaaaactccctcttcgtcatgaccaacgtgatcctcaccatgaaccagacacagggcctgtgccccgagattccagatgcgaccactgtgtgtaaatcagatgccagctgtactgccggctctgccggcacccacagcaacggagtctcaacaggcaggtgcgtagctttcaacgggtctgtcaagacgtgtgaggtggcggcctggtgcccggtggaggatgacacacacgtgccacaacctgcttttttaaaggctgcagaaaacttcactcttttggttaagaacaacatctggtatcccaaatttaatttcagcaagaggaatatccttcccaacatcaccactacttacctcaagtcgtgcatttatgatgctaaaacagatcccttctgccccatattccgtcttggcaaaatagtggagaacgcaggacacagtttccaggacatggccgtggagggaggcatcatgggcatccaggtcaactgggactgcaacctggacagagccgcctccctctgcttgcccaggtactccttccgccgcctcgatacacgggacgttgagcacaacgtatctcctggctacaatttcaggtttgccaagtactacagagacctggctggcaacgagcagcgcacgctcatcaaggcctatggcatccgcttcgacatcattgtgtttgggaaggcagggaaatttgacatcatccccactatgatcaacatcggctctggcctggcactgctaggcatggcgaccgtgctgtgtgacatcatagtcctctactgcatgaagaaaagactctactatcgggagaagaaatataaatatgtggaagattacgagcagggtcttgctagtgagctggaccagtgaggcctaccccacacctgggctctccacagccccatcaaagaacagagaggaggaggagggagaaatggccaccacatcaccccagagaaatttctggaatctgattgagtctccactccacaagcactcagggttccccagcagctcctgtgtgttgtgtgcaggatctgtttgcccactcggcccaggaggtcagcagtctgttcttggctgggtcaactctgcttttcccgcaacctggggttgtcgggggagcgctggcccgacgcagtggcactgctgtggctttcagggctggagctggctttgctcagaagcctcctgtctccagctctctccaggacaggcccagtcctctgaggcacggcggctctgttcaagcactttatgcggcaggggaggccgcctggctgcagtcactagacttgtagcaggcctgggctgcaggcttccccccgaccattccctgcagccatgcggcagagctggcatttctcctcagagaagcgctgtgctaaggtgatcgaggaccagacattaaagcgtgattttcttaa

SEQ ID NO: 172457 - DNA, 1836 bp, Homo sapiens
  Payload ID: 13901
  Gene Symbol: P2RX4
  Gene Name: purinergic receptor P2X, ligand gated ion channel, 4
  Uniprot ID: Q99571
  ENST ID: ENST00000359949
  CDS Start-End: 101-1315
gcgatgacggcgccgccagcaggccaggcggactgggcggggctccgagcggggactgggacccagaccgactaggggactgggagcgggcggcgcggccatggcgggctgctgcgccgcgctggcggccttcctgttcgagtacgacacgccgcgcatcgtgctcatccgcagccgcaaagtggggctcatgaaccgcgccgtgcaactgctcatcctggcctacgtcatcgggtgctaccatccccatttggcagaagtggaaatggagtcccctagaaggtgggtgtttgtgtgggaaaagggctaccaggaaactgactccgtggtcagctccgttacgaccaaggtcaagggcgtggctgtgaccaacacttctaaacttggattccggatctgggatgtggcggattatgtgataccagctcaggaggaaaactccctcttcgtcatgaccaacgtgatcctcaccatgaaccagacacagggcctgtgccccgagattccagatgcgaccactgtgtgtaaatcagatgccagctgtactgccggctctgccggcacccacagcaacggagtctcaacaggcaggtgcgtagctttcaacgggtctgtcaagacgtgtgaggtggcggcctggtgcccggtggaggatgacacacacgtgccacaacctgcttttttaaaggctgcagaaaacttcactcttttggttaagaacaacatctggtatcccaaatttaatttcagcaagaggaatatccttcccaacatcaccactacttacctcaagtcgtgcatttatgatgctaaaacagatcccttctgccccatattccgtcttggcaaaatagtggagaacgcaggacacagtttccaggacatggccgtggagggaggcatcatgggcatccaggtcaactgggactgcaacctggacagagccgcctccctctgcttgcccaggtactccttccgccgcctcgatacacgggacgttgagcacaacgtatctcctggctacaatttcaggtttgccaagtactacagagacctggctggcaacgagcagcgcacgctcatcaaggcctatggcatccgcttcgacatcattgtgtttgggaaggcagggaaatttgacatcatccccactatgatcaacatcggctctggcctggcactgctaggcatggcgaccgtgctgtgtgacatcatagtcctctactgcatgaagaaaagactctactatcgggagaagaaatataaatatgtggaagattacgagcagggtcttgctagtgagctggaccagtgaggcctaccccacacctgggctctccacagccccatcaaagaacagagaggaggaggagggagaaatggccaccacatcaccccagagaaatttctggaatctgattgagtctccactccacaagcactcagggttccccagcagctcctgtgtgttgtgtgcaggatctgtttgcccactcggcccaggaggtcagcagtctgttcttggctgggtcaactctgcttttcccgcaacctggggttgtcgggggagcgctggcccgacgcagtggcactgctgtggctttcagggctggagctggctttgctcagaagcctcctgtctccagctctctccaggacaggcccagtcctctgaggcacggcggctctgttcaagcactttatgcggcaggggaggccgcctggctgcagtcactagacttgtagcaggcctgggctgcaggcttccccccgaccattccctgcagccatgcggcagagctggcatttctcctcagagaagcgctgtgctaaggt

SEQ ID NO: 172458 - DNA, 866 bp, Homo sapiens
  Payload ID: 13901
  Gene Symbol: P2RX4
  Gene Name: purinergic receptor P2X, ligand gated ion channel, 4
  ENST ID: ENST00000538417
  CDS Start-End: 1-371
gcagccgcaaagtggggctcatgaaccgcgccgtgcaactgctcatcctggcctacgtcatcgggtgggtgtttgtgtgggaaaagggctaccaggaaactgactccgtggtcagctccgttacgaccaaggtcaagggcgtggctgtgaccaacacttctaaacttggattccggatctgggatgtggcggattatgtgataccagctcaggaggaaaactccctcttcgtcatgaccaacgtgatcctcaccatgaaccagacacagggcctgtgccccgagattccagatgcgaccactgtgtgtaaatcagatgccagctgtactgccggctctgccggcacccacagcaacgacctgcttttttaaaggctgcagaaaacttcactcttttggttaagaacaacatctggtatcccaaatttaatttcagcaagaggaatatccttcccaacatcaccactacttacctcaagtcgtgcatttatgatgctaaaacagatcccttctgccccatattccgtcttggcaaaatagtggagaacgcaggacacagtttccaggacatggccgtggagggaggcatcatgggcatccaggtcaactgggactgcaacctggacagagccgcctccctctgcttgcccaggtactccttccgccgcctcgatacacgggacgttgagcacaacgtatctcctggctacaatttcagggcccaaggtcctgccccagccatctccccctgatccatcctccttcccctcaggtttgccaagtactacagagacctggctggcaacgagcagcgcacgctcatcaaggcctatggcatccgcttcgacatcattgtgtttgggaagg

SEQ ID NO: 172459 - DNA, 1777 bp, Homo sapiens
  Payload ID: 13901
  Gene Symbol: P2RX4
  Gene Name: purinergic receptor P2X, ligand gated ion channel, 4
  ENST ID: ENST00000543171
  CDS Start-End: 305-1330
aagtgctgggatgacaggtgtgagccaccgcccccggcccctcgcccgccttttgaaggagcctttcgtcctcaagggcgaggccactccccccccgcgagttccatgccccctagagggtcatcgttcccgacggggaggtggcgccctcccccgggccccgggccccgaccgcccgtgctgcctccttccgggccctcctccgcgatgacggcgccgccagcaggccaggcggactgggcggggctccgagcggggactgggacccagaccgactaggggactgggagcgggcggcgcggccatggcgggctgctgcgccgcgctggcggccttcctgttcgagtacgacacgccgcgcatcgtgctcatccgcagccgcaaagtggggctcatgaaccgcgccgtgcaactgctcatcctggcctacgtcatcgggtgggtgtttgtgtgggaaaagggctaccaggaaactgactccgtggtcagctccgttacgaccaaggtcaagggcgtggctgtgaccaacacttctaaacttggattccggatctgggatgtggcggattatgtgataccagctcaggaggaaaactccctcttcgtcatgaccaacgtgatcctcaccatgaaccagacacagggcctgtgccccgagattccagatgcgaccactgtgtgtaaatcagatgccagctgtactgccggctctgccggcacccacagcaacggagtctcaacaggcaggtgcgtagctttcaacgggtctgtcaagacgtgtgaggtggcggcctggtgcccggtggaggatgacacacacgtgccacaacctgcttttttaaaggctgcagaaaacttcactcttttggttaagaacaacatctggtatcccaaatttaatttcagcaagaggaatatccttcccaacatcaccactacttacctcaagtcgtgcatttatgatgctaaaacagatcccttctgccccatattccgtcttggcaaaatagtggagaacgcaggacacagtttccaggacatggccgtggagggaggcatcatgggcatccaggtcaactgggactgcaacctggacagagccgcctccctctgcttgcccaggtactccttccgccgcctcgatacacgggacgttgagcacaacgtatctcctggctacaatttcaggtttgccaagtactacagagacctggctggcaacgagcagcgcacgctcatcaaggcctatggcatccgcttcgacatcattgtgtttgggaaggcagggaaatttgacatcatccccaagaaatttctggaatctgattgagtctccactccacaagcactcagggttccccagcagctcctgtgtgttgtgtgcaggatctgtttgcccactcggcccaggaggtcagcagtctgttcttggctgggtcaactctgcttttcccgcaacctggggttgtcgggggagcgctggcccgacgcagtggcactgctgtggctttcagggctggagctggctttgctcagaagcctcctgtctccagctctctccaggacaggcccagtcctctgaggcacggcggctctgttcaagcactttatgcggcaggggaggccgcctggctgcagtcactagacttgtagcaggcctgggctgcaggcttccccccgaccattccctgcagccatgcggcagagctggcatttctcctcagagaagcgctgtgctaaggtgatcgaggaccagacattaaagcgtgattttctt

SEQ ID NO: 172460 - DNA, 1084 bp, Homo sapiens
  Payload ID: 13901
  Gene Symbol: P2RX4
  Gene Name: purinergic receptor P2X, ligand gated ion channel, 4
  Uniprot ID: Q99571
  ENST ID: ENST00000542067
  CDS Start-End: 1-1084
atggcgggctgctgcgccgcgctggcggccttcctgttcgagtacgacacgccgcgcatcgtgctcatccgcagccgcaaagtggggctcatgaaccgcgccgtgcaactgctcatcctggcctacgtcatcgggtgggtgtttgtgtgggaaaagggctaccaggaaactgactccgtggtcagctccgttacgaccaaggtcaagggcgtggctgtgaccaacacttctaaacttggattccggatctgggatgtggcggattatgtgataccagctcaggaggaaaactccctcttcgtcatgaccaacgtgatcctcaccatgaaccagacacagggcctgtgccccgagattccagatgcgaccactgtgtgtaaatcagatgccagctgtactgccggctctgccggcacccacagcaacggagtctcaacaggcagacctgcttttttaaaggctgcagaaaacttcactcttttggttaagaacaacatctggtatcccaaatttaatttcagcaagaggaatatccttcccaacatcaccactacttacctcaagtcgtgcatttatgatgctaaaacagatcccttctgccccatattccgtcttggcaaaatagtggagaacgcaggacacagtttccaggacatggccgtggagggaggcatcatgggcatccaggtcaactgggactgcaacctggacagagccgcctccctctgcttgcccaggtactccttccgccgcctcgatacacgggacgttgagcacaacgtatctcctggctacaatttcaggtttgccaagtactacagagacctggctggcaacgagcagcgcacgctcatcaaggcctatggcatccgcttcgacatcattgtgtttgggaaggcagggaaatttgacatcatccccactatgatcaacatcggctctggcctggcactgctaggcatggcgaccgtgctgtgtgacatcatagtcctctactgcatgaagaaaagactctactatcgggagaagaaatataaatatgtggaagattacgagcagggtcttgctagtgagctggaccagt

SEQ ID NO: 172461 - DNA, 1612 bp, Homo sapiens
  Payload ID: 13901
  Gene Symbol: P2RX4
  Gene Name: purinergic receptor P2X, ligand gated ion channel, 4
  ENST ID: ENST00000543984
  CDS Start-End: 37-195
agaccgactaggggactgggagcgggcggcgcggccatggcgggctgctgcgccgcgctggcggccttcctgttcgagtacgacacgccgcgcatcgtgctcatccgcagccgcaaagtggggctcatgaaccgcgccgtgcaactgctcatcctggcctacgtcatcgggaggaaaactccctcttcgtcatgaccaacgtgatcctcaccatgaaccagacacagggcctgtgccccgagattccagatgcgaccactgtgtgtaaatcagatgccagctgtactgccggctctgccggcacccacagcaacggagtctcaacaggcaggtgcgtagctttcaacgggtctgtcaagacgtgtgaggtggcggcctggtgcccggtggaggatgacacacacgtgccacaacctgcttttttaaaggctgcagaaaacttcactcttttggttaagaacaacatctggtatcccaaatttaatttcagcaagaggaatatccttcccaacatcaccactacttacctcaagtcgtgcatttatgatgctaaaacagatcccttctgccccatattccgtcttggcaaaatagtggagaacgcaggacacagtttccaggacatggccgtggagggaggcatcatgggcatccaggtcaactgggactgcaacctggacagagccgcctccctctgcttgcccaggtactccttccgccgcctcgatacacgggacgttgagcacaacgtatctcctggctacaatttcaggtttgccaagtactacagagacctggctggcaacgagcagcgcacgctcatcaaggcctatggcatccgcttcgacatcattgtgtttgggaaggcagggaaatttgacatcatccccactatgatcaacatcggctctggcctggcactgctaggcatggcgaccgtgctgtgtgacatcatagtcctctactgcatgaagaaaagactctactatcgggagaagaaatataaatatgtggaagattacgagcagggtcttgctagtgagctggaccagtgaggcctaccccacacctgggctctccacagccccatcaaagaacagagaggaggaggagggagaaatggccaccacatcaccccagagaaatttctggaatctgattgagtctccactccacaagcactcagggttccccagcagctcctgtgtgttgtgtgcaggatctgtttgcccactcggcccaggaggtcagcagtctgttcttggctgggtcaactctgcttttcccgcaacctggggttgtcgggggagcgctggcccgacgcagtggcactgctgtggctttcagggctggagctggctttgctcagaagcctcctgtctccagctctctccaggacaggcccagtcctctgaggcacggcggctctgttcaagcactttatgcggcaggggaggccgcctggctgcagtcactagacttgtagcaggcctgggctgcaggcttccccccgaccattccctgcagccatgcggcagagctggcatttctcctcagagaagcgctgtgctaaggtgatcgaggaccagacattaaagcgtgattttcttaa

SEQ ID NO: 172462 - DNA, 451 bp, Homo sapiens
  Payload ID: 13901
  Gene Symbol: P2RX4
  Gene Name: purinergic receptor P2X, ligand gated ion channel, 4
  ENST ID: ENST00000538701
  CDS Start-End: 15-451
cgggcggcgcggccatggcgggctgctgcgccgcgctggcggccttcctgttcgagtacgacacgccgcgcatcgtgctcatccgcagccgcaaagtggggctcatgaaccgcgccgtgcaactgctcatcctggcctacgtcatcggacctgcttttttaaaggctgcagaaaacttcactcttttggttaagaacaacatctggtatcccaaatttaatttcagcaagaggaatatccttcccaacatcaccactacttacctcaagtcgtgcatttatgatgctaaaacagatcccttctgccccatattccgtcttggcaaaatagtggagaacgcaggacacagtttccaggacatggccgtggagggaggcatcatgggcatccaggtcaactgggactgcaacctggacagagccgcctccctctgcttgcccaggtactcctt

SEQ ID NO: 172463 - DNA, 1429 bp, Homo sapiens
  Payload ID: 13901
  Gene Symbol: P2RX4
  Gene Name: purinergic receptor P2X, ligand gated ion channel, 4
  ENST ID: ENST00000543318
  CDS Start-End: 37-483
agaccgactaggggactgggagcgggcggcgcggccatggcgggctgctgcgccgcgctggcggccttcctgttcgagtacgacacgccgcgcatcgtgctcatccgcagccgcaaagtggggctcatgaaccgcgccgtgcaactgctcatcctggcctacgtcatcgggtgggtgtttgtgtgggaaaagggctaccaggaaactgactccgtggtcagctccgttacgaccaaggtcaagggcgtggctgtgaccaacacttctaaacttggattccggatctgggatgtggcggattatgtgataccagctcaggaggaaaactccctcttcgtcatgaccaacgtgatcctcaccatgaaccagacacagggcctgtgccccgagattccagatgcgaccactgtgtgtaaatcagatgccagctgtactgccggctctgccggcacccacagcaacgcttggcatcaccctggctgagatgtggctggcacacaggagtctcaacaggcaggtgcgtagctttcaacgggtctgtcaagacgtgtgaggtggcggcctggtgcccggtggaggatgacacacacgtgccacaacctgcttttttaaaggctgcagaaaacttcactcttttggttaagaacaacatctggtatcccaaatttaatttcagcaagaggaatatccttcccaacatcaccactacttacctcaagtcgtgcatttatgatgctaaaacagatcccttctgccccatattccgtcttggcaaaatagtggagaacgcaggacacagtttccaggacatggccgtggagggaggcatcatgggcatccaggtcaactgggactgcaacctggacagagccgcctccctctgcttgcccaggtactccttccgccgcctcgatacacgggacgttgagcacaacgtatctcctggctacaatttcaggtttgccaagtactacagagacctggctggcaacgagcagcgcacgctcatcaaggcctatggcatccgcttcgacatcattgtgtttgggaaggcagggaaatttgacatcatccccactatgatcaacatcggctctggcctggcactgctaggcatggcgaccgtgctgtgtgacatcatagtcctctactgcatgaagaaaagactctactatcgggagaagaaatataaatatgtggaagattacgagcagggtcttgctagtgagctggaccagtgaggcctaccccacacctgggctctccacagccccatcaaagaacagagaggaggaggagggagaaatggccaccacatcaccccagagaaatttctggaatctgattgagtctccactccacaagcactcagggttccccagcagctcctgtgtgttgtgtgcaggatctgtttgcccactcggcccag

SEQ ID NO: 172464 - DNA, 2309 bp, Homo sapiens
  Payload ID: 13902
  Gene Symbol: P2RX5
  Gene Name: purinergic receptor P2X, ligand gated ion channel, 5
  Uniprot ID: Q93086
  ENST ID: ENST00000225328
  CDS Start-End: 400-1668
tccgcgatcgctgctttcagctgggcaacagcacagggcggtcctgcgcatccggggggctgcgctcccagaccggtggctggggagtaggttgcaggggtgtcactgtgtcaggggaggaggaggaggaggaggaagaagaggtagcggcaaggtcgcggtctgaggttccggtgctcgccgccgcccagctcccagccgaggctttctcaaccgcgtcaataaaaggccgccccgacccgcccccgcgccccgcagccctgccggacaccccgggctgcagctgagcgggcgcagacgggccgaggcgggcgccgggcgcgcagggaccgagggaccgagtgctccccatgagcgcacgtgggccgggcggtccgcaagcccggctgagagcgcgccatggggcaggcgggctgcaaggggctctgcctgtcgctgttcgactacaagaccgagaagtatgtcatcgccaagaacaagaaggtgggcctgctgtaccggctgctgcaggcctccatcctggcgtacctggtcgtatgggtgttcctgataaagaagggttaccaagacgtcgacacctccctgcagagtgctgtcatcaccaaagtcaagggcgtggccttcaccaacacctcggatcttgggcagcggatctgggatgtcgccgactacgtcattccagcccagggagagaacgtcttttttgtggtcaccaacctgattgtgacccccaaccagcggcagaacgtctgtgctgagaatgaaggcattcctgatggcgcgtgctccaaggacagcgactgccacgctggggaagcggttacagctggaaacggagtgaagaccggccgctgcctgcggagagagaacttggccaggggcacctgtgagatctttgcctggtgcccgttggagacaagctccaggccggaggagccattcctgaaggaggccgaagacttcaccattttcataaagaaccacatccgtttccccaaattcaacttctccaaaagcaatgtgatggacgtcaaggacagatctttcctgaaatcatgccactttggccccaagaaccactactgccccatcttccgactgggctccgtgatccgctgggccgggagcgacttccaggatatagccctggagggtggcgtgataggaattaatattgaatggaactgtgatcttgataaagctgcctctgagtgccaccctcactattcttttagccgtctggacaataaactttcaaagtctgtctcctccgggtacaacttcagatttgccagatattaccgagacgcagccggggtggagttccgcaccctgatgaaagcctacgggatccgctttgacgtgatggtgaacggcaagggtgctttcttctgcgacctggtactcatctacctcatcaaaaagagagagttttaccgtgacaagaagtacgaggaagtgaggggcctagaagacagttcccaggaggccgaggacgaggcatcggggctggggctatctgagcagctcacatctgggccagggctgctggggatgccggagcagcaggagctgcaggagccacccgaggcgaagcgtggaagcagcagtcagaaggggaacggatctgtgtgcccacagctcctggagccccacaggagcacgtgaattgcctctgcttacgttcaggccctgtcctaaacccagccgtctagcacccagtgatcccatgcctttgggaatcccaggatgctgcccaacgggaaatttgtacattgggtgctatcaatgccacatcacagggaccagccatcacagagcaaagtgacctccacgtctgatgctggggtcatcaggacggacccatcatggctgtctttttgccccaccccctgccgtcagttcttcctttctccgtggctggcttcccgcactagggaacgggttgtaaatggggaacatgacttccttccggagtccttgagcacctcagctaaggaccgcagtgccctgtagagttcctagattacctcactgggaatagcattgtgcgtgtccggaaaagggctccatttggttccagcccactcccctctgcaagtgccgcagcttccctcagagcatactctccagtggatccaagtactctctctcctaaagacaccaccttcctgccagctgtttgcccttaggccagtacacagaattaaagtgggggagatggcagacgctttctgggacctgcccaagatatgtattctctgacactcttatttggtcataaaacaataaatggtgtcaatttcaaa

SEQ ID NO: 172465 - DNA, 2031 bp, Homo sapiens
  Payload ID: 13902
  Gene Symbol: P2RX5
  Gene Name: purinergic receptor P2X, ligand gated ion channel, 5
  Uniprot ID: Q93086
  ENST ID: ENST00000345901
  CDS Start-End: 212-1408
cagctcccagccgaggctttctcaaccgcgtcaataaaaggccgccccgacccgcccccgcgccccgcagccctgccggacaccccgggctgcagctgagcgggcgcagacgggccgaggcgggcgccgggcgcgcagggaccgagggaccgagtgctccccatgagcgcacgtgggccgggcggtccgcaagcccggctgagagcgcgccatggggcaggcgggctgcaaggggctctgcctgtcgctgttcgactacaagaccgagaagtatgtcatcgccaagaacaagaaggtgggcctgctgtaccggctgctgcaggcctccatcctggcgtacctggtcgtatgggtgttcctgataaagaagggttaccaagacgtcgacacctccctgcagagtgctgtcatcaccaaagtcaagggcgtggccttcaccaacacctcggatcttgggcagcggatctgggatgtcgccgactacgtcattccagcccagaatgaaggcattcctgatggcgcgtgctccaaggacagcgactgccacgctggggaagcggttacagctggaaacggagtgaagaccggccgctgcctgcggagagagaacttggccaggggcacctgtgagatctttgcctggtgcccgttggagacaagctccaggccggaggagccattcctgaaggaggccgaagacttcaccattttcataaagaaccacatccgtttccccaaattcaacttctccaaaagcaatgtgatggacgtcaaggacagatctttcctgaaatcatgccactttggccccaagaaccactactgccccatcttccgactgggctccgtgatccgctgggccgggagcgacttccaggatatagccctggagggtggcgtgataggaattaatattgaatggaactgtgatcttgataaagctgcctctgagtgccaccctcactattcttttagccgtctggacaataaactttcaaagtctgtctcctccgggtacaacttcagatttgccagatattaccgagacgcagccggggtggagttccgcaccctgatgaaagcctacgggatccgctttgacgtgatggtgaacggcaagggtgctttcttctgcgacctggtactcatctacctcatcaaaaagagagagttttaccgtgacaagaagtacgaggaagtgaggggcctagaagacagttcccaggaggccgaggacgaggcatcggggctggggctatctgagcagctcacatctgggccagggctgctggggatgccggagcagcaggagctgcaggagccacccgaggcgaagcgtggaagcagcagtcagaaggggaacggatctgtgtgcccacagctcctggagccccacaggagcacgtgaattgcctctgcttacgttcaggccctgtcctaaacccagccgtctagcacccagtgatcccatgcctttgggaatcccaggatgctgcccaacgggaaatttgtacattgggtgctatcaatgccacatcacagggaccagccatcacagagcaaagtgacctccacgtctgatgctggggtcatcaggacggacccatcatggctgtctttttgccccaccccctgccgtcagttcttcctttctccgtggctggcttcccgcactagggaacgggttgtaaatggggaacatgacttccttccggagtccttgagcacctcagctaaggaccgcagtgccctgtagagttcctagattacctcactgggaatagcattgtgcgtgtccggaaaagggctccatttggttccagcccactcccctctgcaagtgccgcagcttccctcagagcatactctccagtggatccaagtactctctctcctaaagacaccaccttcctgccagctgtttgcccttaggccagtacacagaattaaagtgggggagatggcagacgctttctgggacctgcccaagatatgtattctctgacactcttatttggtcataaaacaata

SEQ ID NO: 172466 - DNA, 1863 bp, Homo sapiens
  Payload ID: 13902
  Gene Symbol: P2RX5
  Gene Name: purinergic receptor P2X, ligand gated ion channel, 5
  Uniprot ID: Q93086
  ENST ID: ENST00000551178
  CDS Start-End: 29-1222
ggtccgcaagcccggctgagagcgcgccatggggcaggcgggctgcaaggggctctgcctgtcgctgttcgactacaagaccgagaagtatgtcatcgccaagaacaagaaggtgggcctgctgtaccggctgctgcaggcctccatcctggcgtacctggtcgtatgggtgttcctgataaagaagggttaccaagacgtcgacacctccctgcagagtgctgtcatcaccaaagtcaagggcgtggccttcaccaacacctcggatcttgggcagcggatctgggatgtcgccgactacgtcattccagcccagaatgaaggcattcctgatggcgcgtgctccaaggacagcgactgccacgctggggaagcggttacagctggaaacggagtgaagaccggccgctgcctgcggagagagaacttggccaggggcacctgtgagatctttgcctggtgcccgttggagacaagctccaggccggaggagccattcctgaaggaggccgaagacttcaccattttcataaagaaccacatccgtttccccaaattcaacttctccaacaatgtgatggacgtcaaggacagatctttcctgaaatcatgccactttggccccaagaaccactactgccccatcttccgactgggctccgtgatccgctgggccgggagcgacttccaggatatagccctggagggtggcgtgataggaattaatattgaatggaactgtgatcttgataaagctgcctctgagtgccaccctcactattcttttagccgtctggacaataaactttcaaagtctgtctcctccgggtacaacttcagatttgccagatattaccgagacgcagccggggtggagttccgcaccctgatgaaagcctacgggatccgctttgacgtgatggtgaacggcaagggtgctttcttctgcgacctggtactcatctacctcatcaaaaagagagagttttaccgtgacaagaagtacgaggaagtgaggggcctagaagacagttcccaggaggccgaggacgaggcatcggggctggggctatctgagcagctcacatctgggccagggctgctggggatgccggagcagcaggagctgcaggagccacccgaggcgaagcgtggaagcagcagtcagaaggggaacggatctgtgtgcccacagctcctggagccccacaggagcacgtgaattgcctctgcttacgttcaggccctgtcctaaacccagccgtctagcacccagtgatcccatgcctttgggaatcccaggatgctgcccaacgggaaatttgtacattgggtgctatcaatgccacatcacagggaccagccatcacagagcaaagtgacctccacgtctgatgctggggtcatcaggacggacccatcatggctgtctttttgccccaccccctgccgtcagttcttcctttctccgtggctggcttcccgcactagggaacgggttgtaaatggggaacatgacttccttccggagtccttgagcacctcagctaaggaccgcagtgccctgtagagttcctagattacctcactgggaatagcattgtgcgtgtccggaaaagggctccatttggttccagcccactcccctctgcaagtgccgcagcttccctcagagcatactctccagtggatccaagtactctctctcctaaagacaccaccttcctgccagctgtttgcccttaggccagtacacagaattaaagtgggggagatggcagacgctttctgggacctgcccaagatatgtattctctgacactcttatttggtcataaaacaataaatggtgtcaatttcaaa

SEQ ID NO: 172467 - DNA, 851 bp, Homo sapiens
  Payload ID: 13902
  Gene Symbol: P2RX5
  Gene Name: purinergic receptor P2X, ligand gated ion channel, 5
  ENST ID: ENST00000552456
  CDS Start-End: 1-89
tccgctttgacgtgatggtgaacggcaaggggcctagaagacagttcccaggaggccgaggacgaggcatcggggctggggctatctgagcagctcacatctgggccagggctgctggggatgccggagcagcaggagctgcaggagccacccgaggcgaagcgtggaagcagcagtcagaaggggaacggatctgtgtgcccacagctcctggagccccacaggagcacgtgaattgcctctgcttacgttcaggccctgtcctaaacccagccgtctagcacccagtgatcccatgcctttgggaatcccaggatgctgcccaacgggaaatttgtacattgggtgctatcaatgccacatcacagggaccagccatcacagagcaaagtgacctccacgtctgatgctggggtcatcaggacggacccatcatggctgtctttttgccccaccccctgccgtcagttcttcctttctccgtggctggcttcccgcactagggaacgggttgtaaatggggaacatgacttccttccggagtccttgagcacctcagctaaggaccgcagtgccctgtagagttcctagattacctcactgggaatagcattgtgcgtgtccggaaaagggctccatttggttccagcccactcccctctgcaagtgccgcagcttccctcagagcatactctccagtggatccaagtactctctctcctaaagacaccaccttcctgccagctgtttgcccttaggccagtacacagaattaaagtgggggagatggcagacgctttctgggacctgcccaagatatgtattctctgacactcttatttggtcataaa

SEQ ID NO: 172468 - DNA, 1998 bp, Homo sapiens
  Payload ID: 13902
  Gene Symbol: P2RX5
  Gene Name: purinergic receptor P2X, ligand gated ion channel, 5
  Uniprot ID: Q93086
  ENST ID: ENST00000547178
  CDS Start-End: 92-1357
cgggcgccgggcgcgcagggaccgagggaccgagtgctccccatgagcgcacgtgggccgggcggtccgcaagcccggctgagagcgcgccatggggcaggcgggctgcaaggggctctgcctgtcgctgttcgactacaagaccgagaagtatgtcatcgccaagaacaagaaggtgggcctgctgtaccggctgctgcaggcctccatcctggcgtacctggtcgtatgggtgttcctgataaagaagggttaccaagacgtcgacacctccctgcagagtgctgtcatcaccaaagtcaagggcgtggccttcaccaacacctcggatcttgggcagcggatctgggatgtcgccgactacgtcattccagcccagggagagaacgtcttttttgtggtcaccaacctgattgtgacccccaaccagcggcagaacgtctgtgctgagaatgaaggcattcctgatggcgcgtgctccaaggacagcgactgccacgctggggaagcggttacagctggaaacggagtgaagaccggccgctgcctgcggagagagaacttggccaggggcacctgtgagatctttgcctggtgcccgttggagacaagctccaggccggaggagccattcctgaaggaggccgaagacttcaccattttcataaagaaccacatccgtttccccaaattcaacttctccaacaatgtgatggacgtcaaggacagatctttcctgaaatcatgccactttggccccaagaaccactactgccccatcttccgactgggctccgtgatccgctgggccgggagcgacttccaggatatagccctggagggtggcgtgataggaattaatattgaatggaactgtgatcttgataaagctgcctctgagtgccaccctcactattcttttagccgtctggacaataaactttcaaagtctgtctcctccgggtacaacttcagatttgccagatattaccgagacgcagccggggtggagttccgcaccctgatgaaagcctacgggatccgctttgacgtgatggtgaacggcaagggtgctttcttctgcgacctggtactcatctacctcatcaaaaagagagagttttaccgtgacaagaagtacgaggaagtgaggggcctagaagacagttcccaggaggccgaggacgaggcatcggggctggggctatctgagcagctcacatctgggccagggctgctggggatgccggagcagcaggagctgcaggagccacccgaggcgaagcgtggaagcagcagtcagaaggggaacggatctgtgtgcccacagctcctggagccccacaggagcacgtgaattgcctctgcttacgttcaggccctgtcctaaacccagccgtctagcacccagtgatcccatgcctttgggaatcccaggatgctgcccaacgggaaatttgtacattgggtgctatcaatgccacatcacagggaccagccatcacagagcaaagtgacctccacgtctgatgctggggtcatcaggacggacccatcatggctgtctttttgccccaccccctgccgtcagttcttcctttctccgtggctggcttcccgcactagggaacgggttgtaaatggggaacatgacttccttccggagtccttgagcacctcagctaaggaccgcagtgccctgtagagttcctagattacctcactgggaatagcattgtgcgtgtccggaaaagggctccatttggttccagcccactcccctctgcaagtgccgcagcttccctcagagcatactctccagtggatccaagtactctctctcctaaagacaccaccttcctgccagctgtttgcccttaggccagtacacagaattaaagtgggggagatggcagacgctttctgggacctgcccaagatatgtattctctgacactcttatttggtcataaaacaataaatggtgtcaatttcaaa

SEQ ID NO: 172469 - DNA, 858 bp, Homo sapiens
  Payload ID: 13902
  Gene Symbol: P2RX5
  Gene Name: purinergic receptor P2X, ligand gated ion channel, 5
  ENST ID: ENST00000552723
  CDS Start-End: 1-858
gggttaccaagacgtcgacacctccctgcagagtgctgtcatcaccaaagtcaagggcgtggccttcaccaacacctcggatcttgggcagcggatctgggatgtcgccgactacgtcattccagcccagggagagaacgtcttttttgtggtcaccaacctgattgtgacccccaaccagcggcagaacgtctgtgctgagaatgaaggcattcctgatggcgcgtgctccaaggacagcgactgccacgctggggaagcggttacagctggaaacggagtgaagaccggccgctgcctgcggagagagaacttggccaggggcacctgtgagatctttgcctggtgcccgttggagacaagctccaggccggaggagccattcctgaaggaggccgaagacttcaccattttcataaagaaccacatccgtttccccaaattcaacttctccaaccgtctggacaataaactttcaaagtctgtctcctccgggtacaacttcagatttgccagatattaccgagacgcagccggggtggagttccgcaccctgatgaaagcctacgggatccgctttgacgtgatggtgaacggcaagggtgctttcttctgcgacctggtactcatctacctcatcaaaaagagagagttttaccgtgacaagaagtacgaggaagtgaggggcctagaagacagttcccaggaggccgaggacgaggcatcggggctggggctatctgagcagctcacatctgggccagggctgctggggatgccggagcagcaggagctgcaggagccacccgaggcgaagcgtggaagcagcagtcagaaggggaacggatctgtgtgccc

SEQ ID NO: 172470 - DNA, 1536 bp, Homo sapiens
  Payload ID: 13902
  Gene Symbol: P2RX5
  Gene Name: purinergic receptor P2X, ligand gated ion channel, 5
  ENST ID: ENST00000552050
  CDS Start-End: 180-1268
cttgtcgcctctgctgcttgcaggactgggtttcagtcagcagtgggagctgtggcccctgcccaggagctggtgggacaggtggagccctgagcctgctccacctcaactaggagttgctgtgactgctaccccaccccaaggcctggggaagctccccgaagccagcagagtggctgatgcccacgtaccggcccccttcccacagatgggtgttcctgataaagaagggttaccaagacgtcgacacctccctgcagagtgctgtcatcaccaaagtcaagggcgtggccttcaccaacacctcggatcttgggcagcggatctgggatgtcgccgactacgtcattccagcccagaatgaaggcattcctgatggcgcgtgctccaaggacagcgactgccacgctggggaagcggttacagctggaaacggagtgaagaccggccgctgcctgcggagagagaacttggccaggggcacctgtgagatctttgcctggtgcccgttggagacaagctccaggccggaggagccattcctgaaggaggccgaagacttcaccattttcataaagaaccacatccgtttccccaaattcaacttctccaaaagcaatgtgatggacgtcaaggacagatctttcctgaaatcatgccactttggccccaagaaccactactgccccatcttccgactgggctccgtgatccgctgggccgggagcgacttccaggatatagccctggagggtggcgtgataggaattaatattgaatggaactgtgatcttgataaagctgcctctgagtgccaccctcactattcttttagccgtctggacaataaactttcaaagtctgtctcctccgggtacaacttcagatttgccagatattaccgagacgcagccggggtggagttccgcaccctgatgaaagcctacgggatccgctttgacgtgatggtgaacggcaagggtgctttcttctgcgacctggtactcatctacctcatcaaaaagagagagttttaccgtgacaagaagtacgaggaagtgaggggcctagaagacagttcccaggaggccgaggacgaggcatcggggctggggctatctgagcagctcacatctgggccagggctgctggggatgccggagcagcaggagctgcaggagccacccgaggcgaagcgtggaagcagcagtcagaaggggaacggatctgtgtgcccacagctcctggagccccacaggagcacgtgaattgcctctgcttacgttcaggccctgtcctaaacccagccgtctagcacccagtgatcccatgcctttgggaatcccaggatgctgcccaacgggaaatttgtacattgggtgctatcaatgccacatcacagggaccagccatcacagagcaaagtgacctccacgtctgatgctggggtcatcaggacggacccatcatggctgtctttttgccccaccccctgccgtcagttcttcctttctccgtggctggcttcccgcacta

SEQ ID NO: 172471 - DNA, 1642 bp, Homo sapiens
  Payload ID: 13902
  Gene Symbol: P2RX5
  Gene Name: purinergic receptor P2X, ligand gated ion channel, 5
  ENST ID: ENST00000552276
  CDS Start-End: 92-1387
cgggcgccgggcgcgcagggaccgagggaccgagtgctccccatgagcgcacgtgggccgggcggtccgcaagcccggctgagagcgcgccatggggcaggcgggctgcaaggggctctgcctgtcgctgttcgactacaagaccgagaagtatgtcatcgccaagaacaagaaggtgggcctgctgtaccggctgctgcaggcctccatcctggcgtacctggtcgtatgggtgttcctgataaagaagggttaccaagacgtcgacacctccctgcagagtgctgtcatcaccaaagtcaagggcgtggccttcaccaacacctcggatcttgggcagcggatctgggatgtcgccgactacgtcattccagcccagggagagaacgtcttttttgtggtcaccaacctgattgtgacccccaaccagcggcagaacgtctgtgctgagaatgaaggcattcctgatggcgcgtgctccaaggacagcgactgccacgctggggaagcggttacagctggaaacggagtgaagaccggccgctgcctgcggagagagaacttggccaggggcacctgtgagatctttgcctggtgcccgttggagacaagctccaggccggaggagccattcctgaaggaggccgaagacttcaccattttcataaagaaccacatccgtttccccaaattcaacttctccaacaatgtgatggacgtcaaggacagatctttcctgaaatcatgccactttggccccaagaaccactactgccccatcttccgactgggctccgtgatccgctgggccgggagcgacttccaggatatagccctggagggtggcgtgataggaattaatattgaatggaactgtgatcttgataaagctgcctctgagtgccaccctcactattcttttagccgtctggacaataaactttcaaagtctgtctcctccgggtacaacttcagatttgccagatattaccgagacgcagccggggtggagttccgcaccctgatgaaagcctacgggatccgctttgacgtgatggtgaacggcaagggtgctttcttctgcgacctggtactcatctacctcatcaaaaagagagagttttaccgtgacaagaagtacgaggaagtgaggggcctagaagacagttcccaggaggccgaggacgaggcatcggggctggggctatctgagcagctcacatctgggccagggctgctggggatgccggagcagcaggagctgcaggagccacccgaggcgaagcgtggaagcagcagtcagaaggggaacggatctgtgtgcccacagctcctggagccccacaggctgaggactccctctgcttctcccttacaccaggaatgaacctttccttcccactcagaggaggttctgagaggactgaggtgggcaaaccactgaggatcttcagtgggggcagagaaagggctcactgagatggggggcaacgctatggcctcagcttctccttggcgtcgtgtgcatgtgttcctgaagccgaaacggaatttaacaggtctgggtcccagatccatttccatgactggccatgggctatctatgatctgtcaaaaggggacttggattcaagctctcaga

SEQ ID NO: 172472 - DNA, 1834 bp, Homo sapiens
  Payload ID: 13903
  Gene Symbol: P2RX6
  Gene Name: purinergic receptor P2X, ligand gated ion channel, 6
  Uniprot ID: O15547
  ENST ID: ENST00000401443
  CDS Start-End: 6-1253
gactcatgtgcccgcagctagcaggagctggcagcatgggctccccaggggctacgacaggctgggggcttctggattataagacggagaagtgggctctcctcgccaaaaaaggctaccaggagcgggacctggaaccccagttttccatcatcaccaaactcaaaggggtttccgtcactcagatcaaggagcttggaaaccggctgtgggatgtggccgacttcgtgaagccacctcagggagagaacgtgttcttcttggtgaccaacttccttgtgacgccagcccaagttcagggcagatgcccagagcacccgtccgtcccactggctaactgctgggtcgacgaggactgccccgaaggggagggaggcacacacagccacggtgtaaaaacaggccagtgtgtggtgttcaatgggacccacaggacctgtgagatctggagttggtgccccgtggagagtggcgttgtgccctcgaggcccctgctggcccaggcccagaacttcacactgttcatcaaaaacacagtcaccttcagcaagttcaacttctctaagtccaatgccttggagacctgggaccccacctattttaagcactgccgctatgaaccacaattcagcccctactgtcccgtgttccgcattggggacctcgtggccaaggctggagggaccttcgaggacctggcgttgctgggtggctctgtaggcatcagagttcactgggattgtgacctggacaccggggactctggctgctggcctcactactccttccagctgcaggagaagagctacaacttcaggacagccactcactggtgggagcaaccgggtgtggaggcccgcaccctgctcaagctctatggaatccgcttcgacatcctcgtcaccgggcaggcagggaagttcgggctcatccccacggccgtcacactgggcaccggggcagcttggctgggcgtggtcacctttttctgtgacctgctactgctgtatgtggatagagaagcccatttctactggaggacaaagtatgaggaggccaaggccccgaaagcaaccgccaactctgtgtggagggagctggcccttgcatcccaagcccgactggccgagtgcctcagacggagctcagcacctgcacccacggccactgctgctgggagtcagacacagacaccaggatggccctgtccaagttctgacacccacttgccaacccattccgggagcctgtagccgttccctgctggttgagagttgggggctgggaagggcggggccctgcctggggatctcaaggatgaggccccagcatggaggattgggggtagaattccacccttgaaccccagcagacagtccctcccctgactcccaccttggtagggtgctgcctcagggagccatagaagtcggctgtgttttgagacggcgacagaacctgacccgtggagactgggagagcccagcaggcacctgtattgcagggctccgactgcatgtggcaggggctcctgctgcgtctgggcctggaggtctctctcccagtgctctgtccccagtgttcctagcagaggtatgcttaccagctgtcagcacagaccctcctgctgcctgggtcctggccctcctcccccatctgcacccccatcataggtagagaccccaccctcccatcggtcctacatggggctgtgcagctggagccaaaaaggcaaggtagaaagaggagtgatgggggagggggattgtttcagcttctctggtgctgtgatgccccaggagagtcctaatctagggaatggggtggagtaggc

SEQ ID NO: 172473 - DNA, 576 bp, Homo sapiens
  Payload ID: 13903
  Gene Symbol: P2RX6
  Gene Name: purinergic receptor P2X, ligand gated ion channel, 6
  ENST ID: ENST00000452228
  CDS Start-End: 1-361
gcagctagcaggagctggcagcatgggctccccaggggctacgacaggctgggggcttctggattataagacggagaagtatgtgatgaccaggaactggcgggtgggcgccctgcagaggctgctgcagtttgggatcgtggtctatgtggtagggtgggctctcctcgccaaaaaaggctaccaggagcgggacctggaaccccagttttccatcatcaccaaactcaaaggggtttccgtcactcagatcaaggagcttggaaaccggctgtgggatgtggccgacttcgtgaagccacctcaggctgccggcttccggcctttccagtcaacacgagcccagccaggccaaccttgagacttgcctcctagggagagaacgtgttcttcttggtgaccaacttccttgtgacgccagcccaagttcagggcagatgcccagaggtgtaaaaacaggccagtgtgtggtgttcaatgggacccacaggacctgtgagatctggagttggtgccccgtggagagtggcgttgtgccctcgaggcccctgctggcccaggcccagaacttcacac

SEQ ID NO: 172474 - DNA, 2513 bp, Homo sapiens
  Payload ID: 13903
  Gene Symbol: P2RX6
  Gene Name: purinergic receptor P2X, ligand gated ion channel, 6
  ENST ID: ENST00000442475
  CDS Start-End: 23-265
gctgcagctgccatgctgactcatgtgcccgcagctagcaggagctggcagcatgggctccccaggggctacgacaggctgggggcttctggattataagacggagaagtgggctctcctcgccaaaaaaggctaccaggagcgggacctggaaccccagttttccatcatcaccaaactcaaaggggtttccgtcactcagatcaaggagcttggaaaccggctgtgggatgtggccgacttcgtgaagccacctcaggtgtaaaaacaggccagtgtgtggtgttcaatgggacccacaggacctgtgagatctggagttggtgccccgtggagagtggcgttgtgccctcgaggcccctgctggcccaggcccagaacttcacactgttcatcaaaaacacagtcaccttcagcaagttcaacttctctaagtccaatgccttggagacctgggaccccacctattttaagcactgccgctatgaaccacaattcagcccctactgtcccgtgttccgcattggggacctcgtggccaaggctggagggaccttcgaggacctggcgttgctgggtggctctgtaggcatcagagttcactgggattgtgacctggacaccggggactctggctgctggcctcactactccttccagctgcaggagaagagctacaacttcaggacagccactcactggtgggagcaaccgggtgtggaggcccgcaccctgctcaagctctatggaatccgcttcgacatcctcgtcaccgggcaggcagggaagttcgggctcatccccacggccgtcacactgggcaccggggcagcttggctgggcgtggtcacctttttctgtgacctgctactgctgtatgtggatagagaagcccatttctactggaggacaaagtatgaggaggccaaggccccgaaagcaaccgccaactctgtgtggagggagctggcccttgcatcccaagcccgactggccgagtgcctcagacggagctcagcacctgcacccacggccactgctgctgggagtcagacacagacaccaggatggccctgtccaagttctgacacccacttgccaacccattccgggagcctgtagccgttccctgctggttgagagttgggggctgggaagggcggggccctgcctggggatctcaaggatgaggccccagcatggaggattgggggtagaattccacccttgaaccccagcagacagtccctcccctgactcccaccttggtagggtgctgcctcagggagccatagaagtcggctgtgttttgagacggcgacagaacctgacccgtggagactgggagagcccagcaggcacctgtattgcagggctccgactgcatgtggcaggggctcctgctgcgtctgggcctggaggtctctctcccagtgctctgtccccagtgttcctagcagaggtatgcttaccagctgtcagcacagaccctcctgctgcctgggtcctggccctcctcccccatctgcacccccatcataggtagagaccccaccctcccatcggtcctacatggggctgtgcagctggagccaaaaaggcaaggtagaaagaggagtgatgggggagggggattgtttcagcttctctggtgctgtgatgccccaggagagtcctaatctagggaatggggtggagtaggcagataatccacctccctatcccccaggcaagggcggagcatgtgtcttgggcccacacctgcttagtttatgaggaccggctgctttccagtggtagcccttttgccatggaggtctgggagagagagcagagggcggcagggctaagttggtgatcattgggttcttcaggaccttctatatccctcctcggtaaccccccagcccaaccccttggaatctttcctccaggcttcctgagagccctgggggtgggaggctgtgggaggctgtacatctgaaattcacttcagtccaagtcatacctaggaagctgtctgggcagctgctcgagggaggccctggctctgatcccaggctggatggagtggctggaaggaatggttccaaacaacaccaccgagatctccctcaggctggccaggttttgcagctggaattctcctcttggtcccagggcggggcagggaattctaagtgtccaccccagggaggcaaggggctgctttccactgtgggtacctggtgatcagggcaagctgtggagggccaggggtggggctgagactgggctgacatctagaatcacctgccacctggagcctcagtaaaatgcctggggtccctgctgcctctcaatctccagagccatgtccatggggaggtgggctctgaagggcgaaggtgggagagcagggcccctgaggcctgggtatccaaggaggggcacgtgcacctgattctccttggggcccagaggaagctgatgtcatggctggacaaagtcacggagtaaagccagcaaagcca

SEQ ID NO: 172475 - DNA, 2150 bp, Homo sapiens
  Payload ID: 13903
  Gene Symbol: P2RX6
  Gene Name: purinergic receptor P2X, ligand gated ion channel, 6
  ENST ID: ENST00000432930
  CDS Start-End: 1-393
ctagcaggagctggcagcatgggctccccaggggctacgacaggctgggggcttctggattataagacggagaagtatgtgatgaccaggaactggcgggtgggcgccctgcagaggctgctgcagtttgggatcgtggtctatgtggtgggctctcctcgccaaaaaaggctaccaggagcgggacctggaaccccagttttccatcatcaccaaactcaaaggggtttccgtcactcagatcaaggagcttggaaaccggctgtgggatgtggccgacttcgtgaagccacctcagggagagaacgtgttcttcttggtgaccaacttccttgtgacgccagcccaagttcagggcagatgcccagagcacccgtccgtcccactggctaactgctgggtcgacgaggactgccccgaaggggagggaggcacacacagccacggtgtaaaaacaggccagtgtgtggtgttcaatgggacccacaggacctgtgagatctggagttggtgccccgtggagagtggcgttgtgccctcgaggcccctgctggcccaggcccagaacttcacactgttcatcaaaaacacagtcaccttcagcaagttcaacttctctaagtccaatgccttggagacctgggaccccacctattttaagcactgccgctatgaaccacaattcagcccctactgtcccgtgttccgcattggggacctcgtggccaaggctggagggaccttcgaggacctggcgttgctgggtggctctgtaggcatcagagttcactgggattgtgacctggacaccggggactctggctgctggcctcactactccttccagctgcaggagaagagctacaacttcaggacagccactcactggtgggagcaaccgggtgtggaggcccgcaccctgctcaagctctatggaatccgcttcgacatcctcgtcaccgggcaggcagggaagttcgggctcatccccacggccgtcacactgggcaccggggcagcttggctgggcgtggtcacctttttctgtgacctgctactgctgtatgtggatagagaagcccatttctactggaggacaaagtatgaggaggccaaggccccgaaagcaaccgccaactctgtgtggagggagctggcccttgcatcccaagcccgactggccgagtgcctcagacggagctcagcacctgcacccacggccactgctgctgggagtcagacacagacaccaggatggccctgtccaagttctgacacccacttgccaacccattccgggagcctgtagccgttccctgctggttgagagttgggggctgggaagggcggggccctgcctggggatctcaaggatgaggccccagcatggaggattgggggtagaattccacccttgaaccccagcagacagtccctcccctgactcccaccttggtagggtgctgcctcagggagccatagaagtcggctgtgttttgagacggcgacagaacctgacccgtggagactgggagagcccagcaggcacctgtattgcagggctccgactgcatgtggcaggggctcctgctgcgtctgggcctggaggtctctctcccagtgctctgtccccagtgttcctagcagaggaagctgtctgggcagctgctcgagggaggccctggctctgatcccaggctggatggagtggctggaaggaatggttccaaacaacaccaccgagatctccctcaggctggccaggttttgcagctggaattctcctcttggtcccagggcggggcagggaattctaagtgtccaccccagggaggcaaggggctgctttccactgtgggtacctggtgatcagggcaagctgtggagggccaggggtggggctgagactgggctgacatctagaatcacctgccacctggagcctcagtaaaatgcctggggtccctgctgcctctcaatctccagagccatgtccatggggaggtgggctctgaagggcgaaggtgggagagcagggcccctgaggcctgggtatccaaggaggggcacgtgcacctgattctccttggggcccagaggaagctgatgtcatggctggacaaagtcacggagtaaagccagcaaagcca

SEQ ID NO: 172476 - DNA, 2009 bp, Homo sapiens
  Payload ID: 13903
  Gene Symbol: P2RX6
  Gene Name: purinergic receptor P2X, ligand gated ion channel, 6
  ENST ID: ENST00000422210
  CDS Start-End: 1-306
gcaggagctggcagcatgggctccccaggggctacgacaggctgggggcttctggattataagacggagaagtatgtgatgaccaggaactggcgggtgggcgccctgcagaggctgctgcagtttgggatcgtggtctatgtggtagggtgggctctcctcgccaaaaaaggctaccaggagcgggacctggaaccccagttttccatcatcaccaaactcaaaggggtttccgtcactcagatcaaggagcttggaaaccggctgtgggatgtggccgacttcgtgaagccacctcaggtgtaaaaacaggccagtgtgtggtgttcaatgggacccacaggacctgtgagatctggagttggtgccccgtggagagtggcgttgtgccctcgaggcccctgctggcccaggcccagaacttcacactgttcatcaaaaacacagtcaccttcagcaagttcaacttctctaagtccaatgccttggagacctgggaccccacctattttaagcactgccgctatgaaccacaattcagcccctactgtcccgtgttccgcattggggacctcgtggccaaggctggagggaccttcgaggacctggcgttgctgggtggctctgtaggcatcagagttcactgggattgtgacctggacaccggggactctggctgctggcctcactactccttccagctgcaggagaagagctacaacttcaggacagccactcactggtgggagcaaccgggtgtggaggcccgcaccctgctcaagctctatggaatccgcttcgacatcctcgtcaccgggcaggcagggaagttcgggctcatccccacggccgtcacactgggcaccggggcagcttggctgggcgtggtcacctttttctgtgacctgctactgctgtatgtggatagagaagcccatttctactggaggacaaagtatgaggaggccaaggccccgaaagcaaccgccaactctgtgtggagggagctggcccttgcatcccaagcccgactggccgagtgcctcagacggagctcagcacctgcacccacggccactgctgctgggagtcagacacagacaccaggatggccctgtccaagttctgacacccacttgccaacccattccgggagcctgtagccgttccctgctggttgagagttgggggctgggaagggcggggccctgcctggggatctcaaggatgaggccccagcatggaggattgggggtagaattccacccttgaaccccagcagacagtccctcccctgactcccaccttggtagggtgctgcctcagggagccatagaagtcggctgtgttttgagacggcgacagaacctgacccgtggagactgggagagcccagcaggcacctgtattgcagggctccgactgcatgtggcaggggctcctgctgcgtctgggcctggaggtctctctcccagtgctctgtccccagtgttcctagcagaggaagctgtctgggcagctgctcgagggaggccctggctctgatcccaggctggatggagtggctggaaggaatggttccaaacaacaccaccgagatctccctcaggctggccaggttttgcagctggaattctcctcttggtcccagggcggggcagggaattctaagtgtccaccccagggaggcaaggggctgctttccactgtgggtacctggtgatcagggcaagctgtggagggccaggggtggggctgagactgggctgacatctagaatcacctgccacctggagcctcagtaaaatgcctggggtccctgctgcctctcaatctccagagccatgtccatggggaggtgggctctgaagggcgaaggtgggagagcagggcccctgaggcctgggtatccaaggaggggcacgtgcacctgattctccttggggcccagaggaagctgatgtcatggctggacaaagtcacggagtaaagccagcaaagccaccctc

SEQ ID NO: 172477 - DNA, 3687 bp, Homo sapiens
  Payload ID: 13903
  Gene Symbol: P2RX6
  Gene Name: purinergic receptor P2X, ligand gated ion channel, 6
  Uniprot ID: O15547
  ENST ID: ENST00000413302
  CDS Start-End: 149-1474
ctgggattaggggttgagggctgggtgttggaggctggatctggatcctgctttagtggaagtgtccctttaacagcaactggcctggcctggctcgggccctgctttgcctcctgttcagctgcggctgcagctgccatgctgactcatgtgcccgcagctagcaggagctggcagcatgggctccccaggggctacgacaggctgggggcttctggattataagacggagaagtatgtgatgaccaggaactggcgggtgggcgccctgcagaggctgctgcagtttgggatcgtggtctatgtggtagggtgggctctcctcgccaaaaaaggctaccaggagcgggacctggaaccccagttttccatcatcaccaaactcaaaggggtttccgtcactcagatcaaggagcttggaaaccggctgtgggatgtggccgacttcgtgaagccacctcagggagagaacgtgttcttcttggtgaccaacttccttgtgacgccagcccaagttcagggcagatgcccagagcacccgtccgtcccactggctaactgctgggtcgacgaggactgccccgaaggggagggaggcacacacagccacggtgtaaaaacaggccagtgtgtggtgttcaatgggacccacaggacctgtgagatctggagttggtgccccgtggagagtggcgttgtgccctcgaggcccctgctggcccaggcccagaacttcacactgttcatcaaaaacacagtcaccttcagcaagttcaacttctctaagtccaatgccttggagacctgggaccccacctattttaagcactgccgctatgaaccacaattcagcccctactgtcccgtgttccgcattggggacctcgtggccaaggctggagggaccttcgaggacctggcgttgctgggtggctctgtaggcatcagagttcactgggattgtgacctggacaccggggactctggctgctggcctcactactccttccagctgcaggagaagagctacaacttcaggacagccactcactggtgggagcaaccgggtgtggaggcccgcaccctgctcaagctctatggaatccgcttcgacatcctcgtcaccgggcaggcagggaagttcgggctcatccccacggccgtcacactgggcaccggggcagcttggctgggcgtggtcacctttttctgtgacctgctactgctgtatgtggatagagaagcccatttctactggaggacaaagtatgaggaggccaaggccccgaaagcaaccgccaactctgtgtggagggagctggcccttgcatcccaagcccgactggccgagtgcctcagacggagctcagcacctgcacccacggccactgctgctgggagtcagacacagacaccaggatggccctgtccaagttctgacacccacttgccaacccattccgggagcctgtagccgttccctgctggttgagagttgggggctgggaagggcggggccctgcctggggatctcaaggatgaggccccagcatggaggattgggggtagaattccacccttgaaccccagcagacagtccctcccctgactcccaccttggtagggtgctgcctcagggagccatagaagtcggctgtgttttgagacggcgacagaacctgacccgtggagactgggagagcccagcaggcacctgtattgcagggctccgactgcatgtggcaggggctcctgctgcgtctgggcctggaggtctctctcccagtgctctgtccccagtgttcctagcagaggtatgcttaccagctgtcagcacagaccctcctgctgcctgggtcctggccctcctcccccatctgcacccccatcataggtagagaccccaccctcccatcggtcctacatggggctgtgcagctggagccaaaaaggcaaggtagaaagaggagtgatgggggagggggattgtttcagcttctctggtgctgtgatgccccaggagagtcctaatctagggaatggggtggagtaggcagataatccacctccctatcccccaggcaagggcggagcatgtgtcttgggcccacacctgcttagtttatgaggaccggctgctttccagtggtagcccttttgccatggaggtctgggagagagagcagagggcggcagggctaagttggtgatcattgggttcttcaggaccttctatatccctcctcggtaaccccccagcccaaccccttggaatctttcctccaggcttcctgagagccctgggggtgggaggctgtgggaggctgtacatctgaaattcacttcagtccaagtcatacctaggaagctgtctgggcagctgctcgagggaggccctggctctgatcccaggctggatggagtggctggaaggaatggttccaaacaacaccaccgagatctccctcaggctggccaggttttgcagctggaattctcctcttggtcccagggcggggcagggaattctaagtgtccaccccagggaggcaaggggctgctttccactgtgggtacctggtgatcagggcaagctgtggagggccaggggtggggctgagactgggctgacatctagaatcacctgccacctggagcctcagtaaaatgcctggggtccctgctgcctctcaatctccagagccatgtccatggggaggtgggctctgaagggcgaaggtgggagagcagggcccctgaggcctgggtatccaaggaggggcacgtgcacctgattctccttggggcccagaggaagctgatgtcatggctggacaaagtcacggagtaaagccagcaaagccaccctcttcctgtgtagtccttacaggcatgactggaaagttggggggcatctatggtagacatggcacagccatgaagagaccagtggggtggtgcagggtggacttggggaccctacccctgaagactgaggccctgcagctaccaggtgggctagaaggtaactggaacaggcctgggcacttgtgcacccatgtaggagcatgagggccacactcttttcacctcaaagcccttgaagagtgggcaaagacagcaagagagctgcagcctgggcccgagctcagaaacagctgtcgcctcagtctgcgcacaggcatgcaccccagggtagtgcctgcagggatgcatgtgtccccgtgggggtgcctgtgccaggcaggcctcaggtgcatgccatgctcagaaccctgctgccctttctaggcagcctccttggggcccaagctctgctccctggatctgccacctagcagacgtggggagcctgaccccatgcctgtcatggaaccctccttgcctggtgtgtgtggctcccctcttcactgggcacctggatccaggcccacctgtgtccctgactcagggtggtcccaggactggcacctactctttagagagccccagcatctttgatgtggattggagacaattgcctggttccctggggcaggtgaagacttggtgccacaaagaatgccacagtggatacgccagcaggccacatggctggccaagcaattattattatggatcccttgggctgtgggccttcccatccaccccaccacaactgcccaggtagctggagctgatcataaa

SEQ ID NO: 172478 - DNA, 3003 bp, Homo sapiens
  Payload ID: 13904
  Gene Symbol: P2RX7
  Gene Name: purinergic receptor P2X, ligand gated ion channel, 7
  ENST ID: ENST00000261826
  CDS Start-End: 42-491
gagctctggtccagctccgcgcagggagggaggctgtcaccatgccggcctgctgcagctgcagtgatgttttccagtatgagacgaacaaagtcactcggatccagagcatgaattatggcaccattaagtggttcttccacgtgatcatcttttcctacgtttgctttgctctggtgagtgacaagctgtaccagcggaaagagcctgtcatcagttctgtgcacaccaaggtgaaggggatagcagaggtgaaagaggagatcgtggagaatggagtgaagaagttggtgcacagtgtctttgacaccgcagactacaccttccctttgcaggggaactctttcttcgtgatgacaaactttctcaaaacagaaggccaagagcagcggttgtgtcccgagtatcccacccgcaggacgctctgttcctctgaccgaggttgtaaaaagggatggatggacccgcagagcaaaggcctgctctcttgaacagtgccgaaaacttcactgtgctcatcaagaacaatatcgacttccccggccacaactacaccacgagaaacatcctgccaggtttaaacatcacttgtaccttccacaagactcagaatccacagtgtcccattttccgactaggagacatcttccgagaaacaggcgataatttttcagatgtggcaattcagggcggaataatgggcattgagatctactgggactgcaacctagaccgttggttccatcactgccgtcccaaatacagtttccgtcgccttgacgacaagaccaccaacgtgtccttgtaccctggctacaacttcagatacgccaagtactacaaggaaaacaatgttgagaaacggactctgataaaagtcttcgggatccgttttgacatcctggtttttggcaccggaggaaaatttgacattatccagctggttgtgtacatcggctcaaccctctcctacttcggtctggccgctgtgttcatcgacttcctcatcgacacttactccagtaactgctgtcgctcccatatttatccctggtgcaagtgctgtcagccctgtgtggtcaacgaatactactacaggaagaagtgcgagtccattgtggagccaaagccgacattaaagtatgtgtcctttgtggatgaatcccacattaggatggtgaaccagcagctactagggagaagtctgcaagatgtcaagggccaagaagtcccaagacctgcgatggacttcacagatttgtccaggctgcccctggccctccatgacacacccccgattcctggacaaccagaggagatacagctgcttagaaaggaggcgactcctagatccagggatagccccgtctggtgccagtgtggaagctgcctcccatctcaactccctgagagccacaggtgcctggaggagctgtgctgccggaaaaagccgggggcctgcatcaccacctcagagctgttcaggaagctggtcctgtccagacacgtcctgcagttcctcctgctctaccaggagcccttgctggcgctggatgtggattccaccaacagccggctgcggcactgtgcctacaggtgctacgccacctggcgcttcggctcccaggacatggctgactttgccatcctgcccagctgctgccgctggaggatccggaaagagtttccgaagagtgaagggcagtacagtggcttcaagagtccttactgaagccaggcaccgtggctcacgtctgtaatcccagcgctttgggaggccgaggcaggcagatcacctgaggtcgggagttggagacccgcctggctaacaaggcgaaatcctgtctgtactaaaaatacaaaaatcagccagacatggtggcatgcacctgcaatcccagctactcgggaggctgaggcacaagaatcacttgaacccgggaggcagaggttgtagtgagcccagattgtgccactgctctccagcctgggaggcacagcaaactgtcccccaaaaaaaaaaaagagtccttaccaatagcaggggctgcagtagccatgttaacatgacatttaccagcaacttgaacttcacctgcaaagctctgtggccacattttcagccaaagggaaatatgctttcatcttctgttgctctctgtgtctgagagcaaagtgacctggttaaacaaaccagaatccctctacatggactcagagaaaagagattgagatgtaagtctcaactctgtccccaggaagttgtgtgaccctaggcctctcacctctgtgcctctgtctccttgttgcccaactactatctcagagatattgtgaggacaaattgagacagtgcacatgaactgtcttttaatgtgtaaagatctacatgaatgcaaaacatttcattatgaggtcagactaggataatgtccaactaaaaacaaacccttttcatcctggctggagaatgtggagaactaaaggtggccacaaattctttgacactcaagtcccccaagacctaagggttttatctcctccccttgaatatgggtggctctgattgctttatccaaaagtggaagtgacattgtgtcagtttcagatcctgatcttaagaggctgacagcttctacttgctgtcccttggaactcttgctatcggggaagccagacgccatttaaaagtctgcctatcctggccaggtgtggtggctcacacctgtaatcccagcactttgggagaccaaggcgggcggatcacttaaagtcaggagtccaagaccagactcgccaacatggtgaaaccgtatctctaataaaaatacaaaaattagctgggcatggtgcgggcacctgtagtcctagctatcaagaggctgagacaggagaaacacttgaacctgggaggtggaggttgcattgagctgagatcgtgccactgcactccaggctgggtgacagagcgagactccatctcaaaaaaaaaaaaaagaaaaa

SEQ ID NO: 172479 - DNA, 5161 bp, Homo sapiens
  Payload ID: 13904
  Gene Symbol: P2RX7
  Gene Name: purinergic receptor P2X, ligand gated ion channel, 7
  Uniprot ID: Q99572
  ENST ID: ENST00000328963
  CDS Start-End: 144-1931
gtcattggaggagcttgaagttaaagactcctgctaaaaaccagtacgtttcattttgcagttactgggagggggcttgctgtggccctgtcaggaagagtagagctctggtccagctccgcgcagggagggaggctgtcaccatgccggcctgctgcagctgcagtgatgttttccagtatgagacgaacaaagtcactcggatccagagcatgaattatggcaccattaagtggttcttccacgtgatcatcttttcctacgtttgctttgctctggtgagtgacaagctgtaccagcggaaagagcctgtcatcagttctgtgcacaccaaggtgaaggggatagcagaggtgaaagaggagatcgtggagaatggagtgaagaagttggtgcacagtgtctttgacaccgcagactacaccttccctttgcaggggaactctttcttcgtgatgacaaactttctcaaaacagaaggccaagagcagcggttgtgtcccgagtatcccacccgcaggacgctctgttcctctgaccgaggttgtaaaaagggatggatggacccgcagagcaaaggaattcagaccggaaggtgtgtagtgtatgaagggaaccagaagacctgtgaagtctctgcctggtgccccatcgaggcagtggaagaggccccccggcctgctctcttgaacagtgccgaaaacttcactgtgctcatcaagaacaatatcgacttccccggccacaactacaccacgagaaacatcctgccaggtttaaacatcacttgtaccttccacaagactcagaatccacagtgtcccattttccgactaggagacatcttccgagaaacaggcgataatttttcagatgtggcaattcagggcggaataatgggcattgagatctactgggactgcaacctagaccgttggttccatcactgccgtcccaaatacagtttccgtcgccttgacgacaagaccaccaacgtgtccttgtaccctggctacaacttcagatacgccaagtactacaaggaaaacaatgttgagaaacggactctgataaaagtcttcgggatccgttttgacatcctggtttttggcaccggaggaaaatttgacattatccagctggttgtgtacatcggctcaaccctctcctacttcggtctggccgctgtgttcatcgacttcctcatcgacacttactccagtaactgctgtcgctcccatatttatccctggtgcaagtgctgtcagccctgtgtggtcaacgaatactactacaggaagaagtgcgagtccattgtggagccaaagccgacattaaagtatgtgtcctttgtggatgaatcccacattaggatggtgaaccagcagctactagggagaagtctgcaagatgtcaagggccaagaagtcccaagacctgcgatggacttcacagatttgtccaggctgcccctggccctccatgacacacccccgattcctggacaaccagaggagatacagctgcttagaaaggaggcgactcctagatccagggatagccccgtctggtgccagtgtggaagctgcctcccatctcaactccctgagagccacaggtgcctggaggagctgtgctgccggaaaaagccgggggcctgcatcaccacctcagagctgttcaggaagctggtcctgtccagacacgtcctgcagttcctcctgctctaccaggagcccttgctggcgctggatgtggattccaccaacagccggctgcggcactgtgcctacaggtgctacgccacctggcgcttcggctcccaggacatggctgactttgccatcctgcccagctgctgccgctggaggatccggaaagagtttccgaagagtgaagggcagtacagtggcttcaagagtccttactgaagccaggcaccgtggctcacgtctgtaatcccagcgctttgggaggccgaggcaggcagatcacctgaggtcgggagttggagacccgcctggctaacaaggcgaaatcctgtctgtactaaaaatacaaaaatcagccagacatggtggcatgcacctgcaatcccagctactcgggaggctgaggcacaagaatcacttgaacccgggaggcagaggttgtagtgagcccagattgtgccactgctctccagcctgggaggcacagcaaactgtcccccaaaaaaaaaaaagagtccttaccaatagcaggggctgcagtagccatgttaacatgacatttaccagcaacttgaacttcacctgcaaagctctgtggccacattttcagccaaagggaaatatgctttcatcttctgttgctctctgtgtctgagagcaaagtgacctggttaaacaaaccagaatccctctacatggactcagagaaaagagattgagatgtaagtctcaactctgtccccaggaagttgtgtgaccctaggcctctcacctctgtgcctctgtctccttgttgcccaactactatctcagagatattgtgaggacaaattgagacagtgcacatgaactgtcttttaatgtgtaaagatctacatgaatgcaaaacatttcattatgaggtcagactaggataatgtccaactaaaaacaaacccttttcatcctggctggagaatgtggagaactaaaggtggccacaaattctttgacactcaagtcccccaagacctaagggttttatctcctccccttgaatatgggtggctctgattgctttatccaaaagtggaagtgacattgtgtcagtttcagatcctgatcttaagaggctgacagcttctacttgctgtcccttggaactcttgctatcggggaagccagacgccatttaaaagtctgcctatcctggccaggtgtggtggctcacacctgtaatcccagcactttgggagaccaaggcgggcggatcacttaaagtcaggagtccaagaccagactcgccaacatggtgaaaccgtatctctaataaaaatacaaaaattagctgggcatggtgcgggcacctgtagtcctagctatcaagaggctgagacaggagaaacacttgaacctgggaggtggaggttgcattgagctgagatcgtgccactgcactccaggctgggtgacagagcgagactccatctcaaaaaaaaaaaaaagaaaaaaaaaatgtctgcctatcctgagactgccctgctgtgaggaagcccaagcagtcacgtggacagtgcctgaccagccccagctttcaagccatccaagcccagtcaccaaacatgagagagaagaagccttcaggtgattctggactccactaacatatgactgataccgcatgatacatcccaagtgagaactgccccataaatccagaaaaccacattgctatcttaagtccctaagtttggggcttatttgttccacagcaacaggtaactggaacagagggcaagcctgatgaatgggcacacagactcagcccataccttccctggttctaatgttctcagggagcccggaccaaccctgggagcctcaggaacttaggtttccactggacagttctagaagggctatagaccaaatcaggtaactcaccagaccagccttggaatctatcaaatctaactgctgagctacccaatgcattccgatcctcatcacaattctttgactgaaggccgggcgtggtggctcacgcctgtaatcccagcactttgggaggctgaggcgggtggatcacctgaggtcaggagttcgagaccagcctggccaacatggtgagaccctgtctctactaagaatacaaaaattaggtgggtgtggcggtgggcgcctgtaatcccagctacttgggaggctgaggcaggagaatctcttgaacctggaaggtggaggttgcaataagccgagatagtgccactgcactccagcctagataacagagcaagactctgtctcaaaaaacaacaacaacaacaacaaaacaattctatgactgaaagtgactaaaaagctggctttatgccattaacactctgtactttgcagccaatcagaactgacgcagtctgggtgctagctgcttcaaaagcaacccacaccacacttttaccatttccatacatcaactgctgagaatatgaaaatgcacagtgacaggttttaggatcctgcttcaggatttccttttcctggtttggtcactagagttggctatttatctgtttctaaacaatagctattttatcgaatagtttagagaccactattaaatattgtgactgatgaaggatctgtgaatttttttatatatgttctaagagttaccattttgataccttttaaaaaccagcagctttctactatattcatgtaagacagcatgaataaaaccattttttgatacagggttttatttggctttaaactcaggaaccaagttaattatgccagattgaactttgatttttactaccttttcaaagatattttaaaaagtggattactacatatgatttctttggagcttacatttctttacttcacgaattctatgtcactgttacaagtttccattctgatggcttctgggcctttgtacctttgtttttggtgccttattcctagtatgtttctatcaccttaatgaggccgcagatggagtcagaatgtgaaattacaaataatcactggatccatctactgttttccatcaccttccccactgatgctctgggcgagagagtgatgtgtcacttcaactgtgtgtaatatgtcagacacgtcctacaataacaggcgtcatatttgtattatttttagtttactgtagaaaataatgtcaccgccaaaggtgatgagagtcacgttttgtaggatctgttttcttatacttaaagacagacttctgctacggtaattgccagtattcatggcttcctttctgtgtcagaagagaagggatctgctttctcttggctgatttcacatagcattggtaatagacatgcatttctctttctaaaggggagtaactttttaaacccttcctgattttagcctggcaatgtaagtgtccttaatgtgactgttttgataattaaaaaaaggtatataattta

SEQ ID NO: 172480 - DNA, 1799 bp, Homo sapiens
  Payload ID: 13904
  Gene Symbol: P2RX7
  Gene Name: purinergic receptor P2X, ligand gated ion channel, 7
  Uniprot ID: Q99572
  ENST ID: ENST00000541716
  CDS Start-End: 1-387
atgccggcctgctgcagctgcagtgatgttttccagtatgagacgaacaaagtcactcggatccagagcatgaattatggcaccattaagtggttcttccacgtgatcatcttttcctacgtttgctttgctctggtgagtgacaagctgtaccagcggaaagagcctgtcatcagttctgtgcacaccaaggtgaaggggatagcagaggtgaaagaggagatcgtggagaatggagtgaagaagttggtgcacagtgtctttgacaccgcagactacaccttccctttgcaggggaactctttcttcgtgatgacaaactttctcaaaacagaaggccaagagcagcggttgtgtcccgaggaattcagaccggaaggtgtgtagtgtatgaagggaaccagaagacctgtgaagtctctgcctggtgccccatcgaggcagtggaagaggccccccggcctgctctcttgaacagtgccgaaaacttcactgtgctcatcaagaacaatatcgacttccccggccacaactacaccacgagaaacatcctgccaggtttaaacatcacttgtaccttccacaagactcagaatccacagtgtcccattttccgactaggagacatcttccgagaaacaggcgataatttttcagatgtggcaattcagggcggaataatgggcattgagatctactgggactgcaacctagaccgttggttccatcactgccgtcccaaatacagtttccgtcgccttgacgacaagaccaccaacgtgtccttgtaccctggctacaacttcagatacgccaagtactacaaggaaaacaatgttgagaaacggactctgataaaagtcttcgggatccgttttgacatcctggtttttggcaccggaggaaaatttgacattatccagctggttgtgtacatcggctcaaccctctcctacttcggtctggtaagagattctcttttccatgctttaggaaaatggtttggagaaggaagtgactaacgcagcgcttgtctgcattctccccaggccgctgtgttcatcgacttcctcatcgacacttactccagtaactgctgtcgctcccatatttatccctggtgcaagtgctgtcagccctgtgtggtcaacgaatactactacaggaagaagtgcgagtccattgtggagccaaagccgacattaaagtatgtgtcctttgtggatgaatcccacattaggatggtgaaccagcagctactagggagaagtctgcaagatgtcaagggccaagaagtcccaagacctgcgatggacttcacagatttgtccaggctgcccctggccctccatgacacacccccgattcctggacaaccagaggagatacagctgcttagaaaggaggcgactcctagatccagggatagccccgtctggtgccagtgtggaagctgcctcccatctcaactccctgagagccacaggtgcctggaggagctgtgctgccggaaaaagccgggggcctgcatcaccacctcagagctgttcaggaagctggtcctgtccagacacgtcctgcagttcctcctgctctaccaggagcccttgctggcgctggatgtggattccaccaacagccggctgcggcactgtgcctacaggtgctacgccacctggcgcttcggctcccaggacatggctgactttgccatcctgcccagctgctgccgctggaggatccggaaagagtttccgaagagtgaagggcagtacagtggcttcaagagtccttactga

SEQ ID NO: 172481 - DNA, 2134 bp, Homo sapiens
  Payload ID: 13904
  Gene Symbol: P2RX7
  Gene Name: purinergic receptor P2X, ligand gated ion channel, 7
  ENST ID: ENST00000537312
  CDS Start-End: 153-296
aactctgcagtcattggaggagcttgaagttaaagactcctgctaaaaaccagtacgtttcattttgcagttactgggagggggcttgctgtggccctgtcaggaagagtagagctctggtccagctccgcgcagggagggaggctgtcaccatgccggcctgctgcagctgcagtgatgttttccagtatgagacgaacaaagtcactcggatccagagcatgaattatggcaccattaagtggttcttccacgtgatcatcttttcctacgtttggggaactctttcttcgtgatgacaaactttctcaaaacagaaggccaagagcagcggttgtgtcccgagtatcccacccgcaggacgctctgttcctctgaccgaggttgtaaaaagggatggatggacccgcagagcaaaggaattcagaccggaaggtgtgtagtgtatgaagggaaccagaagacctgtgaagtctctgcctggtgccccatcgaggcagtggaagaggccccccggcctgctctcttgaacagtgccgaaaacttcactgtgctcatcaagaacaatatcgacttccccggccacaactacaccacgagaaacatcctgccaggtttaaacatcacttgtaccttccacaagactcagaatccacagtgtcccattttccgactaggagacatcttccgagaaacaggcgataatttttcagatgtggcaattcagggcggaataatgggcattgagatctactgggactgcaacctagaccgttggttccatcactgccgtcccaaatacagtttccgtcgccttgacgacaagaccaccaacgtgtccttgtaccctggctacaacttcagatacgccaagtactacaaggaaaacaatgttgagaaacggactctgataaaagtcttcgggatccgttttgacatcctggtttttggcaccggaggaaaatttgacattatccagctggttgtgtacatcggctcaaccctctcctacttcggtctggtaagagattctcttttccatgctttaggaaaatggtttggagaaggaagtgactaacgcagcgcttgtctgcattctccccaggccgctgtgttcatcgacttcctcatcgacacttactccagtaactgctgtcgctcccatatttatccctggtgcaagtgctgtcagccctgtgtggtcaacgaatactactacaggaagaagtgcgagtccattgtggagccaaagccgacattaaagtatgtgtcctttgtggatgaatcccacattaggatggtgaaccagcagctactagggagaagtctgcaagatgtcaagggccaagaagtcccaagacctgcgatggacttcacagatttgtccaggctgcccctggccctccatgacacacccccgattcctggacaaccagaggagatacagctgcttagaaaggaggcgactcctagatccagggatagccccgtctggtgccagtgtggaagctgcctcccatctcaactccctgagagccacaggtgcctggaggagctgtgctgccggaaaaagccgggggcctgcatcaccacctcagagctgttcaggaagctggtcctgtccagacacgtcctgcagttcctcctgctctaccaggagcccttgctggcgctggatgtggattccaccaacagccggctgcggcactgtgcctacaggtgctacgccacctggcgcttcggctcccaggacatggctgactttgccatcctgcccagctgctgccgctggaggatccggaaagagtttccgaagagtgaagggcagtacagtggcttcaagagtccttactgaagccaggcaccgtggctcacgtctgtaatcccagcgctttgggaggccgaggcaggcagatcacctgaggtcgggagttggagacccgcctggctaacaaggcgaaatcctgtctgtactaaaaatacaaaaatcagccagacatggtggcatgcacctgcaatcccagctactcgggaggctgaggcacaagaatcacttgaacccgggaggcagaggttgtagtgagcccagattgtgccactgctctccagcctgggaggcacagcaaactgtccc

SEQ ID NO: 172482 - DNA, 1927 bp, Homo sapiens
  Payload ID: 13904
  Gene Symbol: P2RX7
  Gene Name: purinergic receptor P2X, ligand gated ion channel, 7
  ENST ID: ENST00000538011
  CDS Start-End: 1-384
atgccggcctgctgcagctgcagtgatgttttccagtatgagacgaacaaagtcactcggatccagagcatgaattatggcaccattaagtggttcttccacgtgatcatcttttcctacgtttgctttgctctggtgagtgacaagctgtaccagcggaaagagcctgtcatcagttctgtgcacaccaaggtgaaggggatagcagaggtgaaagaggagatcgtggagaatggagtgaagaagttggtgcacagtgtctttgacaccgcagactacaccttccctttgcagctttttagacgcacagccaccaagccagcaaggtctgccgagattcagaaggacagagaactttctaccaaagagcaccagcccttctagattgtgtagcatttcatcaacaaaaatgactccaggagaccattcttgggggaactctttcttcgtgatgacaaactttctcaaaacagaaggccaagagcagcggttgtgtcccgagtatcccacccgcaggacgctctgttcctctgaccgaggttgtaaaaagggatggatggacccgcagagcaaaggaattcagaccggaaggtgtgtagtgtatgaagggaaccagaagacctgtgaagtctctgcctggtgccccatcgaggcagtggaagaggccccccggcctgctctcttgaacagtgccgaaaacttcactgtgctcatcaagaacaatatcgacttccccggccacaactacaccacgagaaacatcctgccaggtttaaacatcacttgtaccttccacaagactcagaatccacagtgtcccattttccgactaggagacatcttccgagaaacaggcgataatttttcagatgtggcaattcagggcggaataatgggcattgagatctactgggactgcaacctagaccgttggttccatcactgccgtcccaaatacagtttccgtcgccttgacgacaagaccaccaacgtgtccttgtaccctggctacaacttcagatacgccaagtactacaaggaaaacaatgttgagaaacggactctgataaaagtcttcgggatccgttttgacatcctggtttttggcaccggaggaaaatttgacattatccagctggttgtgtacatcggctcaaccctctcctacttcggtctggccgctgtgttcatcgacttcctcatcgacacttactccagtaactgctgtcgctcccatatttatccctggtgcaagtgctgtcagccctgtgtggtcaacgaatactactacaggaagaagtgcgagtccattgtggagccaaagccgacattaaagtatgtgtcctttgtggatgaatcccacattaggatggtgaaccagcagctactagggagaagtctgcaagatgtcaagggccaagaagtcccaagacctgcgatggacttcacagatttgtccaggctgcccctggccctccatgacacacccccgattcctggacaaccagaggagatacagctgcttagaaaggaggcgactcctagatccagggatagccccgtctggtgccagtgtggaagctgcctcccatctcaactccctgagagccacaggtgcctggaggagctgtgctgccggaaaaagccgggggcctgcatcaccacctcagagctgttcaggaagctggtcctgtccagacacgtcctgcagttcctcctgctctaccaggagcccttgctggcgctggatgtggattccaccaacagccggctgcggcactgtgcctacaggtgctacgccacctggcgcttcggctcccaggacatggctgactttgccatcctgcccagctgctgccgctggaggatccggaaagagtttccgaagagtgaagggcagtacagtggcttcaagagtccttactga

SEQ ID NO: 172483 - DNA, 546 bp, Homo sapiens
  Payload ID: 13904
  Gene Symbol: P2RX7
  Gene Name: purinergic receptor P2X, ligand gated ion channel, 7
  ENST ID: ENST00000535928
  CDS Start-End: 120-263
agactcctgctaaaaaccagtacgtttcattttgcagttactgggagggggcttgctgtggccctgtcaggaagagtagagctctggtccagctccgcgcagggagggaggctgtcaccatgccggcctgctgcagctgcagtgatgttttccagtatgagacgaacaaagtcactcggatccagagcatgaattatggcaccattaagtggttcttccacgtgatcatcttttcctacgtttggggaactctttcttcgtgatgacaaactttctcaaaacagaaggccaagagcagcggttgtgtcccgagtatcccacccgcaggacgctctgttcctctgaccgaggttgtaaaaagggatggatggacccgcagagcaaaggatgggcttgatggaagctgaagctgcgtgggttggaaagcctggtcaaagcctagtctctcgcccgggttgagttaatgatgtccctcctggagaacgtcctctccgcagttctttcacatctgtggttctacgatgctttgacccctataggaattca

SEQ ID NO: 172484 - DNA, 1578 bp, Homo sapiens
  Payload ID: 13904
  Gene Symbol: P2RX7
  Gene Name: purinergic receptor P2X, ligand gated ion channel, 7
  Uniprot ID: Q99572
  ENST ID: ENST00000541022
  CDS Start-End: 1-387
atgccggcctgctgcagctgcagtgatgttttccagtatgagacgaacaaagtcactcggatccagagcatgaattatggcaccattaagtggttcttccacgtgatcatcttttcctacgtttgctttgctctggtgagtgacaagctgtaccagcggaaagagcctgtcatcagttctgtgcacaccaaggtgaaggggatagcagaggtgaaagaggagatcgtggagaatggagtgaagaagttggtgcacagtgtctttgacaccgcagactacaccttccctttgcaggggaactctttcttcgtgatgacaaactttctcaaaacagaaggccaagagcagcggttgtgtcccgaggaattcagaccggaaggtgtgtagtgtatgaagggaaccagaagacctgtgaagtctctgcctggtgccccatcgaggcagtggaagaggccccccggcctgctctcttgaacagtgccgaaaacttcactgtgctcatcaagaacaatatcgacttccccggccacaactacaccacgagaaacatcctgccaggtttaaacatcacttgtaccttccacaagactcagaatccacagtgtcccattttccgactaggagacatcttccgagaaacaggcgataatttttcagatgtggcaattcagatacgccaagtactacaaggaaaacaatgttgagaaacggactctgataaaagtcttcgggatccgttttgacatcctggtttttggcaccggaggaaaatttgacattatccagctggttgtgtacatcggctcaaccctctcctacttcggtctggccgctgtgttcatcgacttcctcatcgacacttactccagtaactgctgtcgctcccatatttatccctggtgcaagtgctgtcagccctgtgtggtcaacgaatactactacaggaagaagtgcgagtccattgtggagccaaagccgacattaaagtatgtgtcctttgtggatgaatcccacattaggatggtgaaccagcagctactagggagaagtctgcaagatgtcaagggccaagaagtcccaagacctgcgatggacttcacagatttgtccaggctgcccctggccctccatgacacacccccgattcctggacaaccagaggagatacagctgcttagaaaggaggcgactcctagatccagggatagccccgtctggtgccagtgtggaagctgcctcccatctcaactccctgagagccacaggtgcctggaggagctgtgctgccggaaaaagccgggggcctgcatcaccacctcagagctgttcaggaagctggtcctgtccagacacgtcctgcagttcctcctgctctaccaggagcccttgctggcgctggatgtggattccaccaacagccggctgcggcactgtgcctacaggtgctacgccacctggcgcttcggctcccaggacatggctgactttgccatcctgcccagctgctgccgctggaggatccggaaagagtttccgaagagtgaagggcagtacagtggcttcaagagtccttactga

SEQ ID NO: 172485 - DNA, 1605 bp, Homo sapiens
  Payload ID: 13904
  Gene Symbol: P2RX7
  Gene Name: purinergic receptor P2X, ligand gated ion channel, 7
  Uniprot ID: Q99572
  ENST ID: ENST00000535600
  CDS Start-End: 1-828
atgccggcctgctgcagctgcagtgatgttttccagtatgagacgaacaaagtcactcggatccagagcatgaattatggcaccattaagtggttcttccacgtgatcatcttttcctacgtttgctttgctctggtgagtgacaagctgtaccagcggaaagagcctgtcatcagttctgtgcacaccaaggtgaaggggatagcagaggtgaaagaggagatcgtggagaatggagtgaagaagttggtgcacagtgtctttgacaccgcagactacaccttccctttgcaggggaactctttcttcgtgatgacaaactttctcaaaacagaaggccaagagcagcggttgtgtcccgagtatcccacccgcaggacgctctgttcctctgaccgaggttgtaaaaagggatggatggacccgcagagcaaaggaattcagaccggaaggtgtgtagtgtatgaagggaaccagaagacctgtgaagtctctgcctggtgccccatcgaggcagtggaagaggccccccggcctgctctcttgaacagtgccgaaaacttcactgtgctcatcaagaacaatatcgacttccccggccacaactacaccacatacgccaagtactacaaggaaaacaatgttgagaaacggactctgataaaagtcttcgggatccgttttgacatcctggtttttggcaccggaggaaaatttgacattatccagctggttgtgtacatcggctcaaccctctcctacttcggtctggtaagagattctcttttccatgctttaggaaaatggtttggagaaggaagtgactaacgcagcgcttgtctgcattctccccaggccgctgtgttcatcgacttcctcatcgacacttactccagtaactgctgtcgctcccatatttatccctggtgcaagtgctgtcagccctgtgtggtcaacgaatactactacaggaagaagtgcgagtccattgtggagccaaagccgacattaaagtatgtgtcctttgtggatgaatcccacattaggatggtgaaccagcagctactagggagaagtctgcaagatgtcaagggccaagaagtcccaagacctgcgatggacttcacagatttgtccaggctgcccctggccctccatgacacacccccgattcctggacaaccagaggagatacagctgcttagaaaggaggcgactcctagatccagggatagccccgtctggtgccagtgtggaagctgcctcccatctcaactccctgagagccacaggtgcctggaggagctgtgctgccggaaaaagccgggggcctgcatcaccacctcagagctgttcaggaagctggtcctgtccagacacgtcctgcagttcctcctgctctaccaggagcccttgctggcgctggatgtggattccaccaacagccggctgcggcactgtgcctacaggtgctacgccacctggcgcttcggctcccaggacatggctgactttgccatcctgcccagctgctgccgctggaggatccggaaagagtttccgaagagtgaagggcagtacagtggcttcaagagtccttactga

SEQ ID NO: 172486 - DNA, 1872 bp, Homo sapiens
  Payload ID: 13904
  Gene Symbol: P2RX7
  Gene Name: purinergic receptor P2X, ligand gated ion channel, 7
  Uniprot ID: Q99572
  ENST ID: ENST00000535250
  CDS Start-End: 1-1095
atgccggcctgctgcagctgcagtgatgttttccagtatgagacgaacaaagtcactcggatccagagcatgaattatggcaccattaagtggttcttccacgtgatcatcttttcctacgtttgctttgctctggtgagtgacaagctgtaccagcggaaagagcctgtcatcagttctgtgcacaccaaggtgaaggggatagcagaggtgaaagaggagatcgtggagaatggagtgaagaagttggtgcacagtgtctttgacaccgcagactacaccttccctttgcaggggaactctttcttcgtgatgacaaactttctcaaaacagaaggccaagagcagcggttgtgtcccgagtatcccacccgcaggacgctctgttcctctgaccgaggttgtaaaaagggatggatggacccgcagagcaaaggaattcagaccggaaggtgtgtagtgtatgaagggaaccagaagacctgtgaagtctctgcctggtgccccatcgaggcagtggaagaggccccccggcctgctctcttgaacagtgccgaaaacttcactgtgctcatcaagaacaatatcgacttccccggccacaactacaccacgagaaacatcctgccaggtttaaacatcacttgtaccttccacaagactcagaatccacagtgtcccattttccgactaggagacatcttccgagaaacaggcgataatttttcagatgtggcaattcagggcggaataatgggcattgagatctactgggactgcaacctagaccgttggttccatcactgccgtcccaaatacagtttccgtcgccttgacgacaagaccaccaacgtgtccttgtaccctggctacaacttcagatacgccaagtactacaaggaaaacaatgttgagaaacggactctgataaaagtcttcgggatccgttttgacatcctggtttttggcaccggaggaaaatttgacattatccagctggttgtgtacatcggctcaaccctctcctacttcggtctggtaagagattctcttttccatgctttaggaaaatggtttggagaaggaagtgactaacgcagcgcttgtctgcattctccccaggccgctgtgttcatcgacttcctcatcgacacttactccagtaactgctgtcgctcccatatttatccctggtgcaagtgctgtcagccctgtgtggtcaacgaatactactacaggaagaagtgcgagtccattgtggagccaaagccgacattaaagtatgtgtcctttgtggatgaatcccacattaggatggtgaaccagcagctactagggagaagtctgcaagatgtcaagggccaagaagtcccaagacctgcgatggacttcacagatttgtccaggctgcccctggccctccatgacacacccccgattcctggacaaccagaggagatacagctgcttagaaaggaggcgactcctagatccagggatagccccgtctggtgccagtgtggaagctgcctcccatctcaactccctgagagccacaggtgcctggaggagctgtgctgccggaaaaagccgggggcctgcatcaccacctcagagctgttcaggaagctggtcctgtccagacacgtcctgcagttcctcctgctctaccaggagcccttgctggcgctggatgtggattccaccaacagccggctgcggcactgtgcctacaggtgctacgccacctggcgcttcggctcccaggacatggctgactttgccatcctgcccagctgctgccgctggaggatccggaaagagtttccgaagagtgaagggcagtacagtggcttcaagagtccttactga

SEQ ID NO: 172487 - DNA, 1651 bp, Homo sapiens
  Payload ID: 13904
  Gene Symbol: P2RX7
  Gene Name: purinergic receptor P2X, ligand gated ion channel, 7
  ENST ID: ENST00000541564
  CDS Start-End: 1-777
atgccggcctgctgcagctgcagtgatgttttccagtatgagacgaacaaagtcactcggatccagagcatgaattatggcaccattaagtggttcttccacgtgatcatcttttcctacgtttgctttgctctggtgagtgacaagctgtaccagcggaaagagcctgtcatcagttctgtgcacaccaaggtgaaggggatagcagaggtgaaagaggagatcgtggagaatggagtgaagaagttggtgcacagtgtctttgacaccgcagactacaccttccctttgcaggggaactctttcttcgtgatgacaaactttctcaaaacagaaggccaagagcagcggttgtgtcccgagtatcccacccgcaggacgctctgttcctctgaccgaggttgtaaaaagggatggatggacccgcagagcaaaggaattcagaccggaaggtgtgtagtgtatgaagggaaccagaagacctgtgaagtctctgcctggtgccccatcgaggcagtggaagaggccccccggcctgctctcttgaacagtgccgaaaacttcactgtgctcatcaagaacaatatcgacttccccggccacaactacaccacgagaaacatcctgccaggtttaaacatcacttgtaccttccacaagactcagaatccacagtgtcccattttccgactaggagacatcttccgagaaacaggcgataatttttcagatgtggcaattcagatacgccaagtactacaaggaaaacaatgttgagaaacggactctgataaaagtcttcgggatccgttttgacatcctggtttttggcaccggaggaaaatttgacattatccagctggttgtgtacatcggctcaaccctctcctacttcggtctggccgctgtgttcatcgacttcctcatcgacacttactccagtaactgctgtcgctcccatatttatccctggtgcaagtgctgtcagccctgtgtggtcaacgaatactactacaggaagaagtgcgagtccattgtggagccaaagccgacattaaagtatgtgtcctttgtggatgaatcccacattaggatggtgaaccagcagctactagggagaagtctgcaagatgtcaagggccaagaagtcccaagacctgcgatggacttcacagatttgtccaggctgcccctggccctccatgacacacccccgattcctggacaaccagaggagatacagctgcttagaaaggaggcgactcctagatccagggatagccccgtctggtgccagtgtggaagctgcctcccatctcaactccctgagagccacaggtgcctggaggagctgtgctgccggaaaaagccgggggcctgcatcaccacctcagagctgttcaggaagctggtcctgtccagacacgtcctgcagttcctcctgctctaccaggagcccttgctggcgctggatgtggattccaccaacagccggctgcggcactgtgcctacaggtgctacgccacctggcgcttcggctcccaggacatggctgactttgccatcctgcccagctgctgccgctggaggatccggaaagagtttccgaagagtgaagggcagtacagtggcttcaagagtccttactga

SEQ ID NO: 172488 - DNA, 2011 bp, Homo sapiens
  Payload ID: 13904
  Gene Symbol: P2RX7
  Gene Name: purinergic receptor P2X, ligand gated ion channel, 7
  ENST ID: ENST00000539606
  CDS Start-End: 1-384
atgccggcctgctgcagctgcagtgatgttttccagtatgagacgaacaaagtcactcggatccagagcatgaattatggcaccattaagtggttcttccacgtgatcatcttttcctacgtttgctttgctctggtgagtgacaagctgtaccagcggaaagagcctgtcatcagttctgtgcacaccaaggtgaaggggatagcagaggtgaaagaggagatcgtggagaatggagtgaagaagttggtgcacagtgtctttgacaccgcagactacaccttccctttgcagctttttagacgcacagccaccaagccagcaaggtctgccgagattcagaaggacagagaactttctaccaaagagcaccagcccttctagattgtgtagcatttcatcaacaaaaatgactccaggagaccattcttgggggaactctttcttcgtgatgacaaactttctcaaaacagaaggccaagagcagcggttgtgtcccgagtatcccacccgcaggacgctctgttcctctgaccgaggttgtaaaaagggatggatggacccgcagagcaaaggaattcagaccggaaggtgtgtagtgtatgaagggaaccagaagacctgtgaagtctctgcctggtgccccatcgaggcagtggaagaggccccccggcctgctctcttgaacagtgccgaaaacttcactgtgctcatcaagaacaatatcgacttccccggccacaactacaccacgagaaacatcctgccaggtttaaacatcacttgtaccttccacaagactcagaatccacagtgtcccattttccgactaggagacatcttccgagaaacaggcgataatttttcagatgtggcaattcagggcggaataatgggcattgagatctactgggactgcaacctagaccgttggttccatcactgccgtcccaaatacagtttccgtcgccttgacgacaagaccaccaacgtgtccttgtaccctggctacaacttcagatacgccaagtactacaaggaaaacaatgttgagaaacggactctgataaaagtcttcgggatccgttttgacatcctggtttttggcaccggaggaaaatttgacattatccagctggttgtgtacatcggctcaaccctctcctacttcggtctggtaagagattctcttttccatgctttaggaaaatggtttggagaaggaagtgactaacgcagcgcttgtctgcattctccccaggccgctgtgttcatcgacttcctcatcgacacttactccagtaactgctgtcgctcccatatttatccctggtgcaagtgctgtcagccctgtgtggtcaacgaatactactacaggaagaagtgcgagtccattgtggagccaaagccgacattaaagtatgtgtcctttgtggatgaatcccacattaggatggtgaaccagcagctactagggagaagtctgcaagatgtcaagggccaagaagtcccaagacctgcgatggacttcacagatttgtccaggctgcccctggccctccatgacacacccccgattcctggacaaccagaggagatacagctgcttagaaaggaggcgactcctagatccagggatagccccgtctggtgccagtgtggaagctgcctcccatctcaactccctgagagccacaggtgcctggaggagctgtgctgccggaaaaagccgggggcctgcatcaccacctcagagctgttcaggaagctggtcctgtccagacacgtcctgcagttcctcctgctctaccaggagcccttgctggcgctggatgtggattccaccaacagccggctgcggcactgtgcctacaggtgctacgccacctggcgcttcggctcccaggacatggctgactttgccatcctgcccagctgctgccgctggaggatccggaaagagtttccgaagagtgaagggcagtacagtggcttcaagagtccttactga

SEQ ID NO: 172489 - DNA, 520 bp, Homo sapiens
  Payload ID: 13904
  Gene Symbol: P2RX7
  Gene Name: purinergic receptor P2X, ligand gated ion channel, 7
  ENST ID: ENST00000545434
  CDS Start-End: 43-186
agagctctggtccagctccgcgcagggagggaggctgtcaccatgccggcctgctgcagctgcagtgatgttttccagtatgagacgaacaaagtcactcggatccagagcatgaattatggcaccattaagtggttcttccacgtgatcatcttttcctacgtttggggaactctttcttcgtgatgacaaactttctcaaaacagaaggccaagagcagcggttgtgtcccgaggaattcagaccggaaggtgtgtagtgtatgaagggaaccagaagacctgtgaagtctctgcctggtgccccatcgaggcagtggaagaggccccccggcctgctctcttgaacagtgccgaaaacttcactgtgctcatcaagaacaatatcgacttccccggccacaactacaccacgagaaacatcctgccaggtttaaacatcacttgtaccttccacaagactcagaatccacagtgtcccattttccgactaggagacatcttccgagaaacaggcgat

SEQ ID NO: 172490 - DNA, 6747 bp, Homo sapiens
  Payload ID: 13905
  Gene Symbol: P2RY1
  Gene Name: purinergic receptor P2Y, G-protein coupled, 1
  Uniprot ID: P47900
  ENST ID: ENST00000305097
  CDS Start-End: 1091-2212
acctggcgtggttctcgagggccctagaggctcctgctacggactggtcggctctggggttgtaggcagaaggctctaagcggtcggaagggtttcctgtgtgtcagcaacttcactttgccgagatagctggcggaagagggaaggagcgctcgcgggccaatcgcctgccagcagccaccttggagcgcacccctctccctcgccgccgactccggtagcagcgtgccggcagaggctgaacacactcggcctcggcggagacctgctccccagaagacgcctcctgcttcccactgcgccctggaggacgcgggctggctgctgggcgagctcggcggaggcacgcccctcgcctccccgcggagtgcggactcgccccggtgcccaaactccgcccaccctctagggagctccgctctcccgcctaaccccggcactccggacagagctgggcctggggaaggggttcctgaactacgcggacgccgaacgggacgcgctgcagaagcgcacgagtctgcggccacgcgcgctccgatggctgccaggagctgagctcagggtgggcggaggaagcggttagacgccccgaaactgagctgcacgtttctaaggtagggaggaggaagatgcccccaattaagttgatctttgagccaaggaggctggggagcagcctccccaagctagagccctgcagagcgagtttcccttgacctcgctgcgcctctggcgcgctctgcagcgcggacccgcggcccctcgggaaagcgcagtcggaaagttatccgcggcggttccctgcgcgccctgttgtgtaagctcggcgttgccagcggacggagaagttgctggcttgcccgatagcccagttcggtggcggcccggggcggatttcatggcccgcggcgaacgcggggccagagctggcgtgggcgagcccctgcgcgccccctcccgcggggatccagttcgcctgctcccttccgctcgctggcttttccgatgcttgctgcgcccctggccgccgctgccctctcgccgcctcctacccctcggagccgccgcctaagtcgaggaggagagaatgaccgaggtgctgtggccggctgtccccaacgggacggacgctgccttcctggccggtccgggttcgtcctgggggaacagcacggtcgcctccactgccgccgtctcctcgtcgttcaaatgcgccttgaccaagacgggcttccagttttactacctgccggctgtctacatcttggtattcatcatcggcttcctgggcaacagcgtggccatctggatgttcgtcttccacatgaagccctggagcggcatctccgtgtacatgttcaatttggctctggccgacttcttgtacgtgctgactctgccagccctgatcttctactacttcaataaaacagactggatcttcggggatgccatgtgtaaactgcagaggttcatctttcatgtgaacctctatggcagcatcttgtttctgacatgcatcagtgcccaccggtacagcggtgtggtgtaccccctcaagtccctgggccggctcaaaaagaagaatgcgatctgtatcagcgtgctggtgtggctcattgtggtggtggcgatctcccccatcctcttctactcaggtaccggggtccgcaaaaacaaaaccatcacctgttacgacaccacctcagacgagtacctgcgaagttatttcatctacagcatgtgcacgaccgtggccatgttctgtgtccccttggtgctgattctgggctgttacggattaattgtgagagctttgatttacaaagatctggacaactctcctctgaggagaaaatcgatttacctggtaatcattgtactgactgtttttgctgtgtcttacatccctttccatgtgatgaaaacgatgaacttgagggcccggcttgattttcagaccccagcaatgtgtgctttcaatgacagggtttatgccacgtatcaggtgacaagaggtctagcaagtctcaacagttgtgtggaccccattctctatttcttggcgggagatactttcagaaggagactctcccgagccacaaggaaagcttctagaagaagtgaggcaaatttgcaatccaagagtgaagacatgaccctcaatattttacctgagttcaagcagaatggagatacaagcctgtgaaggcacaagaatctccaaacacctctctgttgtaatatggtaggatgcttaacagaatcaagtacttttcccctctttaactttctagtttagaaaaaaatcaaaccaagaaaatagtgagttaaaaaaataatagaagtagaaatgcccacatccacacttagcttgtttgggtttgctttcacagtctctcttccttctgactagaagtatgtataataaaacaatactacctagttaaacatttactttctcttttgcctttaaaatgtgcaggcttttctgtttaaagtgtgtgtgcacatgagtactggggctgtttttgatattagtaatttctctaagaaaactagccccctgcaacttgagtttgtggtttatctagcctttattgtttttttaaaatccacagtaggaataaaaaatctatattctcagaaatatctagcatggtatataacaaaacactaaactcatcagttcatccggcatcagatcaatggatctctgagcggggtgtttttttcagtgtcttataagcatagatgatagttgactgagtttctttagggcattgaatagacaagtaaagctaatgaatttaaaagcctgaaaagtgattgttttccagttatttctggaaaaggtctcattatatattgggtgctaaatgtttgatggggaaagcctgcatatattatcgtactggtaaaatgcattcaaaataattaaagtgcatgtattttccttgtaaacaccatgagctctcttagacatcttgtgataaagagcatttacttgccccactgctgtgcaatgccttaggactttgtttgtgttccaggacaagtgttcactcacatctgtaaaaacaattttaagaattgcaaataaattacagaccaaagattgagtaaagtcaaataactgttagtaagttgaaggatattggacaggaggacagtatttcagaaaaggagaggttgacagtcatccacaaggcatagcctccaagtatactctcaaatgtatgaagcaactggggtgggcagaagacattttagaatgagggctttagtttaaattaaagtcatggtggagaagactcttgcttcctccaagtgtttgaaaacacaaaatgcgatatgaaaagaagaaatagaatttgtataggttgcattgatagaatgggaagctataatctttgaataaaccttacatctcaatatttaaagaaaaaacatatatatggagggaaatatagagaattaaagtacctagatgccatagcactgaaaagtaaagtactactcaaactactaatagaagactattggtcagtgttttctattatatttgttctctgccaggtgttaatgaaaaatttgtaaaatgcttcaacagtgttaataattttaatgaatattgaattgctgcatgtctagtccttgaaatggtcaaattctatataatgagaataacaaggtgagataatgcaattgacaatcccaaacaaatccagtgtcaaaggaatttttagttttggaagctatccctcataaagtcaacatcagagtttgcaactgatggtggcataacttgtttgaaagcactttacaagtagagcaacatggggctgtatgttaaggcaagaaagaaccttagtgccccgtggaccataatgacaggaaattttcaggtcttgatttcagttcttgcaatgcctatgtagattgaggatttgtgagaccttcagagtagcttcactttacccaatctctggccactaagatcaatgaagaaaagctgtatttaaccttccaaagcagtgattctttttacatgttcagttttaatgcataggattatagaaaccaaatcaagaagaaacctactacacctccttattttgaggaaagagagggttagcaaagttctcacttcatcaggctcaaataacatccgttttagattcctacaagacaaaatctaaaatatgtcattactttattgaccttgttaaacaagatcaatatcattaaactgaccaagatggaaattacaggacttgtaccagacttgaacttgtagcctaatgatacacatttttacaatatttcttcaccatttagttttctttcttttaggtctcaggatgctcagcttaatttagagtatgtgttaagtacattgtttcagcgtccagagaattttgtgagtgtggatccagtgaggaggtgaacagtaactagaaatgcttgtttactacttggcatgttttttccaaagtgtttcttctttagcttcatacatcacatatggacactgatgacatgtgaatgcatgccacatagtaacaagaatgatcttgccaactccttccaagccaaaagaagcctctgggaaggtgtgccaatggtgaaaacgtacagagggtcagggtgaagcagtgatctctattggctgaaaaactgatcaggtcatatgatgattgaagtatgtttattgtaagggcagaaatgtgttggcatttggataaaaaactgctaacattatagaacttattacctaacaaaatttcacaccacaaaaaatattttaatggcaaattcaaggtgttttattgcttacaaatcagcatctttgactctttgaacatcaatttgtgtttacattgaaatgacaaaaagacaaactaagaagaaatacagcatgcaagttggaattcagagttaaaaccatgatgttgccgctcagccagctatgtgactgttgaccctttcaagaacacacatggatttaaaagttggatgacatccattgttggggccttgggggatatggtaaagcatgaaaactaaacagccaggagcctgtgaaatctgctactgtattttccaggacttcattccactccttggctaaaaaaatcttggaagtttcacagattatgatgtggacctgtcacctgtaaattgtctcaatctactcagacaagacactaaactgtctttggatactatagatgtcagtgcttatagcagctggaatttggctagtgacaatgtttaaagatgtaatactagttagtatctattgaagcttaaactttgctggtcaggttgtagctattgtaaaagtatttattgaagaagctcacagtccttcagttgtacagactgaaaaactttcatgaaagatccaacatactaatgtaaattatatttattacaatgtatgatattaatgtgtcaaactggtgtattttacaaaatatataatgcatacataaataagagttgtatattacagtgcttttcaaatatcagtgtcttggaatatttaagtcttcacattttttggtctaaaatatgaaaatgtttcatgatacaagtgattaattttccctagtagtgcttttgcatgtttgcctttttatttaagtttttttctatatagacacaatttggtgtcagactatcataagatcgatagtgaatataaaatatcttagccaaatggggtctgtattgtctacattttatatattaaataaaagtttttgttgtcttttcaggaggtttagagtattgtcactaaatatgatcaaagcttccctttccaaatgcaaaagtcttgtcctacatttaaagttgatctgtcatgttttagcagtcaagtgggatgggcattatataaacaacgttacaatgtaaggaaaatctttaaggagatggggagagaaaaaggcagctggtataatcggttactgctgcttagttctacttaattttttgtgttgcttcttcttaaggtgagatagcataatcttaactgttttgagatggaattttaaagtaacacactaccagcgagttcaacactgctattgattttaatctgtttttttttgtttagttgataacttaaattccaagtttcatagtgataattgtatattatttggctgctgaattctgttagagttttttattctgttgtacattgtattatacacataatcacaaattaatatgaaggtgaatatatgttacatatcaaaatttgtgaatttgaattatagtatgttttagtgctattgcaaaaaatgtttatttttatattatctgtgattttaatatagatgattgaactagatttctttttgagtgatagtgccattgaatgagcagtatggaaacagtgttacttgatattttgagctttctcaggtttatctaaatcagtggtagcttaacaaaacccagactaattgtgtgtaattgtatttttaataaaaggaaagtacatttcctataatagcatagtactgtttgcatgtaagagtatgcaaaaccttgtgtgtgtgtgtgtgtgtgtgtgtgtgtgtgtgtcttagtgtgtgtaaggcatggcagccaactttgtatctgctatttttagtacgagcagagcttcataattgtggtcactagaactgtacttaccatggacagttaaaactgaaaaagactcaataaaactatgaaacatgg

SEQ ID NO: 172491 - DNA, 1714 bp, Homo sapiens
  Payload ID: 13906
  Gene Symbol: P2RY10
  Gene Name: purinergic receptor P2Y, G-protein coupled, 10
  Uniprot ID: O00398
  ENST ID: ENST00000171757
  CDS Start-End: 281-1300
tgccgccagagtaaagctttctaccctttactccctgcaaagaaacaagagtgcttatcccagctaagctccagggtaatgttatcatgacagcttcaacttttagaccacaggcaaatgctttgttaaaactctatgctggtcattcccttcaggatttggcactcaccaacatacccttctttcaagtgaaaaggcatctcttttaatggtcctgacctttggaataggaagcatgtaccctggacagagcacttcaaactagaggaaccataaatccatggctaaccttgacaaatacactgaaacattcaagatgggtagcaacagtaccagcactgctgagatttactgtaatgtcactaatgtgaaatttcaatactccctctatgcaaccacctatatcctcatattcattcctggtcttctggctaacagtgcagccttgtgggttctgtgccgcttcatcagcaagaaaaataaagccatcattttcatgatcaacctctctgtggctgaccttgctcatgtattatctttacccctccggatttactattacatcagccaccactggcctttccagagagccctttgcctgctctgcttctacctgaagtatctcaacatgtatgccagcatttgtttcctgacgtgcatcagtcttcaaaggtgcttttttctcctcaagcccttcagggccagagactggaagcgtaggtacgatgtgggcatcagtgctgccatctggatcgttgtggggactgcctgtttgccatttcccatcctgagaagcacagacttaaacaacaacaagtcctgctttgctgatcttggatacaagcaaatgaatgcagttgcgttggtcgggatgattacagttgctgagcttgcaggatttgtgatcccagtgatcatcatcgcatggtgtacctggaaaactactatatccttgagacagccaccaatggctttccaagggatcagtgagaggcagaaagcactgcggatggtgttcatgtgtgctgcagtcttcttcatctgcttcactccctatcatattaactttattttttacaccatggtaaaggaaaccatcattagcagttgtcccgttgtccgaatcgcactgtatttccaccctttttgcctgtgccttgcaagtctctgctgccttttggatccaattctttattactttatggcttcagagtttcgtgaccaactatcccgccatggcagttctgtgacccgctcccgcctcatgagcaaggagagtggttcatcaatgattggctaaaattaagatatctctttaattacgcctttgtttacctacgttccttgtctttttccaaaggccagaattgtcaaccaatttctttaattgaacattgtaaaaaacaggaataagtacttttgtgtaatattcacagtcaacaggggtgtgatggtgaaggcagagtgtgaaaaacgtgagagaggaagagaaaatagatttacctgattcctctttaaaattcaagccactttcttatttaagaaacctagatcaagtttttacagatgtaaataaaagttgaatagtttaccttaaatttttttcaataagtaagttattgttaataatgcacagtaaatatgtgaatttttcctagatgtaaaaaaaaaaatctttcatataaagaccttaaattctgagtgagagtaaaaa

SEQ ID NO: 172492 - DNA, 1597 bp, Homo sapiens
  Payload ID: 13906
  Gene Symbol: P2RY10
  Gene Name: purinergic receptor P2Y, G-protein coupled, 10
  Uniprot ID: O00398
  ENST ID: ENST00000544091
  CDS Start-End: 178-1197
tttgtgcaaataaggtttctgtggtgagacaccagataaactcaacttcctctttcaacaacaaatgtgtcagttatcagcaggatccatgccgccagagtaaagctttctaccctttactccctgcaaagaaacaagagtgcttatcccagctaagctccagggaaccataaatccatggctaaccttgacaaatacactgaaacattcaagatgggtagcaacagtaccagcactgctgagatttactgtaatgtcactaatgtgaaatttcaatactccctctatgcaaccacctatatcctcatattcattcctggtcttctggctaacagtgcagccttgtgggttctgtgccgcttcatcagcaagaaaaataaagccatcattttcatgatcaacctctctgtggctgaccttgctcatgtattatctttacccctccggatttactattacatcagccaccactggcctttccagagagccctttgcctgctctgcttctacctgaagtatctcaacatgtatgccagcatttgtttcctgacgtgcatcagtcttcaaaggtgcttttttctcctcaagcccttcagggccagagactggaagcgtaggtacgatgtgggcatcagtgctgccatctggatcgttgtggggactgcctgtttgccatttcccatcctgagaagcacagacttaaacaacaacaagtcctgctttgctgatcttggatacaagcaaatgaatgcagttgcgttggtcgggatgattacagttgctgagcttgcaggatttgtgatcccagtgatcatcatcgcatggtgtacctggaaaactactatatccttgagacagccaccaatggctttccaagggatcagtgagaggcagaaagcactgcggatggtgttcatgtgtgctgcagtcttcttcatctgcttcactccctatcatattaactttattttttacaccatggtaaaggaaaccatcattagcagttgtcccgttgtccgaatcgcactgtatttccaccctttttgcctgtgccttgcaagtctctgctgccttttggatccaattctttattactttatggcttcagagtttcgtgaccaactatcccgccatggcagttctgtgacccgctcccgcctcatgagcaaggagagtggttcatcaatgattggctaaaattaagatatctctttaattacgcctttgtttacctacgttccttgtctttttccaaaggccagaattgtcaaccaatttctttaattgaacattgtaaaaaacaggaataagtacttttgtgtaatattcacagtcaacaggggtgtgatggtgaaggcagagtgtgaaaaacgtgagagaggaagagaaaatagatttacctgattcctctttaaaattcaagccactttcttatttaagaaacctagatcaagtttttacagatgtaaataaaagttgaatagtttaccttaaatttttttcaataagtaagttattgttaataatgcacagtaaatatgtgaatttttcctagatgtaaaaaaaaaaatctttcatataaagaccttaaattctg

SEQ ID NO: 172493 - DNA, 1943 bp, Homo sapiens
  Payload ID: 13907
  Gene Symbol: P2RY11
  Gene Name: purinergic receptor P2Y, G-protein coupled, 11
  Uniprot ID: Q96G91
  ENST ID: ENST00000321826
  CDS Start-End: 185-1309
gaacctcaggagggttgtggcacaatgaggaaggaaacgtgggtggaaaggcacgctggcctgctctgctggctgggccagtaactggggatggggctggggcagggcccactaagccactggtgactgggggaggggctggggaactgggtagcagacacaggctgaggatcggcacgggagcatggcagccaacgtctcgggtgccaagtcctgccctgccaacttcttggcagctgccgacgacaaactcagtgggttccagggggacttcctgtggcccatactggtggttgagttcctggtggccgtggccagcaatggcctggccctgtaccgcttcagcatccggaagcagcgcccatggcaccccgccgtggtcttctctgtccagctggcagtcagcgacctgctctgcgccctgacgctgcccccgctggccgcctacctctatccccccaagcactggcgctatggggaggccgcgtgccgcctggagcgcttcctcttcacctgcaacctgctgggcagcgtcatcttcatcacctgcatcagcctcaaccgctacctgggcatcgtgcaccccttcttcgcccgaagccacctgcgacccaagcacgcctgggccgtgagcgctgccggctgggtcctggccgccctgctggccatgcccacactcagcttctcccacctgaagaggccgcagcagggggcgggcaactgcagcgtggccaggcccgaggcctgcatcaagtgtctggggacagcagaccacgggctggcggcctacagagcgtatagcctggtgctggcggggttgggctgcggcctgccgctgctgctcacgctggcagcctacggcgccctcgggcgggccgtgctacgcagcccaggcatgactgtggccgagaagctgcgtgtggcagcgttggtggccagtggtgtggccctctacgccagctcctatgtgccctaccacatcatgcgggtgctcaacgtggatgctcggcggcgctggagcacccgctgcccgagctttgcagacatagcccaggccacagcagccctggagctggggccctacgtgggctaccaggtgatgcggggcctcatgcccctggccttctgtgtccaccctctactctacatggccgcagtgcccagcctgggctgctgctgccgacactgccccggctacagggacagctggaacccagaggacgccaagagcactggccaagccctgcccctcaatgccacagccgcccctaaaccgtcagagccccagtcccgtgagctgagccaatgatgtggcctagcggaagctgcctcctcaccctaggtgttgctggagaaccctgagggcagggcccgagccccgacacatcccttcccccaaaaagcaacacctgtgcttgcagccaggtcaggcccagctgcagcccaggcaggagcagtcgcctttcccacccacagcgctggccacagggctccctgcagggtcagggaccagaccacgcccagaggaggggaggcactggcccccgccacaggactggagacgcaagaacaaaaagaaccaagtagagagagtggagctgctttattgcccttggagcccgcgctctcggaggctgtcttctgtcgccaagggtcccggaccgagtacacagtggcagctggcttagttggtggacggcctggggtaggggagggtggcaggtataagacttctgggggcaccccaagaccccagacacccaagtggcatcttgggggtgggtgggcagaggacggggtaatgtgaggacgaagcgggcacggagccagatggccagtctccaggcctggtccacggactggcagggaccccaggcacaagagctgccacccctctgcccggttttggaaaaaaacaataaaggactgtcccctcaaaacca

SEQ ID NO: 172494 - DNA, 1766 bp, Homo sapiens
  Payload ID: 13908
  Gene Symbol: P2RY12
  Gene Name: purinergic receptor P2Y, G-protein coupled, 12
  Uniprot ID: Q9H244
  ENST ID: ENST00000302632
  CDS Start-End: 301-1329
actgttgttacacaacaaacatcatagtgctgaaatgacaaaaatccagggtagtgatcacaatcagaagacaggagctgcagaacagaacactttctcatgtccagggtcagattacaagagcactcaagactttactgacgaaaactcaggaaatcctctatcacaaagaggtttggcaactaaactaagacattaaaaggaaaataccagatgccactctgcaggttgcaataactactacttactggatacattcaaaccctccagaatcaacagttatcaggtaaccaacaagaaatgcaagccgtcgacaacctcacctctgcgcctggtaacaccagtctgtgcaccagagactacaaaatcacccaggtcctcttcccactgctctacactgtcctgttttttgttggacttatcacaaatggcctggcgatgaggattttctttcaaatccggagtaaatcaaactttattatttttcttaagaacacagtcatttctgatcttctcatgattctgacttttccattcaaaattcttagtgatgccaaactgggaacaggaccactgagaacttttgtgtgtcaagttacctccgtcatattttatttcacaatgtatatcagtatttcattcctgggactgataactatcgatcgctaccagaagaccaccaggccatttaaaacatccaaccccaaaaatctcttgggggctaagattctctctgttgtcatctgggcattcatgttcttactctctttgcctaacatgattctgaccaacaggcagccgagagacaagaatgtgaagaaatgctctttccttaaatcagagttcggtctagtctggcatgaaatagtaaattacatctgtcaagtcattttctggattaatttcttaattgttattgtatgttatacactcattacaaaagaactgtaccggtcatacgtaagaacgaggggtgtaggtaaagtccccaggaaaaaggtgaacgtcaaagttttcattatcattgctgtattctttatttgttttgttcctttccattttgcccgaattccttacaccctgagccaaacccgggatgtctttgactgcactgctgaaaatactctgttctatgtgaaagagagcactctgtggttaacttccttaaatgcatgcctggatccgttcatctattttttcctttgcaagtccttcagaaattccttgataagtatgctgaagtgccccaattctgcaacatctctgtcccaggacaataggaaaaaagaacaggatggtggtgacccaaatgaagagactccaatgtaaacaaattaactaaggaaatatttcaatctctttgtgttcagaactcgttaaagcaaagcgctaagtaaaaatattaactgacgaagaagcaactaagttaataataatgactctaaagaaacagaagattacaaaagcaattttcatttacctttccagtatgaaaagctatcttaaaatatagaaaactaatctaaactgtagctgtattagcagcaaaacaaacgacatccaattgtcatgctgcatgcaaaactacacagaattcatgttttgcagagttttgccaaaatgagtaatcatataatatttactgtaatttttaaaatacattatcgttcacaattttattttttcataatcaactaaggaagaacgatcaattggatataatcttcttaccaaaaatgatagttaaaatgtatatatatcctagt

SEQ ID NO: 172495 - DNA, 2764 bp, Homo sapiens
  Payload ID: 13909
  Gene Symbol: P2RY13
  Gene Name: purinergic receptor P2Y, G-protein coupled, 13
  Uniprot ID: Q9BPV8
  ENST ID: ENST00000325602
  CDS Start-End: 21-1085
ctcatttgtaggctgaactaatgactgccgccataagaagacagagagaactgagtatcctcccaaaggtgacactggaagcaatgaacaccacagtgatgcaaggcttcaacagatctgagcggtgccccagagacactcggatagtacagctggtattcccagccctctacacagtggttttcttgaccggcatcctgctgaatactttggctctgtgggtgtttgttcacatccccagctcctccaccttcatcatctacctcaaaaacactttggtggccgacttgataatgacactcatgcttcctttcaaaatcctctctgactcacacctggcaccctggcagctcagagcttttgtgtgtcgtttttcttcggtgatattttatgagaccatgtatgtgggcatcgtgctgttagggctcatagcctttgacagattcctcaagatcatcagacctttgagaaatatttttctaaaaaaacctgtttttgcaaaaacggtctcaatcttcatctggttctttttgttcttcatctccctgccaaatacgatcttgagcaacaaggaagcaacaccatcgtctgtgaaaaagtgtgcttccttaaaggggcctctggggctgaaatggcatcaaatggtaaataacatatgccagtttattttctggactgtttttatcctaatgcttgtgttttatgtggttattgcaaaaaaagtatatgattcttatagaaagtccaaaagtaaggacagaaaaaacaacaaaaagctggaaggcaaagtatttgttgtcgtggctgtcttctttgtgtgttttgctccatttcattttgccagagttccatatactcacagtcaaaccaacaataagactgactgtagactgcaaaatcaactgtttattgctaaagaaacaactctctttttggcagcaactaacatttgtatggatcccttaatatacatattcttatgtaaaaaattcacagaaaagctaccatgtatgcaagggagaaagaccacagcatcaagccaagaaaatcatagcagtcagacagacaacataaccttaggctgacaactgtacatagggttaacttctatttattgatgagacttccgtagataatgtggaaatcaaatttaaccaagaaaaaaagattggaacaaatgctctcttacattttattatcctcgtgtacagaaaagattatataaaatttaaatccacatagatctattcataagctgaatgaaccattactaagagaatgcaacaggatacaaatggccactagaggtcattatttctttctttctttttttttttttttaatttcaagagcatttcactttaacattttggaaaagactaaggagaaacgtatatccctacaaacctcccctccaaacaccttctcacattcttttccacaattcacataacactactgcttttgtgccccttaaatgtagatatgtgctgaaagaaaaaaaaaacgcccaactcttgaagtccattgctgaaaactgcagccaggggttgaaagggatgcagacttgaagagtctgaggaactgaagtgggtcagcaagacctctgaaatcctgggtaaaggattttctccttacaattacaaacagcctctttcacattacaataatataccataggaggcacaagcaccattattaagccactttgcttacaccttaagtgtgtacaattcaagtgtgagaatgctgtgttaactattctttggaattctccttctgtccagcaaatactctaatgatggttaaacatggcacctactcagcaatgccttcctggaccacaacccctatccccctgccccaccctcctcattaaaaacaaatacttctactgtttgggtgtgtgatagggttctcaatgcagatctcccttttctagttagctatattcttgactgcatccgctaaaaatgttaaagcttcttgagagacagacatgccagattttcttggtatctcccataatacgacctacagtccatggtctacagatgttttaaatagaattgctattctcgatacatacaaagacgtaattgctgacccacaatcagtaacatccatattgagagatttttcaaaggatggtgaccctgcttgtatttatttaccttggtattttttcttgcatccttctgtgattcaaaaaagtaaaatgtggctttctgaaatgatggataagagtctacatcttctagaaaaaatacataaaggagtagttaagctctgtaaatgtgccacgagctccaacacgaccatcgtagggtgaagcccacgttttcttccatggcctcaaaggccctagaacttgcctacctttctggccttacctcctagctacttatccatctcttgaactttatactcttgtataaatttctaactttcagaaaatgccatactctgttttggcaccacacatgtatatttccccctggtacacttggaagactcttatccatctgtgaaaccctatgttgtcatcacttggtccatgaaatattacctggccaatatcccaccatcacctcaaacccaatcaccccctcctctgtatgctgtcacacctatattattaaacttatcacattgcattgtaattacttcctgacctttgtatctactcttttagtaactgatgtatatatctgaaaggagagattgtttcattgtgcaatcaataaatgtttgataaaataaa

SEQ ID NO: 172496 - DNA, 2513 bp, Homo sapiens
  Payload ID: 13910
  Gene Symbol: P2RY14
  Gene Name: purinergic receptor P2Y, G-protein coupled, 14
  Uniprot ID: Q15391
  ENST ID: ENST00000309170
  CDS Start-End: 314-1330
aattctatctgacaacagcagcagagggacccactatcttgtggtttctgtcaagttcctgattttcatccgtagttgaagatgagcaagaactctgtaacagtgttaccttggagcctacaatgagaggtatttcaaaatgagtgaagcatgactctcacagatgaaggcctagacgcaggatctttaatgaaaaaacacttgggccacttcaagacgacaaacgctcactgggcaaaacaccttcactgaaaagagacctcatattatgcaaaaaaaatcttaaaaggcctctgccttcagaagttacaagatgatcaattcaacctccacacagcctccagatgaatcctgctctcagaacctcctgatcactcagcagatcattcctgtgctgtactgtatggtcttcattgcaggaatcctactcaatggagtgtcaggatggatattcttttacgtgcccagctctaagagtttcatcatctatctcaagaacattgttattgctgactttgtgatgagcctgacttttcctttcaagatccttggtgactcaggccttggtccctggcagctgaacgtgtttgtgtgcagggtctctgccgtgctcttctacgtcaacatgtacgtcagcattgtgttctttgggctcatcagctttgacagatattataaaattgtaaagcctctttggacttctttcatccagtcagtgagttacagcaaacttctgtcagtgatagtatggatgctcatgctcctccttgctgttccaaatattattctcaccaaccagagtgttagggaggttacacaaataaaatgtatagaactgaaaagtgaactgggacggaagtggcacaaagcatcaaactacatcttcgtggccatcttctggattgtgtttcttttgttaatcgttttctatactgctatcacaaagaaaatctttaagtcccaccttaagtcaagtcggaattccacttcggtcaaaaagaaatctagccgcaacatattcagcatcgtgtttgtgttttttgtctgttttgtaccttaccatattgccagaatcccctacacaaagagtcagaccgaagctcattacagctgccagtcaaaagaaatcttgcggtatatgaaagaattcactctgctactatctgctgcaaatgtatgcttggaccctattatttatttctttctatgccagccgtttagggaaatcttatgtaagaaattgcacattccattaaaagctcagaatgacctagacatttccagaatcaaaagaggaaatacaacacttgaaagcacagatactttgtgagttcctaccctcttccaaagaaagaccacgtgtgcatgttgtcatcttcaattacataacagaaatcaataagatatgtgccctcatcataaatatcatctctagcactgccatccaatttagttcaataaaattcaaatataagtttccatgcttttttgtaacatcaaagaaaacatacccatcagtaatttctctaatactgacctttctattctctattaataaaaaattaatacatacaattattcaattctattatattaaaataagttaaagtttataaccactagtctggtcagttaatgtagaaatttaaatagtaaataaaacacaacataatcaaagacaactcactcaggcatcttctttctctaaataccagaatctagtatgtaattgttttcaacactgtccttaaagactaacttgaaagcaggcacagtttgatgaagggctagagagctgtttgcaataaaaagtcaggtttttttcctgatttgaagaagcaggaaaagctgacacccagacaatcacttaagaaaccccttattgatgtatttcatggcactgcaaaggaagaggaatattaattgtatacttagcaagaaaattttttttttctgatagcactttgaggatattagatacatgctaaatatgttttctacaaagacttacgtcatttaatgagcctggggttctggtgttagaatatttttaagtaggctttactgagagaaactaaatattggcatacgttatcagcaacttcccctgttcaatagtatgggaaaaataagatgactgggaaaaagacacacccacaccgtagaacatatattaatctactggcgaatgggaaaggagaccattttcttagaaagcaaataaacttgatttttttaaatctaaaatttacattaatgagtgcaaaataacacataaaatgaaaattcacacatcacatttttctggaaaacagacggattttacttctggagacatggcatacggttactgacttatgagctaccaaaactaaattctttctctgctattaactggctagaagacattcatctatttttcaaatgttctttcaaaacatttttataagtaatgtttgtatctatttcatgctttactgtctatatactaataaagaaatgttttaatactg

SEQ ID NO: 172497 - DNA, 1780 bp, Homo sapiens
  Payload ID: 13910
  Gene Symbol: P2RY14
  Gene Name: purinergic receptor P2Y, G-protein coupled, 14
  Uniprot ID: Q15391
  ENST ID: ENST00000424796
  CDS Start-End: 383-1399
aagcatatattagagctgggctccaaagaatactggacatctgtagtacctgacattcaagcatttggcgagatgtcaatatttcagagagcactttaaatgttttgatttgaaagctaatgcagtgtttcccactggtcaacacgagcagtccagcagagagcaaaatctatttccctcaacatcaaatgctacactcagttgctgatcctatcttgcctacagagaacctaaaagactggaaaaattggatctttaatgaaaaaacacttgggccacttcaagacgacaaacgctcactgggcaaaacaccttcactgaaaagagacctcatattatgcaaaaaaaatcttaaaaggcctctgccttcagaagttacaagatgatcaattcaacctccacacagcctccagatgaatcctgctctcagaacctcctgatcactcagcagatcattcctgtgctgtactgtatggtcttcattgcaggaatcctactcaatggagtgtcaggatggatattcttttacgtgcccagctctaagagtttcatcatctatctcaagaacattgttattgctgactttgtgatgagcctgacttttcctttcaagatccttggtgactcaggccttggtccctggcagctgaacgtgtttgtgtgcagggtctctgccgtgctcttctacgtcaacatgtacgtcagcattgtgttctttgggctcatcagctttgacagatattataaaattgtaaagcctctttggacttctttcatccagtcagtgagttacagcaaacttctgtcagtgatagtatggatgctcatgctcctccttgctgttccaaatattattctcaccaaccagagtgttagggaggttacacaaataaaatgtatagaactgaaaagtgaactgggacggaagtggcacaaagcatcaaactacatcttcgtggccatcttctggattgtgtttcttttgttaatcgttttctatactgctatcacaaagaaaatctttaagtcccaccttaagtcaagtcggaattccacttcggtcaaaaagaaatctagccgcaacatattcagcatcgtgtttgtgttttttgtctgttttgtaccttaccatattgccagaatcccctacacaaagagtcagaccgaagctcattacagctgccagtcaaaagaaatcttgcggtatatgaaagaattcactctgctactatctgctgcaaatgtatgcttggaccctattatttatttctttctatgccagccgtttagggaaatcttatgtaagaaattgcacattccattaaaagctcagaatgacctagacatttccagaatcaaaagaggaaatacaacacttgaaagcacagatactttgtgagttcctaccctcttccaaagaaagaccacgtgtgcatgttgtcatcttcaattacataacagaaatcaataagatatgtgccctcatcataaatatcatctctagcactgccatccaatttagttcaataaaattcaaatataagtttccatgcttttttgtaacatcaaagaaaacatacccatcagtaatttctctaatactgacctttctattctctattaataaaaaattaatacatacaattattcaattctattatattaaaataagttaaagtttataaccactagtctggtcagttaatgtagaaatttaaatagtaaataaaacacaacataatcaaagacaactcactcaggcatcttctttctctaaata

SEQ ID NO: 172498 - DNA, 554 bp, Homo sapiens
  Payload ID: 13910
  Gene Symbol: P2RY14
  Gene Name: purinergic receptor P2Y, G-protein coupled, 14
  ENST ID: ENST00000494668
  CDS Start-End: 268-554
aacagtgttaccttggagcctacaatgagaggtatttcaaaatgagtgaagcatgactctcacagatgaaggcctagacgcaggaattacctagcaagccatggccaccatccctcttaccctccacaattccaggatctttaatgaaaaaacacttgggccacttcaagacgacaaacgctcactgggcaaaacaccttcactgaaaagagacctcatattatgcaaaaaaaatcttaaaaggcctctgccttcagaagttacaagatgatcaattcaacctccacacagcctccagatgaatcctgctctcagaacctcctgatcactcagcagatcattcctgtgctgtactgtatggtcttcattgcaggaatcctactcaatggagtgtcaggatggatattcttttacgtgcccagctctaagagtttcatcatctatctcaagaacattgttattgctgactttgtgatgagcctgacttttcctttcaagatccttggtgactcaggccttggtccctggcagctgaacgtgtttgtgtgcagggt

SEQ ID NO: 172499 - DNA, 2660 bp, Homo sapiens
  Payload ID: 13911
  Gene Symbol: P2RY2
  Gene Name: purinergic receptor P2Y, G-protein coupled, 2
  Uniprot ID: P41231
  ENST ID: ENST00000311131
  CDS Start-End: 468-1601
gaacagcgcagggaggtgggtagccgggctcccaggcacgtgggtctctgcggctgcggcgggacccgggcactggcacccgggagcggcggcgacggcaccctgagaggagaagcgcagcgcagtggcgagaggagccccttgtggcagcagcactacctgcccagaaaaatgctggaggctgggcgtggccccaggcctggggacctgtttttcctgtttcccgcagagttccctgcagcccggtccaggtccaggcgtgtgcattcatgagtgaggaacccgtgcaggcgctgagcatcctgacctggagagcaggggctggtcaggttccagagcttggaggttccaggtccagatccaagtcagatggcaatgaaagccctggtcaggtggctgtgtcaggtcccctaggggcgctccggccacaaccctgatggccccacccctcccttccctgcagggcgatggcagcagacctgggcccctggaatgacaccatcaatggcacctgggatggggatgagctgggctacaggtgccgcttcaacgaggacttcaagtacgtgctgctgcctgtgtcctacggcgtggtgtgcgtgcctgggctgtgtctgaacgccgtggcgctctacatcttcttgtgccgcctcaagacctggaatgcgtccaccacatatatgttccacctggctgtgtctgatgcactgtatgcggcctccctgccgctgctggtctattactacgcccgcggcgaccactggcccttcagcacggtgctctgcaagctggtgcgcttcctcttctacaccaacctttactgcagcatcctcttcctcacctgcatcagcgtgcaccggtgtctgggcgtcttacgacctctgcgctccctgcgctggggccgggcccgctacgctcgccgggtggccggggccgtgtgggtgttggtgctggcctgccaggcccccgtgctctactttgtcaccaccagcgcgcgcgggggccgcgtaacctgccacgacacctcggcacccgagctcttcagccgcttcgtggcctacagctcagtcatgctgggcctgctcttcgcggtgccctttgccgtcatccttgtctgttacgtgctcatggctcggcgactgctaaagccagcctacgggacctcgggcggcctgcctagggccaagcgcaagtccgtgcgcaccatcgccgtggtgctggctgtcttcgccctctgcttcctgccattccacgtcacccgcaccctctactactccttccgctcgctggacctcagctgccacaccctcaacgccatcaacatggcctacaaggttacccggccgctggccagtgctaacagttgccttgaccccgtgctctacttcctggctgggcagaggctcgtacgctttgcccgagatgccaagccacccactggccccagccctgccaccccggctcgccgcaggctgggcctgcgcagatccgacagaactgacatgcagaggatagaagatgtgttgggcagcagtgaggactctaggcggacagagtccacgccggctggtagcgagaacactaaggacattcggctgtaggagcagaacacttcagcctgtgcaggtttatattgggaagctgtagaggaccaggacttgtgcagacgccacagtctccccagatatggaccatcagtgactcatgctggatgaccccatgctccgtcatttgacaggggctcaggatattcactctgtggtccagagtcaactgttcccataacccctagtcatcgtttgtgtgtataagttgggggaattaagtttcaagaaaggcaagagctcaaggtcaatgacacccctggcctgactcccatgcaagtagctggctgtactgccaaggtacctaggttggagtccagcctaatcaagtcaaatggagaaacaggcccagagaggaaggtggcttaccaagatcacataccagagtctggagctgagctacctggggtgggggccaagtcacaggttggccagaaaaccctggtaagtaatgagggctgagtttgcacagtggtctggaatggactgggtgccacggtggacttagctctgaggagtacccccagcccaagagatgaacatctggggactaatatcatagacccatctggaggctcccatgggctaggagccagtgtgaggctgtaacttatactaaaggttgtgttgcctgctgagctgtgccctattgtgtggtcgggggatgaggatatggcagggaagctttcaccagccacacaagggtcctttctccaatccgttcccttctgccacctgccttctcactagctgtctcaggagtagtctcatatcagggatcctctctccaggccccaggtcatcccccactgtaaagccagttggcttctgtgcctgactctgtgctgagcacagagaaaagtcaggtgcagtcccagtccttgagatttcccagtttaggtgatggccagtcatgtgctggtaaatgttaagccatttaactggagctccgatttaactgggaaccccttctttgtagaactgcccatttccatggtgcaaaaactcttatggccaaattcaaactataaacatgatgtcaacttccttgtaaaa

SEQ ID NO: 172500 - DNA, 2174 bp, Homo sapiens
  Payload ID: 13911
  Gene Symbol: P2RY2
  Gene Name: purinergic receptor P2Y, G-protein coupled, 2
  Uniprot ID: P41231
  ENST ID: ENST00000393596
  CDS Start-End: 400-1533
caaggcgctgggagaggcccggggaagcggcgggccagactggcgcaggtgcggactgggcgcggggcaggggagggcgctgtggagcggctgtcgccccggggcacagttgcgagccggcgtgtagcgcataactggacggcttgaacgcgcctgtgggtccgtggttgaactttgtctccacgggagcgtcggtctcggagccccttgtggcagcagcactacctgcccagaaaaatgctggaggctgggcgtggccccaggcctggggacctgtttttcctgtttcccgcagagttccctgcagcccggtccaggtccaggcgtgtgcattcatgagtgaggaacccgtgcaggcgctgagcatcctgacctggagagcaggggctggtcagggcgatggcagcagacctgggcccctggaatgacaccatcaatggcacctgggatggggatgagctgggctacaggtgccgcttcaacgaggacttcaagtacgtgctgctgcctgtgtcctacggcgtggtgtgcgtgcctgggctgtgtctgaacgccgtggcgctctacatcttcttgtgccgcctcaagacctggaatgcgtccaccacatatatgttccacctggctgtgtctgatgcactgtatgcggcctccctgccgctgctggtctattactacgcccgcggcgaccactggcccttcagcacggtgctctgcaagctggtgcgcttcctcttctacaccaacctttactgcagcatcctcttcctcacctgcatcagcgtgcaccggtgtctgggcgtcttacgacctctgcgctccctgcgctggggccgggcccgctacgctcgccgggtggccggggccgtgtgggtgttggtgctggcctgccaggcccccgtgctctactttgtcaccaccagcgcgcgcgggggccgcgtaacctgccacgacacctcggcacccgagctcttcagccgcttcgtggcctacagctcagtcatgctgggcctgctcttcgcggtgccctttgccgtcatccttgtctgttacgtgctcatggctcggcgactgctaaagccagcctacgggacctcgggcggcctgcctagggccaagcgcaagtccgtgcgcaccatcgccgtggtgctggctgtcttcgccctctgcttcctgccattccacgtcacccgcaccctctactactccttccgctcgctggacctcagctgccacaccctcaacgccatcaacatggcctacaaggttacccggccgctggccagtgctaacagttgccttgaccccgtgctctacttcctggctgggcagaggctcgtacgctttgcccgagatgccaagccacccactggccccagccctgccaccccggctcgccgcaggctgggcctgcgcagatccgacagaactgacatgcagaggatagaagatgtgttgggcagcagtgaggactctaggcggacagagtccacgccggctggtagcgagaacactaaggacattcggctgtaggagcagaacacttcagcctgtgcaggtttatattgggaagctgtagaggaccaggacttgtgcagacgccacagtctccccagatatggaccatcagtgactcatgctggatgaccccatgctccgtcatttgacaggggctcaggatattcactctgtggtccagagtcaactgttcccataacccctagtcatcgtttgtgtgtataagttgggggaattaagtttcaagaaaggcaagagctcaaggtcaatgacacccctggcctgactcccatgcaagtagctggctgtactgccaaggtacctaggttggagtccagcctaatcaagtcaaatggagaaacaggcccagagaggaaggtggcttaccaagatcacataccagagtctggagctgagctacctggggtgggggccaagtcacaggttggccagaaaaccctggtaagtaatgagggctgagtttgcacagtggtctggaatggactgggtgccacggtggacttagctctgaggagtacccccagcccaagagatgaacatctggggactaatatcatagacccatctggaggctcccatgggctaggagccagtgtgaggctgtaacttatactaaaggttgtgttgcctgctga

SEQ ID NO: 172501 - DNA, 2107 bp, Homo sapiens
  Payload ID: 13911
  Gene Symbol: P2RY2
  Gene Name: purinergic receptor P2Y, G-protein coupled, 2
  Uniprot ID: P41231
  ENST ID: ENST00000393597
  CDS Start-End: 335-1468
ggaacagcgcagggaggtgggtagccgggctcccaggcacgtgggtctctgcggctgcggcgggacccgggcactggcacccgggagcggcggcgacggcaccctgagaggagaagcgcagcgcagtggcgagaggagccccttgtggcagcagcactacctgcccagaaaaatgctggaggctgggcgtggccccaggcctggggacctgtttttcctgtttcccgcagagttccctgcagcccggtccaggtccaggcgtgtgcattcatgagtgaggaacccgtgcaggcgctgagcatcctgacctggagagcaggggctggtcagggcgatggcagcagacctgggcccctggaatgacaccatcaatggcacctgggatggggatgagctgggctacaggtgccgcttcaacgaggacttcaagtacgtgctgctgcctgtgtcctacggcgtggtgtgcgtgcctgggctgtgtctgaacgccgtggcgctctacatcttcttgtgccgcctcaagacctggaatgcgtccaccacatatatgttccacctggctgtgtctgatgcactgtatgcggcctccctgccgctgctggtctattactacgcccgcggcgaccactggcccttcagcacggtgctctgcaagctggtgcgcttcctcttctacaccaacctttactgcagcatcctcttcctcacctgcatcagcgtgcaccggtgtctgggcgtcttacgacctctgcgctccctgcgctggggccgggcccgctacgctcgccgggtggccggggccgtgtgggtgttggtgctggcctgccaggcccccgtgctctactttgtcaccaccagcgcgcgcgggggccgcgtaacctgccacgacacctcggcacccgagctcttcagccgcttcgtggcctacagctcagtcatgctgggcctgctcttcgcggtgccctttgccgtcatccttgtctgttacgtgctcatggctcggcgactgctaaagccagcctacgggacctcgggcggcctgcctagggccaagcgcaagtccgtgcgcaccatcgccgtggtgctggctgtcttcgccctctgcttcctgccattccacgtcacccgcaccctctactactccttccgctcgctggacctcagctgccacaccctcaacgccatcaacatggcctacaaggttacccggccgctggccagtgctaacagttgccttgaccccgtgctctacttcctggctgggcagaggctcgtacgctttgcccgagatgccaagccacccactggccccagccctgccaccccggctcgccgcaggctgggcctgcgcagatccgacagaactgacatgcagaggatagaagatgtgttgggcagcagtgaggactctaggcggacagagtccacgccggctggtagcgagaacactaaggacattcggctgtaggagcagaacacttcagcctgtgcaggtttatattgggaagctgtagaggaccaggacttgtgcagacgccacagtctccccagatatggaccatcagtgactcatgctggatgaccccatgctccgtcatttgacaggggctcaggatattcactctgtggtccagagtcaactgttcccataacccctagtcatcgtttgtgtgtataagttgggggaattaagtttcaagaaaggcaagagctcaaggtcaatgacacccctggcctgactcccatgcaagtagctggctgtactgccaaggtacctaggttggagtccagcctaatcaagtcaaatggagaaacaggcccagagaggaaggtggcttaccaagatcacataccagagtctggagctgagctacctggggtgggggccaagtcacaggttggccagaaaaccctggtaagtaatgagggctgagtttgcacagtggtctggaatggactgggtgccacggtggacttagctctgaggagtacccccagcccaagagatgaacatctggggactaatatcatagacccatctggaggctcccatgggctaggagccagtgtgaggctgtaacttatactaaaggttgtgttgcctgct

SEQ ID NO: 172502 - DNA, 4198 bp, Homo sapiens
  Payload ID: 13912
  Gene Symbol: P2RY8
  Gene Name: purinergic receptor P2Y, G-protein coupled, 8
  Uniprot ID: Q86VZ1
  ENST ID: ENST00000381297
  CDS Start-End: 212-1291
ggaagggcagccgtctgccgcccacgaacaccttctcaagcactttgagtgaccacggcttgcaagctggtggctggccccccgagtcccgggctctgaggcacggccgtcgacttaagcgttgcatcctgttacctggagaccctctgagctctcacctgctacttctgccgctgcttctgcacagagcccgggcgaggacccctccaggatgcaggtcccgaacagcaccggcccggacaacgcgacgctgcagatgctgcggaacccggcgatcgcggtggccctgcccgtggtgtactcgctggtggcggcggtcagcatcccgggcaacctcttctctctgtgggtgctgtgccggcgcatggggcccagatccccgtcggtcatcttcatgatcaacctgagcgtcacggacctgatgctggccagcgtgttgcctttccaaatctactaccattgcaaccgccaccactgggtattcggggtgctgctttgcaacgtggtgaccgtggccttttacgcaaacatgtattccagcatcctcaccatgacctgtatcagcgtggagcgcttcctgggggtcctgtacccgctcagctccaagcgctggcgccgccgtcgttacgcggtggccgcgtgtgcagggacctggctgctgctcctgaccgccctgtccccgctggcgcgcaccgatctcacctacccggtgcacgccctgggcatcatcacctgcttcgacgtcctcaagtggacgatgctccccagcgtggccatgtgggccgtgttcctcttcaccatcttcatcctgctgttcctcatcccgttcgtgatcaccgtggcttgttacacggccaccatcctcaagctgttgcgcacggaggaggcgcacggccgggagcagcggaggcgcgcggtgggcctggccgcggtggtcttgctggcctttgtcacctgcttcgcccccaacaacttcgtgctcctggcgcacatcgtgagccgcctgttctacggcaagagctactaccacgtgtacaagctcacgctgtgtctcagctgcctcaacaactgtctggacccgtttgtttattactttgcgtcccgggaattccagctgcgcctgcgggaatatttgggctgccgccgggtgcccagagacaccctggacacgcgccgcgagagcctcttctccgccaggaccacgtccgtgcgctccgaggccggtgcgcaccctgaagggatggagggagccaccaggcccggcctccagaggcaggagagtgtgttctgagtcccgggggcgcagcttggagagccgggggcgcagcttggagatccaggggcgcatggagaggccacggtgccagaggttcagggagaacagctgcgttgctcccaggcactgcagaggcccggtggggaagggtctccaggctttattcctcccaggcactgcagaggcaccggtgaggaagggtctccaggcttcactcagggtagagaaacaagcaaagcccagcagcgcacagggtgcttgttatcctgcagagggtgcctctgcctctctgtgtcaggggacagcttgtgtcaccacgcccggctaatttttgtattttttttagtagagctgggctgtcacccccgagctccttagacactcctcacacctgtccatacccgagggtggatattcaaccagccccaccgcctacccgactcggtttctggatatcctccgtgggcgaactgcgagccccattcccagctcttctccctgctgacatcgtcccttagttgtggttctggccttctccattctcctccaggggttctggtctccgtagcccggtgcacgccgaaatttctgtttatttcactcaggggcactgtggttgctgtggttggaattcttctttcagaggagcgcctggggctcctgcaagtcagctactctccgtgcccacttccccccacacacacaccccaccctgttgctgaccaaggtgatttttggcacatttgttctggcctggcttggtgggaccccacccctattctgcttctgtgagtccctgatagagaaggaggtcccatcaggcccctggaacacactcaggcttccctgactcaggacaaggaccacgggaggcccaggtgcggaaaggaggctccgtgagatggggtccagcccatcccaacacaagggtgcagcttgattcgggagttccccacctcctgcccattctccgcgtccttttaccccatggagagcctcagccatggcaagtccatctggagtccaggaagcaggcaactggcctgacccatgagaccgtttggagaccaagcagcagatgcaggtgtggaccccaggaacctacaggggtgtcagccgctgagccccctccctgctgtgtgggtggtgagcaggctgggtctttgtctgtcttcttctacacggcatgtgcctgcaccagccccaacacctgagctggtttagcgcaaagaagagctctgactctccaggggtgctgggacatcacgtggaattggatcccaggctctcttgggcgagaaagaccattctggaggtgggagtgggagagctgcctgtctgcccacgggctctgcgtctccgcagtgggtggccttggatgcccggcccctccctttctgtgcactggggacgctgatggaggctgaagctgctgttcggaggccctctattggtgcctctctcctgccgtcatcactatggcaggaaaacagagatggtttagtaatgaattatcattcccaaacccgtgtccacctggaacatcaggatgggaccatgtttgaaaatcgggtctttccaaatgtaattaagtaaggcgaggccatactgcatttacaatgggcccaatccagtgtccctatgagagacggaagaggagacacagacacaaagcaggaggccacataaagacagaggcagagactgaagtgatgctgccccaagcccagggatgcctggagtccccaggagctgggagaggcaggaaggaccctcccctagagtctctggagggaactggatacaattgcagagtgcactaaacagttgccccagaaagacatgtcttgttttaaagcccagaacctgaaattattatagattttattcggtaataaggaactttgcatgtgtaattacttaaggatatgaagatgagattgtgctggattattaagcaccctaaatgccatgacaggtgtccttccaagagacagaagaggagacacagacacagagcaggaggacacgtggagacagaggcagactggagtgatgcggccacaagcccagggacacctggagcccccaggagctgggagaggcaggaaggatcctcccctagagcctccagggggaactggaggatgcgtaagagacccagaacttccacagaaggaggaaaattaacctcctgcttctctagactgttccaaagctgaaccctagaaagcaaagctgatacagaagcatccaggctgcaggagtacaggtcgcaagtgctgagcgtgggccttgggtgtgtctcatgggggaaaaaaaactgtgaaaaacctcagagtagcatcttcacagtaacgcacggacgatccctaaactgccttgtaaacaaaaatgagagcttgagtcagaggaagccgagacaatatccttcctcgacaacgtgcgagaaccctgacgtcccccagcaaaggaagacgttgcaagcaggcaaaatgcgtcgattttttttttttgtcagtatgatgatttttgcagccacttggctatggagagcagccgacaccccctcttacagccgtggatgtttcctggaagctgactcagtctgttcactggttgagctttgagtgaaaagataacacaggtctattgactcacacacatgttttaagatggaaaactttacttctgttcttggcaggacatggagagagggagggattccaaaaagtctcagcctccatcaaggcgtggcagctcatgccggtaatctcagcactttgggaggctcaggcgggaggactgattgagtccgggtgttcaagggccaacctaggcaacacagtgagaactcatctctgtaaaaaataaaaataaaacattaaaaaaaaacatgagctttgaagtgcacagggcaaa

SEQ ID NO: 172503 - DNA, 11497 bp, Homo sapiens
  Payload ID: 13913
  Gene Symbol: PURA
  Gene Name: purine-rich element binding protein A
  Uniprot ID: Q00577
  ENST ID: ENST00000331327
  CDS Start-End: 60-1028
cgactgaggcggcgggcggagcggcaggcggcggcggcgcggcagcggagcgcagcatcatggcggaccgagacagcggcagcgagcagggtggtgcggcgctgggttcgggcggctccctggggcaccccggctcgggctcaggctccggcgggggcggtggtggcggcgggggcggcggcggcagtggcggcggcggcggcggggccccaggggggctgcagcacgagacgcaggagctggcctccaagcgggtggacatccagaacaagcgcttctacctggacgtgaagcagaacgccaagggccgcttcctgaagatcgccgaggtgggcgcgggcggcaacaagagccgccttactctctccatgtcagtggccgtggagttccgcgactacctgggcgacttcatcgagcactacgcgcagctgggccccagccagccgccggacctggcccaggcgcaggacgagccgcgccgggcgctcaaaagcgagttcctggtgcgcgagaaccgcaagtactacatggatctcaaggagaaccagcgcggccgcttcctgcgcatccgccagacggtcaaccgggggcctggcctgggctccacgcagggccagaccattgcgctgcccgcgcaggggctcatcgagttccgtgacgctctggccaagctcatcgacgactacggagtggaggaggagccggccgagctgcccgagggcacctccttgactgtggacaacaagcgcttcttcttcgatgtgggctccaacaagtacggcgtgtttatgcgagtgagcgaggtgaagcccacctatcgcaactccatcaccgtgccctacaaggtgtgggccaagttcggacacaccttctgcaagtactcggaggagatgaagaagattcaagagaagcagagggagaagcgggctgcctgtgagcagcttcaccagcagcaacagcagcagcaggaggagaccgccgctgccaccctgctactgcagggtgaggaagaaggggaagaagattgatcaaactgaatgaaacccccacacacacacacatgcatacacacacacacacagccacacacacagaaaatatactgtaaagaaagagagaaaataaaaagttaaaaagttaaaaaaaaaaaaaaacctgttaactccaagggagcaccacccacagaacctccaccaactgacagtttctcttcttgacttgccacccatcgctggatgttgtccactttatccaccatataaaacagtaagcagctgctaaaaacaaaaaaaatacaaaaagtaataacattatatgaactgtgtttcctacttgattaaaaaatataaagaactgagtgtttatttccctaattaaccaagaacttttgtacacgtttaagctattattattaaaaagtgtttgcaaaatggtcaagattataatattgctgaattatataaaagtccttttcatgttgagctaacatttgactttagcacaaaaaagagatattttagaacacgtaaaataatatttttagtttttctcattttgttaccaaatttcaaaccttacatggaggttattatagtatatttgacaccctatatacctgtgattagagatgtgtatatatatgagggctaggcatgctgtgtgtctgagctttgtctaaatgttatgcagaagtttgtagagttaaaggtacgtaggtttaattcatgcaaggtaaacaataagtgctctcttttatacaatatgcattgcatctggaccttaaacttataaaaatggtcagtgaaacttctgtgaacatgaagaaattattaaaaaaggcatttaaatgaaatttgctaagttgtgatttttatggttggaaccaaagttattcaaatagtaaaaggaaaaagaaagaaaaaggagatctcccataatatttttctgcatctgtttgctttgactgagtaggcgttttgtcattattgtgtatatgagatgtacttgtatcgttcataatatattttttttattatgtgtagaaagattttaaaaaactaacgtgcagcaatttccagtgaacctgtacttggacatcaggtagtgagtctatttgtggtcactagcactgtctcctaaacttgtaagaggtctgaagctattctttgatttttgctagtgctattaacttatgtagacctgttaaaaagcagagcaacacaattatagttatcctactgagccatggattctgagttttgttttaaaagtgaaagccaagttggtgtatgtaaaggatttccatgtagctgtggtgctagttattactggctacattatatgctaagtgtatttgtgttccccaagtgtacaagccttctatcaaaagtatgttctataactcatatattcaaggtgtagggtatgaaaatgcaaagtttaggagagcactttaccaagctggtgtcctccaaactgaaattgtttgtaacgatagtcttttacaggttttcctttaaagatgtttgtgtgcttttaattgacaactaacttcttgctgctgtatagtaaaatattaatatatttttatcattaaactgctgcatgactatcatctttgagtgaagagaaaatgttataaaaaagatgccttaaacagtacattttggtttggaattctgtagaaagtattttggtaaaaaaaaaaaaaaaaaaaaagggtcttgtctgacagagagttctggggatggaattgtttcttggcaaatccagccatatagatctaactgctgtatgtataagacaccacctgtaggagcgggaaggtatcagtgcttcttatattgtaaagcattggcctaggaaggcaaacagttgtctttttgaaggatttttttctgctggtcctttgggttttgatttgatatttttatgctccctggttgagtgtgttgtcttcgtttttgagatctactgtatgtgttgaataacaagctattttcattgtactgtgcattttcccattaaattgtttgcttttaatattcaatgttaaatatgaggtgaccgtacagtagttaggagtttctttacttacaaaatcactggaaatgattaaattgcttttccccctccccagaggtgcatttttcttatttccatatagtaaagttgagcttttacagtgcataatgtgacatttggaatgcttatcaactgcatgtaaacattaataacctgcacttttttgtcttaaggtttgttgagctgttttgttcactgtactttaactgtgatatggaaaagactgcattctctgtgctgttactaattaggaaagagaattgctttgattttgtctcttgtttactatagcttcttaaagttaagccttgtactacaggttgttggagtactcctagatcactgtttcatagtagccagcaataagtagtgcaagtcaacaaaaacacagcaaacttaggcaaagtgtcctttctttgagatgcgagttctttcatgaggttttctttagggccagagttacctaaagtgaagcctttcttatctatagacttcagattctgcttggaatcccaccggctcaagaagcacatgtattgtgcaattaattgtctttacactaaaacagtttaatacaatctaactacgattttgaaaccagtgtctgatttatggtcagtgggtttaaaaagaaatccacatgcagatcttttaagacttaaaaagtgatcatagaaaagactaagtgactgtaaagatgctctttttttaagcatctcactttacctccccaagcaccctcccaaaccttgtcttccctcttctgttgcatcctttccctacccttccctcccaggtgctcggtactttacctagtttctatatatcagtgttttatgttggaatttttccttgtttttattttactagttggtaaaccctgtttatgctgaaacaaataaggaaatggtatatttgaccatatgtgttattcatagaagacagtatgatcaaatgtgccaaaaacaagcaaacaaaacttaattcctgagaagtatgccttatttttattgatctgctttgtcttacaattaaggtccaagagcttggttaaactgtattatttgcctaagtataaaagaaaacttgaactgcattgcaatattgacgttctttaaaatgagagacactgtcaagtaatttaatccagagatcagccaccagatttgaaatgcttatgtatgtgtgtgtgtttggagttgtttttttcttttaaatcaccaaattttttttaagctactttttatttgtgcctcctatttatcatgctgatgttagaagcagcagtcatccagccacagagggagctaaagttaactaaccagaactgtagaaatcattatacatgcctttgacaacaaaggaagttcataagaaaagccatgtcggcttttcctctactagatacagattggaggtagatgaatatttgccaaatggaaaaaaagacaatgctagtcagaaaagacaaactgttttccagcttctcaaaaagccatggagagtagaaaccaaaaccaacagggaaataaaaaaccttgaaagtctcactttctagttgtcccatgcaggggttgaaatttgattccaagcggaaagtatattatgttttttcaggccttcacatctagagagatggataacttccaatttgatttttcaggtaatagagaaagctgctagtaattttaacccctgcctaaagaagacatatacttcatttgggagcaaatacttattgccttgaaaagtagcactgtaatagcctatgataattagttgtagaataacctttatccctttcaaactatgcaaattattaaataagtgtaaattaggattcaattaaagatagttgattatattgcaatcagatggcattcacaaacttaactggagcatatacaaatatattagtctaagttttgtatgctaacagaaagatataatttagctacctattctaaaaatggtgaatattattaatattgtataataggagtgggaagactgcctccttttttgaagagagagattaaggatttttataattgtttttcatcaaattttaatatttttgtcaaatttttaggtatttaatttgtaaaacagtttgctttgtactggcatacagaaaatagggtattgattttaaactttttgaagccaagtgatcaagtacatttgtaataaaagtcaatggatctatatcagttgtactcactgttttcatttcttattaatatagggatgctgtactttttcttaaggaaaactgaattaaatttgggtggaagggagggggaaaagataaatccgttgataatgagaatctgggtgggtatcatggcccaagcactttatatcattttttaagtcagttaagatttgatatattttaaaagatactatgtcaacttttttcttcctattttcttatgtaacttgacgtttggggggattatctcattcatttttgtttgtgtgcttttaacattttgtgttttggccctgttcaaactttctaaacacatttttcttttatgacattttgggttatctgctagacctggtgaccccaccatatgggcatgattatttttatcttccacacatggttcaccttcttgtctacaatattcccactcattttttcaggttatatatacacacacatttccagataattttagaatggggctatctgaaattgatggtctagtagctttcatagctccacaattcattttattttacatgtgaacataattttaagattttcttcaccataaaaagtgagataccaagtctaatgacttttttccctttttaaaatcttttgagtatcagaatgagaccttgctatctatgtaaaaggatgctaaaacaagggcatctgtagcaacttaggtttggaatagttggtgatgactctgagtataacatttatagtttattatccctaaatttgaatatcttcataatttggagagagatgtatacacacacatacacatatatatgtatatatacattgtgtgtgtgtatatgtatatagatacacacatctccttgagagtggaataagtaggagagataatttattggaattgcttacatagataaattcaccaaagttatttgtgtagatttgttaaagtgtatcaatttttaaatcacaatatttctgttttcttcattgcatattaaccaaattttggccattcataagtatgctataaaactaaagtgatcactgctattcacgaattattatagaatcttctttgcagattttgtgatatattaagaaaagctgattttaatattaatatttaagaagttatttgatcctgaaaacctaaatttaaggtataggccatttgacacgtcctttttgaacagaaatttcattacaggctaagtgaaaataagccagaattagcatgagtcaggtagaatttcatgataaaagaacaaccagatgaaataagaaataatgattggtttcaagccaatgaatctgctaagctaactaccaagttttgatgttgaatggtccaggcaatttatgtctttaggaaagctgagtgtggcaaaggtcacttgttaacatttttcttaacaagaatgtcataactactcattcatttttattttgtccccacgtttggtatttgttttgttttgtgtttttccttcctgatgtcctttgcttttgtggaagattgtcctgttgataggcagaaacatggtggtgatcctctatgtaaaatatagttgcttcttacacatcagaagtatttcactcattttggaatcacaggattttcatgttttcataaatacacacattgttttgataattattagcaattagcttattttgtagcattagatggaaaaatgtttaagctaaagagtttaattttcttgattttggttccactttaataattcaagaggcctccaagttcaaggaccaagtccttctattttagaattgtgaaaaacatggaaatactcttgttagtgtgtgttttggtctaaggtagattattaacacagaaggatcctaggaggatttaagaaaatatgtccttatcgtgaagtggcagttaaagttatgggacaggtgaattacctattcatcttgactagctcaaacaatgatagccatcagctaatgacttatcagacacatgttgagtttgggtcaaactcccattcagctggagtggattggcaattttaaatgcaggtagttggtggtggtacttgacctacctccttaccatgtacatctggcatcttctctctcctatcctttttctttgtttctctctccacttttactcttgctgtaggcctaccagtggcactcaagcttacttcttcagagagaagtaaagaaatttctgactcctgccttagaacatagctaactgatgatccagaacaatttcagtattatgaggtaactgggcagtttttttctgattgctattttccccatagtcttaagctggcagtttgaaggtatctaaattaatgttaagaaacttgtgaactgaagagagtaagaagtatgtgtattttaggtaagttactgggaactgagacttactggtttggaaattggagagtaggacgaggagagctgtttaatgtgtttgtggatgggggtttgagaggtatatagagaatggtttggaaataaagtgagaggaatttttactagaggtaggaaaaggtactatgatggagtccgaatgagagttatttgctaaggaaatgaagttgatcttcactaaggaagtttcaataaagccagagaaaatgggtccctcattgattatgagaaagctgttagttactatagctagagttatgataatgatcatgcattatacaagtctgttttcatgtataggatgtctgcttttctgggacaaattagcacaattgtggaatgacagcttttctggtcaaggcaagtggatgctggggagttattattttgaggaaaagaaaatttcaagcttttcaccattattctttttaaactatcagaaatatttatcacacatactatctattttcttgggctcttgttacaatgtagtttacctttacttttcaaatggtccttagatcaaattatttgattttgtactccacaaagacacatattattccttgcttttatagaattttgagactttggcccacacaaatttcttagaagacaataaaccaggtaaaaacactaacttgcaattttaggtgtcttttttatttcttttacatttgcatccgtagcaaccatttaaccttgtagaccttatgaggccctcaataatactgtatttctaaaattagacaacataccccccaaactcatgtttctgtttccctactttctctcttactttaaaattgtagtattcccaagagttcagtggtggcaaatgttaataaaataagttagtacattttggaggttcttatatcctttgtagggtaagctgatagtgtttagatttctgttcccattattccagtagtgttttaaattatttaagataaataattactgtaatgtttgtttttaagttacataattcaagtatgtttggattaactctttgttgtcaaatttagtatggatttattcctggtgatttggacagattactttgaagtttcattttactcacatctctatatattagtgataaaaatctcttttaaaaatagcaaaaaagtggttctgattttgtactttgaaggtaatttttcttttttacgaatgtcaggttcattaacaatagcaggattatttttactatagcttattttgtagagttggcactttagtataattttcacattttattgtgtcagattttaaattataatagttatatactataactcatttaagtcaatgcaaagccttcttaaatagcccctcccttagaaatttgtttaaaaagaagtgaattcccaaacctgtgtcaagaacttgtgatttaaatgactgtgagacaagtccttgaaaggcttaagtctagtcagtggagataaatgatagcccatttccatgctgcatatagttgttagggtttataaagttgtcaatgtgtaaaagtgcaaaagcaggaaagactaaagttgcctgtaaaatttctagttttcattatttgcactatttatctttgcacttgattttttgaaagttaaggctagtcactttcacttttgtttctagtcttttctaatttcttgcagaattgtgttttcaatattccacccaaagcaaaaattatatgcaattaaaaatattttataaggccaagaaaatatttcttaatgttagctgtataaaacaaaaatttgttctgataaaatttttaatatgggcctttatttgccaataaaatcctttgtaaatgtgagctttattaaactgtttaaatagacaaagttaaagcttaggatagggaatatatatgtatgtgtatatgaaatgatgtcttcgagttttaacttccagcctgagatggcctagatttggtgtgttagtttgtttcactgaagtcagtgagataggagtctagctgggtacatgcttaaaaagctggaagtgaagtgggtggcaagtggcagctccctctttcatgtagttttccataatgttcatatagtttccttatggtctaagtgttacaactggttttcaagttgttatattgaatattcctttttggaattcagggttgaatcactttgagggggaagggaagcaagggcaagagactttattttaaccagatgcggtcttatgacctcaaagatgtgctctagaaagaaaataacaaaaagtgtacctgtgaacatattttttgtcttggtgatattatgcaacacagtgttcagaattgcaaaaaaatttaaaaattgatagttttatcaatggaacagagagatgtgtttttggctaaaattattttttgtaagttatttggttatttcattttatattccctttcccatagctttgtacacacctcatacttaaaaccaagtgagaggcctcttttcagatctggtttatttttggaatgcctgagtgtgtttccagattggggggggagaggtggtgttttactttttgacatgctcttagcatgttttgctagtcattctggatcttatgtttgcaaattctgttgaacattcagtgatgtatttgaaatgagaaagtcctttataacatagtgtgaatgtttgtggccaattcaattgtggaatcttatggctttgtttttactttgggtagaagtttaacttccattgttcagattttaggtttatctagtgaaattgtgccaggtagttgtctaaatatggaccaattttgggaaatgaagattaataagtgtatatttgattctagataatcctttactcaaaatcataagttaaagattcacatcattaagagttatctaacttttatgttgtcaaatctttaaatgtggatgatattcagcattctatctatgaatttcctttaggaaaagagaaaaattcagtctccaaaccttttcttggagacaaaatttaccacatatcgaaaatgaaaaaaatttagaaagcgatttgattattttttaatggagtttaaccagcttaattaatgatttttccagtttgaagcacttattttcccaatgtgaataaagggaaaagatcagcaatttgtccctggcctttttcgaggccatttttagttttctgcccccatttcccagtcctggtataaaatgaattacgggtatccctctaagtccctataaccctttttgggggtcacagatatctttgataatctgatgacagtgtgatggatcctctacccaagaaaaaaaaaatgcccatccctggataattttgcatacaacttcaggggcatcacacatcttctgaaacccaagttaaagatctctgctctaagtaaattgtagagaattttagtgcaaatcgttgataaaattaggaaccaactattggcttaaaacctttcatattggaattattgttagatggtggcccctactagcaaaatgtgacattgcaaccagcttcgttagacattataacaaccagagagaagggaaaaaagcaaagttctgaaagctatttataaggagtcagggcatctctagacatgggagccttcctggttcaaggcaggggtcagggtgcctgacaatttctagcagggtagagtttgataaaccacaatgctcaggatgccaaggggttagccattatcttaaccccttcctcaccaaaagattttagttttgtctgttgggaaacaagatgtcactagggaaaaaaa

SEQ ID NO: 172504 - DNA, 9069 bp, Homo sapiens
  Payload ID: 13914
  Gene Symbol: PURB
  Gene Name: purine-rich element binding protein B
  Uniprot ID: Q96QR8
  ENST ID: ENST00000395699
  CDS Start-End: 14-952
ggcggcctagaagatggcggacggcgacagcggcagcgagcgcggcggcggcggtgggccgtgcgggttccagcccgcgtcccgcggcggcggcgagcaagagacgcaggagctggcctcgaagcggctggacatccagaacaagcgcttctacttagatgtgaagcagaacgccaagggccgcttcctcaagatcgccgaggtgggcgcgggcggttccaagagccgcctcacgctgtccatggcggtggccgccgagttccgcgactcgctgggcgacttcatagaacactacgcgcagctgggccctagcagccccgagcagctggcggctggcgccgaggagggcggcgggccgcggcgcgcgctcaagagcgaattcttggtgcgtgagaaccgcaagtactacctggacctcaaggagaaccagcgcggccgcttcctgcgcatccgccaaacggtcaaccgcggcggtggcggcttcggcgcgggccccgggccgggcggcttgcagagcggccagaccatcgcgctgcctgcgcagggcctcatcgagttccgcgacgcgctggcgaagctcatagacgactacggaggcgaggacgacgagctggcaggcggcccgggaggcggcgccgggggcccagggggcggcctgtatggagagctcccggagggcacctccatcaccgtggactccaagcgcttcttcttcgatgtgggctgcaacaaatacggggtgtttctgcgagtgagcgaggtgaagccgtcctaccgcaatgccatcaccgtacccttcaaagcctggggcaagttcggaggcgccttttgccggtatgcggatgagatgaaagaaatccaggaacgacagagggataagctttatgagcgacgtggtgggggcagcggcggcggcgaagagtcagagggtgaggaggtggatgaggattgaaacgggcagcttcccctacaggcctccacccaaccaccatccccttggctagagaattccctttcctgctcatccccagtgagctagtggagagggagcaagggaggccgcagagggaaaaaacaaaacgtaacacagttaagagaaataatcgtaagagaacagtgacggacaacttgagaaaagcagtcaagttccaaggaactgacagcaacctgcaaagaggaaaacagcatctcctcacctgcgtaaaattgtctcagcttctgttgtttctcaactgaggttcgtaaacccatcaggataatccctggagggaatagatccttgcacatccagggcaagaaacatgtccaagttacccagaccattgataacagttgcatttaggttgcacctgggtaatctggcataaaagatctctctaggcctcactgttgcggtgtctatcccttcacctccattgaaatcagcattttggatctaggtcttcatggaatccttgagaagagaggcctttacaattacccagttctgagggttcaggttcacgaaaagaaatgcaacttgggataatcatgaacaggttaaagataagatttcaagaagccatctaagaatacagaaccaaattggatccatttttttaaaaaaatggttttgcatggaacctggaccaaggcaaatgtcttttcttcgcagaattgttttccaggatgccagtggattcagatagcaatgcttggagtagaatccgttactaaaatagtttcaaagttgacaaaaaattttcaaagataaaagcagttttacattgggggttgctgaggtaggcacaagaaaaagtcaggcataaagcacaaggcagactgtttgagtggattggttgctgctcactaaagttgttcccctgatctctaaatatggaggtcattaccaagaaatgctttggtatgaatgagagccagatctccactgtgtgagccagtgaattatggctaattcggctgttacagccactggttggctggattttaaaccataaaacttgaagattacctacaaaagtaacagtgtggctataagcctgagctttaatggatatacatcctcacagaaaagttggaaataaccaaaactgaagtcttaatttaccttcagtttaatctgtggatttgttcaaatactaaagatcctcaggtccagaattccagcatcatttattcttttaaaatttttaagaacttgatccattgtatcagtacctcacaatcagagttggcaaatgatggatgagtgattcaagcagtgcacccggtggaagctgaaatccatctgtgaatggaactgaagtgaacgtgaatatgctgactatatcctggaagcatttttataccatcttgaaatttcaacaaactggcttttgccagttaatccagctgtctttcaagaataaaagttggggttttcaaggatcgcctcttctatattttaaatggattttcagtagaaatgatttttactaatcaagttaatcccaccccatcaaaaggtattcctagaaatgtcatagacctaggtaactttgaattgaatgggagctaacgttctttccaaagttttcaggtattctttgtgtgacaccttctcaaccaggaggcaagtaaccccgcctccacaatcttagtattttttttaaactgcatgcctgccccttatttgagctgcctttttaatttattgcatatcctttttattatcttattttggtattattcaatctatacaatctttttgtatttattgggaaatgagtaatatacaaaaaggttttcatgtatttgtggctgagagggcgggaaataattgtgtacataaaattaggcttttttaaaaaaatagattatgatgcagaatattgttgatcttagattaaaaagtggaagagccacaaacattggtgcccttttcagactatttctctactctcatcatccacagtagaatttttaaacagatttttttaaagcttttcttttaaatttttctccgttgcaaagaatgtttcctaaattgtatgggagcaatagtatttttgatgttttaatgacatccgtatacttgtactgtattttgtactacaaggcagctgtttttcaataatgtcctgctgtatttacctacgtgttttgagtgtctatttctttgctgcggagaacaaattcctaaatagttttagtaaaggagctgagaagctagcattaggtttgcagaaactatttaagtttcaactctgaggcagcaatgaaaatttaagttgcagctattagttgattgctgtaactttttcattttcaaaccatgtacaattcttgtatagaccaacttgttttcttgcttcagtggtggttctgttgctcagctgcagtgagccagttcaattttgcaaaggtgcagtacctctcctttttaaggggttggtttattcttttttctttttgtttggctgaattgcagtaactagccttgcctttctattctgtagaaatgacagggtcttcacaatccttcaccagtggctactaagctataattagctgaatagaaagaatgtggaagtggtctgaggcatatagagtatatgccaagaacactaccatatatggcatcagctttggttaccagagaaattttcttagtcattagaccatgtaacagtaatatatcatatgtaaatctttagatatcaatttgaaaatcctccaaaaaaaggagcaaagaatgcataagctatgtgttggcaaaagtaatttatattaaaattttgacctgcctatgtaagattaagtggtaatgtcatagtggtgggtttttaagtcttaaccaatctctaaggtttgtttctcctgcaagggatggttcatggcctctcttcccactgcaggaagattgcagaaggctgtggattaattgtagcatttcactgatcttcactccagtcactagggacaatagaaacctgcaaaacacagattcattcgtaaatattattaatagcttattaaaggaaatggtctttgttaattccagtcagataatggcattgtacagacatgggaaacaaccaatttttttgtttttcagttgttgctatgaatgattttgagcctttttttttaagcttggcaaacatcccagctaatcaaaatagtcatattcctgagaagtaggaaactaaaacttcttttcatataattgttagaaggtttgtttcccaaactaccatagttacaaaggtgaaaagccaaattttaggaacagaatcaaaagaataaaaatctgtgaagagatcctactactcttccttctatgttttggttttggtttctattgtccctatcatttcagcaagtggaacagcagcaagtttttcagtgcatatgctgcacaagaacaaaatataaatctgtatggcaccaaaaatcaaagtgaaaaccaaaccaaaaacccaaacaccctatgtaactatcggaggcatatacgtggtataaatgactgtagctgtgatacacacatggctacttgtcacatcactttccataattatttactgcaaaatgattgagaggcttttggtgcaggcagccgttaacctcctgcttcctttgttacctctggattactttgcagtaaattgcaggtcttttaagagatttaagcttcagttttctcaaaacaaaacaattatcctgtcttatctgaagatgcagggttgtgggcaaaagaggctggttataataatgccctcatattgagtggtctgtaaacggctgcacacttcaggcactgtagttgctgaagatgctttgttaaatgtgaccttgactggctttacaggggtgtagaatgtaatctacacaaggtgactttgcatctatcttgctcttgaggtggatgaaattgagaagctggagtgtgtaagccatgcacataagtattcttcactgtaaattttgttttcatttttaacccaattatggtactttatccaatgcacaactgatctctcagtagatattcatttgaaaatagtgtggccttgatcagtgagaaagggaaggagaaaagtgacttttttgcttatgtagaaatgactcatttgctgagagtttgtctttctgcagcactcttggtatatagtgatcggtctcctttttgattggggaaagttaatgtttttgaccctggagttaattcagttgagttatcttatatttttaggaagtatcagaattgctctgatgaataacaaagttgactgttttgatgtccaatctcaggttttagaatatagtggtgtaaagtcccactatttttaattcttaaaacaactttaatttcgtacaccctaaaagtcacatgcataaggcctgttcagagagcagagcctccatctttttgctccttttctactttgtacttcacttgaaaaaatatcaagtgactttacattgtatatttccattgtaaccctgacatttctcaaagataaagcactttttgatcatgaaatacatgaaatctttgtgtgatgtggatcatagtttctcaggctcccttagataattgcttatgaatattgttctaactctgtgtaagaagagtagaaatctttgctaatgttagaaggtttgtattattgatccagaatgcattttgctagtttccaatggatgggagagtaaataatgctgcattcacaatttaataagttactttcccttgagccttaaggtaactttttctttcctgtcaactacagcactgaagttatagtaagtgaatgagattatcagttttcagggttggttttagagtactgtaaatcaattagctgtcttcctaaagagttacaactcccattcagtatactggataatgggtgtgtgggtggggctggggagggcgggagatagtttgtagaaaagaaaaaagaaaaaaaaaaaaacacatttaccttaagaaaatacagacaaaaaagaataaagtatgtgtcatatgctccatttgagattccaaatgcggccgggcgtggtggctcacgcctgtaatcccagcactctgggaggctgaggtgggcgggtcagttcaggtcagcctggacaacatggtgaaaccccgtctctactaaaaatactaaaattagccgggcatggtggtgcatgcctgtagtcccagctacttgggaggctgaggcaggagaatggcatgaacccaggaagcggaggttgcagtgagccaagatcgcgccattgcactccagcctgggtaacagaacaagactccgtctcaaaaaataaataaataaattccaaatgtaaggtggaaatggcagattataacttcatttcccccatttttaacttagaaaaaacaaagtccttaattttcaagtattagccccccagaagtttcagcagatagctggactcttgaataatgatttcttttgatatgtctgactttgctatttaaagtctcctttcccagccctcagtcttaaaactcagttttattactgacggatttaacagactcttacttgaaaattgtccaattatcagtactgaaaattagatttggaaaatgaaaaaataataaaatcgcatcaagaaaacttattaccttagagattcccaattgatatctgtacccctgatccaagtaaggcctttatgaatgtattttatatttcctaaagaaatagggaatatgccatcagtgtaatcacctctattcacagtcatttaatttgaaaatctaactcatgtctcttgaattagacattccaattgggataggtagagtcatgttaaaacaatagaatagcaactgccatattggtagtttcactgctcaatatgatttctaataagagcagagctttattggaagctaaaactcatttttctccatagatgattctaacagtttaataaaaaagtataattatactttaagtgtcaacagattttgagtctagaagcaaatttcattttccttgtgttatatctaatatccattgacatgggtaagaaaactaattatgtctttttagtatgatgaaatgtgggcccagagtattggaaagaaagcaatagccctattcagtgtccactaggatggatattgcagaaggcatgagtttgtccttttttcccccttaccttaaataacacttcaatagctaactttttccaaaatatccatttaggccatctcttatttcttaaagccaaatatttcgtccccagtcttaactctgagttgcaagatcaggctggttggaagaatctttatatttagaaataggatggtgagtggtttgtttattctcttgtaaaattcctttttcagagacataactgcagggagagtcccaagagaactgaagaactggattatatcattaaacacatttgtgttgtaggaatttgggagtttcattttgaactgataagatattagacataaacccttgttccagcccacatgtgtcatccctgtgtacaaaagctctctggattctttttttttttttgagacggagtttcgctcttatcgtccaggctggagtgagtgtagtggcttgatctcagctcactgcaacctttgcctcccgggctcaagcgattctcctgcctcagcctcccaagtagctgggattacaagcatgtgccaccatgcccagctaattttctgtatttttagtagagacggggtttcaccatgttggccaggctggtctcgaactcctgacctcaagtgatctgcccgcctcagcttcccaaaatgctggaattacaggcatgagccatcacgcctagcctactctctgaatttctaaaagtcagtaggttgaccaaaaagtctagaaactggctttaagtcagtatgggacgtacttataaagagtccatggttttgcacgtttcggtagacaagtaaatctgagttatttttcaatgacttaccaatatttgaatagtaactaagatcgtcagtgtatctggacttctttttttgaagttctaaaacaattatagtagggatttattattttgggcctccatccagatgtttttccaagatcatttttaaaattcatttgtcttctgtttccagataacatactttccgttctataggaatcttcactgccaatcatagtatctaccagtggctttcttagactattcactccaaagctgggactgatgtcctgccagtagagaatctacagaaataatttgaatgaattaaaaccaaatcttgatagcaggagacagcttcctgatctagatgtacaattagagtttaggttggaaattactttaaaatgtgttttttggggatgtcttcaatctctgtgtaaatacccacatgcttatgcattgtaaaccaagtgtgtattcctgtgtatgaatttgtagaactgatttctgcttcaagagaagctgcacctttaattttataaggtcccctccacctgtaaccctataaatgtctgtaaataaaacactaaaatttgtagtgataggatcaatttgggaatatctgctgagagaccaaaaagttcatttttttaagtaccttggttaaagagtaaagattattcctcttattttttaaagaagaatgcactttaacaaacatagagctgcatgggcaattcaaacaaatctgtgaagtgcagtacccattcagaaatcacacttcctgaaaaccgttcaaaagcagagtccagacgggctgttgatctcactgcctgtaggttgaagctcagattctgatcaattttgagaggagcagggctgcttcaaaagagcaatgtgaatacagtcagaagcttcagactggtctgtaaaaatggcgggtcccgtatttaccactaactagcaaaactgacagaaaaactcacagagaaaaaatgtaagaatccttcctgctggtgtgcactccttacaatagacttttgcaaatggagttttacagtctatatttaaaaaaaattgtatgtttgtaacaaataaagtatgcagaaaagtgaatgacaa

SEQ ID NO: 172505 - DNA, 2693 bp, Homo sapiens
  Payload ID: 13915
  Gene Symbol: PURG
  Gene Name: purine-rich element binding protein G
  Uniprot ID: Q9UJV8
  ENST ID: ENST00000339382
  CDS Start-End: 934-1902
ctttctcgcggcgctgcaaccctcccaccacagcccatccagccccgcccagcgcgccgcggtgcgcatgcgtggaggccctcgctgccgctgagcacctcgggaagtgtagtctcttcgcaggtgcggctgggcagctagagtcctgcatcccggtggaatccggagaagtgagaacattcccgccgcccggtcctcattcccatcttcccacctgtccagtcccctcgcactcccgctgcaccccacgcgccgggcttcagtcagagagtgcactgaggaagagcggagaccccctcttcccctcagcaggctgtgccgggggaggcggggtccaccgcccgccccccgccgtcgctctccccgcctccccttccctcccctcctggcgggtgcggggccggtgtccgaagtcaggcggcggcccccgcagcggccgcaggaggggcggctgcggtgggcgccgcgggcgatgcccctgcccggctgctccggcggggggcagtgcgagcggcggcggcgggggaggaggcggggggcggcggctgcggcggctgcagcagaggggccgagagctggcggtggcggcggcggtggtcgtgaagggcatcggcggcggcggtgatggcagagatgatgtgagtgcccgccggctggagacctggggccgcggagcgcgggacgggcggcggcggcgtgcgggagcggccccgggggcggcggagggatgcggggagcgcgggcagagccggagcggcggccgccaaccggccggcagtggctggagccccgcgctgcggcgccgggggagccgggcccggcgtgggggtcgcgggcggcggcggggcggtcaggccgaggggcgtctgcgattgttctcaacacccctcccccaccccatcccgtgtgtctgtttgttacttgcagctgaagatggaaagagccaggcgaaggggaggcggcggcggccgcggccgcggaggcaagaatgtagggggctctggcctaagcaagagtagactctatccccaggcccagcactcccactacccccactacgcggcctcagccacccctaatcaggccgggggcgcagccgaaatccaggagctggcctccaaacgagtggacatccagaaaaagaggttttacctagacgtgaagcaaagctcccggggccgcttcctaaagatagccgaagtctggatagggagaggccggcaggacaacatcagaaagagtaaactgaccctctccctgtctgtggcagcggagctgaaggactgtctaggggacttcatcgagcactatgcccacctgggcctgaaaggccaccggcaagagcatggccacagcaaagagcaaggctccagaaggaggcagaagcactcggcaccctccccaccagtctcggtggggtccgaagagcatcctcacagtgtcctgaaaacagactatatcgagagggacaataggaaatattacctagacctaaaggaaaatcagcggggtcgcttcctacggattagacaaaccatgatgcgggggactggcatgataggttattttggccacagtttgggccaagaacagactattgtcctcccagcacaaggaatgattgagtttcgtgatgccttggttcagctgattgaagactatggcgaaggagacatagaagaacgaagaggtggagacgatgacccgcttgaactcccagaggggacttctttcagagtggacaataaaaggttctactttgatgtgggctctaataaatatggaattttcctgaagctcacaaattaccccaaatccagagagaatatcaacctttttcactgttgtcaaatcaagcataaggaacagccccatgatactacaaaaacagttgaggaataaggaataaatctcttatgttacacctcagaataaaggcattcggtgaaagaaatgaactgaagttcatcatgaatgtaaggcctcagtacttgacattcctccacggaagggaagacaagtatcaacaccactggcatcatttccaaactgatcttatgttgaataatttccaccacattgaagtacctttcgactctatccagtttttgggttttgttttttttaattcatcaagcctttcgttttcaaaccaccatttgtcagccttgaggtagagagacatatagatttgaaaatactttcttaagagatcatgtaactatataactctgaatttaaaaattgaggggggagggataatttcaacccactgcctcttaccagaaacatttttttaaatctgtaactgctttagtgttaacagggtgcaaggtggtttttgtcccgtattgttcttaaaaggttctcatttattgtgattgtattgtactgtatgagaacaaatcataaattgccttgtattgtttataatagaccataccacgtactacttcagtttttatgttccaagtttttcagtgatgcatgttaacagttaggtcctaaaattctgtggtgctaattctcccatacccaatggtgcttttgtggatgctaactgcacacatgctgaacaaagcttgaagtttaaaactttcctcccttcctctgtttatatgaagtaaaatgaaataacttgaatttgtctcaaagtatcactgacaatctaataaacttgtttatatgtgtga

SEQ ID NO: 172506 - DNA, 2875 bp, Homo sapiens
  Payload ID: 13915
  Gene Symbol: PURG
  Gene Name: purine-rich element binding protein G
  Uniprot ID: Q9UJV8
  ENST ID: ENST00000475541
  CDS Start-End: 934-1977
ctttctcgcggcgctgcaaccctcccaccacagcccatccagccccgcccagcgcgccgcggtgcgcatgcgtggaggccctcgctgccgctgagcacctcgggaagtgtagtctcttcgcaggtgcggctgggcagctagagtcctgcatcccggtggaatccggagaagtgagaacattcccgccgcccggtcctcattcccatcttcccacctgtccagtcccctcgcactcccgctgcaccccacgcgccgggcttcagtcagagagtgcactgaggaagagcggagaccccctcttcccctcagcaggctgtgccgggggaggcggggtccaccgcccgccccccgccgtcgctctccccgcctccccttccctcccctcctggcgggtgcggggccggtgtccgaagtcaggcggcggcccccgcagcggccgcaggaggggcggctgcggtgggcgccgcgggcgatgcccctgcccggctgctccggcggggggcagtgcgagcggcggcggcgggggaggaggcggggggcggcggctgcggcggctgcagcagaggggccgagagctggcggtggcggcggcggtggtcgtgaagggcatcggcggcggcggtgatggcagagatgatgtgagtgcccgccggctggagacctggggccgcggagcgcgggacgggcggcggcggcgtgcgggagcggccccgggggcggcggagggatgcggggagcgcgggcagagccggagcggcggccgccaaccggccggcagtggctggagccccgcgctgcggcgccgggggagccgggcccggcgtgggggtcgcgggcggcggcggggcggtcaggccgaggggcgtctgcgattgttctcaacacccctcccccaccccatcccgtgtgtctgtttgttacttgcagctgaagatggaaagagccaggcgaaggggaggcggcggcggccgcggccgcggaggcaagaatgtagggggctctggcctaagcaagagtagactctatccccaggcccagcactcccactacccccactacgcggcctcagccacccctaatcaggccgggggcgcagccgaaatccaggagctggcctccaaacgagtggacatccagaaaaagaggttttacctagacgtgaagcaaagctcccggggccgcttcctaaagatagccgaagtctggatagggagaggccggcaggacaacatcagaaagagtaaactgaccctctccctgtctgtggcagcggagctgaaggactgtctaggggacttcatcgagcactatgcccacctgggcctgaaaggccaccggcaagagcatggccacagcaaagagcaaggctccagaaggaggcagaagcactcggcaccctccccaccagtctcggtggggtccgaagagcatcctcacagtgtcctgaaaacagactatatcgagagggacaataggaaatattacctagacctaaaggaaaatcagcggggtcgcttcctacggattagacaaaccatgatgcgggggactggcatgataggttattttggccacagtttgggccaagaacagactattgtcctcccagcacaaggaatgattgagtttcgtgatgccttggttcagctgattgaagactatggcgaaggagacatagaagaacgaagaggtggagacgatgacccgcttgaactcccagaggggacttctttcagagtggacaataaaaggttctactttgatgtgggctctaataaatatggaattttcctgaaggtaagtgaggtgagaccaccttaccgtaatactattactgttccattcaaagcttggacaaggtttggggagaattttatcaagtatgaagaagagatgaggaaaatttgcaacagccataaagaaaagagaatggatggcagaaaggccagtggtgaagaacaagaatgcctcgactagagtgaaattgaactccatcaggcaaaatttaaaatcacaaattggctaaaagtactgatccattatcctttgaagaagtttttcctcttttttggcccgttgttattagtaatacctctagtagttgatacttcaggaagtctgattctcatgttatgttacacatagatcactataattcttacgggaattccaaccttcccagagctaaatagtttagctgcttcaactgctccagactattgaagtatgcaaatcagcacaaaatgtgacattctgacattctaaataccataactaagatttacattgcactatgacataatcccgaaaaaagatacatatacttaaatagaagtgtgactttcccccaaaagtatttcaattctacttcattaaaagctgctaagcttacctgtagggcagttaccacagaaacagaaattgacctccggtatatataaatatttacttataaaagtacaagtagacgtatattgtccgttgaataactgaatataccatcaaaggatcaaatcttattacctaattaaaccttaaaaatataatgtcataatatttcttaagaatactatagtattctataatttcaaactttgtggtaaccctacattttatagttgccatatcaaagccatgggagagttttaattcgttattctaagtttagttacaatcccttctttacctctacttaatgttccatatatttttattgactttccaaagtttcaggaattacttttatgtcacattgagtgggaggcttcatccaatggctttgctatggaaatcttggtggtgtagcttttcatgctaatttaaagattgcaagaggtttcttccccaaaatatatcatggactcaaggtgttata

SEQ ID NO: 172507 - DNA, 614 bp, Homo sapiens
  Payload ID: 13915
  Gene Symbol: PURG
  Gene Name: purine-rich element binding protein G
  ENST ID: ENST00000523392
  CDS Start-End: 124-614
gggggaggaggcggggggcggcggctgcggcggctgcagcagaggggccgagagctggcggtggcggcggcggtggtcgtgaagggcatcggcggcggcggtgatggcagagatgatctgaagatggaaagagccaggcgaaggggaggcggcggcggccgcggccgcggaggcaagaatgtagggggctctggcctaagcaagagtagactctatccccaggcccagcactcccactacccccactacgcggcctcagccacccctaatcaggccgggggcgcagccgaaatccaggagctggcctccaaacgagtggacatccagaaaaagaggttttacctagacgtgaagcaaagctcccggggccgcttcctaaagatagccgaagtctggatagggagaggccggcaggacaacatcagaaagagtaaactgaccctctccctgtctgtggcagcggagctgaaggactgtctaggggacttcatcgagcactatgcccacctgggcctgaaaggccaccggcaagagcatggccacagcaaagagcaaggctccagaaggaggcagaagcactcggcaccctccccaccagtctcggtggggtccga

SEQ ID NO: 172508 - DNA, 776 bp, Homo sapiens
  Payload ID: 13916
  Gene Symbol: PCP2
  Gene Name: Purkinje cell protein 2
  Uniprot ID: Q8IVA1
  ENST ID: ENST00000311069
  CDS Start-End: 292-702
gacatcacacctgagagtccctggggtccagtcattgctgctgggcacagcgaggtccaagctcaggtcgccctgccccctacccaccatgccagatccagcatcgttgtgggcaaacaattatctggatgatctttatggggcttaagcttgggtgggagcagatggggcatgagctggggatttggggatggggggaatccacacccccacgtcctggacgtttaaaaggccctctctggcactgggccggggcagaggccagcagaaaagtgactggagtccagggacatgatggatcaggaggagaagacggaggaaggctcaggcccctgtgccgaggcgggctccccagaccaggagggcttcttcaatctgctgagccacgtgcagggcgaccggatggagggacagcgctgttcactgcaagccgggccgggccagaccaccaagagccagagcgaccccacccccgagatggacagcctcatggacatgctggccagtacccagggccgccgcatggatgaccaacgtgtgacagtcagcagcctgcccggcttccagcccgtggggtccaaggacggagcacagaaacgagctgggaccctcagtccccaacccctgctcacccctcaggacccgaccgctctcggcttccgtcggaacagcagcccccagcccccgacacaagccccctgagggcctgaggcatcctgggtctcactcggcccccaaaaactgataaaagaataaaacacttaaatgaataacaa

SEQ ID NO: 172509 - DNA, 457 bp, Homo sapiens
  Payload ID: 13916
  Gene Symbol: PCP2
  Gene Name: Purkinje cell protein 2
  Uniprot ID: Q8IVA1
  ENST ID: ENST00000598935
  CDS Start-End: 17-379
aggatcggcggggaccatggcgggctccccagaccaggagggcttcttcaatctgctgagccacgtgcagggcgaccggatggagggacagcgctgttcactgcaagccgggccgggccagaccaccaagagccagagcgaccccacccccgagatggacagcctcatggacatgctggccagtacccagggccgccgcatggatgaccaacgtgtgacagtcagcagcctgcccggcttccagcccgtggggtccaaggacggagcacagaaacgagctgggaccctcagtccccaacccctgctcacccctcaggacccgaccgctctcggcttccgtcggaacagcagcccccagcccccgacacaagccccctgagggcctgaggcatcctgggtctcactcggcccccaaaaactgataaaagaataaaacacttaaatgaataacaaggaa

SEQ ID NO: 172510 - DNA, 660 bp, Homo sapiens
  Payload ID: 13917
  Gene Symbol: PCP4
  Gene Name: Purkinje cell protein 4
  Uniprot ID: P48539
  ENST ID: ENST00000328619
  CDS Start-End: 186-374
gcccctggtgctctcagatgtcggccaggcttgcagacaggtgaatgcatctcattggctccagggaggcatgatgccaccgggcagctctttttaagagaaaagccagaaccggtggagcagcgacccctgagcagtgttctctgtgctgagcggcgggactgagctgttgagttagagccaacatgagtgagcgacaaggtgctggggcaaccaatggaaaagacaagacatctggtgaaaatgatggacagaagaaagttcaagaagaatttgacattgacatggatgcaccagagacagaacgtgcagcggtggccattcagtctcagttcagaaaattccagaagaagaaggctgggtctcagtcctagtgggagaaccccctcctagtccacctgaaaacaccaaattcaaccatcatctgtcaagaaattaaaagaacaacaccctagagagaagtcatccacacacaatccacacacgcatagcaaacctccaatgcatgtacagaaacctgtgatatttatacccttgtaggaaggtatagacaatggaattgtgagtagcttaatctctatgtttctctccattttcattcctcctgcaactattttccttgatgttgtaataaaatgaagttacgatgagtgaattcaa

SEQ ID NO: 172511 - DNA, 683 bp, Homo sapiens
  Payload ID: 13917
  Gene Symbol: PCP4
  Gene Name: Purkinje cell protein 4
  ENST ID: ENST00000462224
  CDS Start-End: 64-159
gcgacccctgagcagtgttctctgtgctgagcggcgggactgagctgttgagttagagccaacatgagtgagcgacaaggtgctggggcaaccaatggaaaagacaagacatctggtgaaaatgtcgggtgccccattctcttccttacacactcctgactggctcagcggaaggagctcctgccactcctctaacagcatctgaccttccccgccgccccgggaactggactctctgaagtatacagaaaagtagcgattccttaaatatggacagaagaaagttcaagaagaatttgacattgacatggatgcaccagagacagaacgtgcagcggtggccattcagtctcagttcagaaaattccagaagaagaaggctgggtctcagtcctagtgggagaaccccctcctagtccacctgaaaacaccaaattcaaccatcatctgtcaagaaattaaaagaacaacaccctagagagaagtcatccacacacaatccacacacgcatagcaaacctccaatgcatgtacagaaacctgtgatatttatacccttgtaggaaggtatagacaatggaattgtgagtagcttaatctctatgtttctctccattttcattcctcctgcaactattttccttgatgttgtaataaaatgaagttacgatgagtgaattcaa

SEQ ID NO: 172512 - DNA, 1424 bp, Homo sapiens
  Payload ID: 13918
  Gene Symbol: PCP4L1
  Gene Name: Purkinje cell protein 4 like 1
  Uniprot ID: A6NKN8
  ENST ID: ENST00000504449
  CDS Start-End: 249-455
ggccggaggcggcgagctgagcggctctgacaggacgggtcgcagggggtcgcctggccggagctgggctccgagaatcccgggtgccagcaccagagcagcggctctccgcactaactctcctctcctggtcagctgtaacccctgccgcagagcccggcaactttcagctgtcgcccgcggagccccgagggccactcgcctcacctgtgcgtgcagcgcctcgcgcgccctgtccggctgcggagatgagcgagcttaataccaaaacatccccagcaaccaaccaggcagctggccaagaggaaaaaggaaaagctggcaatgtcaagaaggcggaggaggaggaggagattgacattgatctgacagcaccagaaacagagaaggctgcccttgctattcagggcaagttccggcgatttcagaaaaggaaaaaggatcccagctcctgaatggccaggcttgcccttcaccttcaccttcatgctggtcccttctctccccttctccacacccatgtatctttatcccttgtccctctagcctttccttgaggcaagttcaacctttatatactcttgtatctggccccctcaagccatcacagaagtagaggcacaagagaggtggagaagatgaagacttcaatcagcagtcactagtctaagggtggaacaatttcttcttggtataaggttctttgatcagtagctatgcctgccctgtagggctaaacaagaggcttcgaggctgagagatctccccaaagaacaatgtgggaaggaggggaaggctttcagagtagggtgcctgagggtgggacatatgcactgttctgctagttacggcattcacactttaggtaacattttttttccccttcagatccttctgcaccaactccaacttcccctcccaggatctaagccacagtggggactggagcctcgttttccccctaggcagacctaaatcaagcagcttaccacaatagtgcatgctgagtagattagttccaaggaagggagactggaatgctggtgtcaaggaaaagcctccctcatcatctagtctaagaccataacgggcagaagcataagaggttccagggccataggagaatgagaagtagggcacatatagggaggaaagaaaagtgaagaagggggaaatctctgaatttttttactgctgggaaaagtgtactacatgaaggatgcttggggctttgctaacctgctcaccgctaaccctccaagtctaaccatccccagaggccacacaaaccaagtgactcctgtagttcccatttgccccactatggagtcagggcaaaagtggaatagccactccatgtgattttagcatgtttaatcattttaacaataaaccaccccacaaatggggtcatttaacctcta

SEQ ID NO: 172513 - DNA, 2142 bp, Homo sapiens
  Payload ID: 13919
  Gene Symbol:
  Gene Name: Putative eukaryotic translation initiation factor 2 subunit 3-like protein  [Source:UniProtKB/Swiss-Prot
  Acc:Q2VIR3]
  ENST ID: ENST00000322446
  CDS Start-End: 302-1702
acccgcctcgcatgggcccagggggcgggggtttgggtggctgccctcagtattgcctgcacaaatatctaccaagtctgcgacgaatagctccagcaactttgcaccgtgttttccagtaagcctaccgacaggcactgtgcagattcaagcagagagaagtccaagcactgaggccgctgctgcaccggccatcctgagaccctagtcgaccttccggcctccgcatccccgccccgcactaggacccctgcagacgatcaggcggcagccggggtgactttcttcctcttttggcaacatggcgggcggagaagctggggtgactctggggcagccgcacctttcgcgtcaggatctcaccaccttggatgttaccaagttgacgccactttcacacgaagttatcagcagacaagccacaattaatataggtacaattggtcatgtagctcatgggaaatccacagtcgtcaaagctatttctggagttcacaccgtcaggttcaaaaatgaactagaaagaaatattacaatcaagcttggatatgctaatgctaagatttatcaacttgatgacccaagttgccctcggccagaatgttatcgatcttgtgggagcagtatgcctgatgagtttcctacagacattccaggaaccaaagggaacttcagattagtcagacatgtttcctttgttgactgtcctggccacgatattttgatggctactatgctgaacggtgcagcagtgatggatgcagctcttctgttgatagctggtaatgaatcttgccctcagcctcagacatctgaacacctggctgctatagagatcatgaaactgaagcatattttgattctacaaaataaaattgatttggtaaaagaaaggcaggctaaagaacaatacgagcagatccttgcgtttgtccaaggtacagtagcagagggagctcccattattccaatttcggctcagctgaaatacaatattgaagttgtttgtgagtacatagtaaagaaaattccagtacccccaagagactttacttcagagccccggcttattgttattagatcttttgatgtcaacaaacctggctgtgaagttgatgaccttaagggaggtgtagctggtggtagtatcctaaaaggagtattaaaggtgggccaggagacagaagtaagacctggtattgtttccaaagatagtgaaggaaaactcatgtgtaaatcaatcttttccaaaattgtttcactttttgcggagcataatgatctgcaatatgctgctccaggcggtcttattggagttggaacaaaaattgaccccactttgtgccgggctgacagaatggtggggcaaatacttggtgcagtcggagctttacctgagatattcacagaattggaaatttcctatttcctgcttagacggcttctaggtgtacgcactgaaggagacaagaaagcagcaaaggttcaaaagctgtctaagaatgaagtgctcatggtgaacataggatccctgtcgacaggagggagagttagtgctgtcaaggccgatttgggcaaaattgttttgaccaatccagtgtgcacagagattcatctaattcaccttgatttgattaaggaattagaatggggcccagttcttaccaatgagacacagaggaagtctgcagcaaacttctaggaaatcatttctttctttaaagaaaaaagacaaaagaaaacatgatcccctttctgctctggagattctttgcaggctgtgatgcccggaattgtgacaaccatatcacaattatgggaagaacttaggttcctgaaaatcttattgcaacatgtttacagccagccctacacctggacttcatgtttattatttatatcagtccaagttcttgaaatgatgctgctttcatctgaaatacacaaacaaataaaattatatttatatacacataaacatgtatatacatacatgtatatatttttatagagtattagaatgctactctttctcaaaatatgttaaatataaactaaacttgactgttaattatgatgtgtcctaatttaattatatgaaaaattctgatgtttaaaaaataaaaaatgaagttatattga

SEQ ID NO: 172514 - DNA, 1602 bp, Homo sapiens
  Payload ID: 13919
  Gene Symbol:
  Gene Name: Putative eukaryotic translation initiation factor 2 subunit 3-like protein  [Source:UniProtKB/Swiss-Prot
  Acc:Q2VIR3]
  Uniprot ID: Q2VIR3
  ENST ID: ENST00000538173
  CDS Start-End: 14-1432
ctcttttggcaacatggcgggcggagaagctggggtgactctggggcagccgcacctttcgcgtcaggatctcaccaccttggatgttaccaagttgacgccactttcacacgaagttatcagcagacaagccacaattaatataggtacaattggtcatgtagctcatgggaaatccacagtcgtcaaagctatttctggagttcacaccgtcaggttcaaaaatgaactagaaagaaatattacaatcaagcttggatatgctaatgctaagatttatcaacttgatgacccaagttgccctcggccagaatgttatcgatcttgtgggagcagtatgcctgatgagtttcctacagacattccaggaaccaaagggaacttcagattagtcagacatgtttcctttgttgactgtcctggccacgatattttgatggctactatgctgaacggtgcagcagtgatggatgcagctcttctgttgatagctggtaatgaatcttgccctcagcctcagacatctgaacacctggctgctatagagatcatgaaactgaagcatattttgattctacaaaataaaattgatttggtaaaagaaaggcaggctaaagaacaatacgagcagatccttgcgtttgtccaaggtacagtagcagagggagctcccattattccaatttcggctcagctgaaatacaatattgaagttgtttgtgagtacatagtaaagaaaattccagtacccccaagagactttacttcagagccccggcttattgttattagatcttttgatgtcaacaaacctggctgtgaagttgatgaccttaagggaggtgtagctggtggtagtatcctaaaaggagtattaaaggtgggccaggagacagaagtaagacctggtattgtttccaaagatagtgaaggaaaactcatgtgtaaatcaatcttttccaaaattgtttcactttttgcggagcataatgatctgcaatatgctgctccaggcggtcttattggagttggaacaaaaattgaccccactttgtgccgggctgacagaatggtggggcaaatacttggtgcagtcggagctttacctgagatattcacagaattggaaatttcctatttcctgcttagacggcttctaggtgtacgcactgaaggagacaagaaagcagcaaaggttcaaaagctgtctaagaatgaagtgctcatggtgaacataggatccctgtcgacaggagggagagttagtgctgtcaaggccgatttgggcaaaattgttttgaccaatccagtgtgcacagaggtaggagaaaaaattgcccttagccgaagagttgaaaaacactggcgtttaattggttggggtcagataagaagaggagtgacaatcaagccaacagtagatgatgactgaagaataccggttaaataatacattcggatggagctggaagttgcaatttctctttaacaaccaaggggtttattttcaaagcgatattggggaattgatttcacagtttgttaccttagtaggtaacggtaaggttattctctctttttttttttggttatgaaaactta

SEQ ID NO: 172515 - DNA, 2747 bp, Homo sapiens
  Payload ID: 13920
  Gene Symbol: PHTF1
  Gene Name: putative homeodomain transcription factor 1
  Uniprot ID: Q9UMS5
  ENST ID: ENST00000357783
  CDS Start-End: 600-2513
gtcactgcatcccggcgcggcccgcagaagacgagcgccgctgccgccgcctcctcctcccgggctcccgggctctcggggtccggggcctttgcacctgtcttttccagctgggcacaaagccttttgctgtcgccgtggcgactggaggccttcacttttaatccccctcattttccagttcattctctgcttattttctggtcagtccgtgaccctgtaggcggcctctgaccggcgatcgatttgccgccctcagggcgctgggcggccggctgcctccgaagctggggcggcctccgcggtctccatggtaacggcctctccggcgtctccgcctggaggggaagatgcggcctgcctggcccgccgcctcgcccccggcctcacggtgggaccccgggcactgaggacggaggtcccgggcgccggcccgcggggcaacgggcactagctggagaaagagcagctcatggagaggctgagagaagcggttttcgcgtcctacccaaactgggagagtaaccttcagcagctggactcaccgattggttttccttcattttcagtgaaatcccattctctggctggagacacagatggcctcaaatgagagagatgctatatcgtggtaccaaaagaagattggagcctacgatcagcagatatgggaaaagtcaatcgaacagactcagattaagggtttgaaaaacaaaccgaaaaagatgggccacataaagccagacttgattgacgttgacttaatcagagggtcaacatttgccaaagcaaaacctgaaattccatggacatctctgactcggaaggggcttgttcgagttgtattttttccattgttcagcaattggtggattcaggttacctctttaagaatctttgtttggctgttactactttatttcatgcaagttatagcaattgtcttatatttgatgatgcctattgtgaacataagtgaagtacttggacccttgtgccttatgctactcatgggaactgtccactgtcaaattgtgtctactcagataacaagaccatcaggaaacaatggaaatcgaagaagaagaaaattacgaaaaactgtaaatggtgatgggagccgagaaaatggaaataactcctctgataaagtcagaggaatagaaactttggaatctgtacccattattggtggtttttgggagactatctttggcaacaggattaaaagagtaaaattaatatctaacaaagggactgaaactgacaatgacccaagttgtgtccatcctatcattaagaggagacaatgtcgaccagagattagaatgtggcaaacaagagagaaagcaaaattttcagatggagaaaagtgccgtagggaggcttttaggcgtttgggtaatggggtgtctgatgacctgtcaagtgaagaagatggtgaagcacggacacagatgatattattgcgtaggagtgtggaaggggcctcaagtgacaatggttgtgaagttaagaatagaaaatcaatactttcaaggcacctaaactctcaggtaaagaaaaccactacaaggtggtgtcatattgtgcgggattcagatagtctggctgaatcagaatttgaatcagcagccttcagccagggctctagatcgggtgtgagtggtggctctcgaagcctcaacatgtcaagaagagactcagaaagcacccgccatgactcggagactgaggacatgttatgggacgacctgctacatggcccagagtgccggtcatctgtcaccagtgacagtgagggggcccatgtgaatacccttcactcagggaccaaacgtgaccccaaagaggatgtttttcagcagaatcatttattctggcttcagaattcaagtccttcctctgatcgagttagtgcaataatctgggaggggaatgagtgcaaaaagatggatatgtctgtgttggaaataagtggcatcatcatgagcagggtcaatgcctatcagcaaggagtaggttatcagatgctgggaaatgttgtcactattggattagcattttttccattcttacatcgacttttccgtgagaagagccttgaccaactaaagtccatttcagctgaggagatcttgactctcttttgtggggcaccacctgttacacctattattgttttgtcgataattaatttttttgaaagattgtgtcttacttggatgttttttttcatgatgtgtgtggcagagagaacatataaacagagatttttatttgcaaaactcttcagccatattacttctgccaggaaagctaggaaatatgaaatacctcatttcagacttaagaaggtggagaatattaaaatatggttatcactgcgttcctatctaaagagacgggggccacagcgttcagttgatgtggttgtatcctcggttttcctactgacactttcgattgctttcatttgttgtgctcaggtaaaagtttcacatctgctttaaggaaaaatgaaaattctattatagagttcactttctgttttagacttaggtcactgtccttaagtatgtatttttaatgcatctacattttttactattttggatgtttggtaatttttctaacttttcaaaatgggaatacaagtaattctgaagtcctttcaaactgtaagatcgctctaattttagttggtaattattaattgataataaaactatcatatggttgcaaaa

SEQ ID NO: 172516 - DNA, 3000 bp, Homo sapiens
  Payload ID: 13920
  Gene Symbol: PHTF1
  Gene Name: putative homeodomain transcription factor 1
  ENST ID: ENST00000369598
  CDS Start-End: 347-2500
tggcgactggaggccttcacttttaatccccctcattttccagttcattctctgcttattttctggtcagtccgtgaccctgtaggcggcctctgaccggcgatcgatttgccgccctcagggcgctgggcggccggctgcctccgaagctggggcggcctccgcggtctccatggtaacggcctctccggcgtctccgcctggaggggaagatgcggcctgcctggcccgccgcctcgcccccggcctcacggtgggaccccgggcactgaggacggaggtcccgggcgccggcccgcggggcaacgggcactagtgaaatcccattctctggctggagacacagatggcctcaaatgagagagatgctatatcgtggtaccaaaagaagattggagcctacgatcagcagatatgggaaaagtcaatcgaacagactcagattaagggtttgaaaaacaaaccgaaaaagatgggccacataaagccagacttgattgacgttgacttaatcagagggtcaacatttgccaaagcaaaacctgaaattccatggacatctctgactcggaaggggcttgttcgagttgtattttttccattgttcagcaattggtggattcaggttacctctttaagaatctttgtttggctgttactactttatttcatgcaagttatagcaattgtcttatatttgatgatgcctattgtgaacataagtgaagtacttggacccttgtgccttatgctactcatgggaactgtccactgtcaaattgtgtctactcagataacaagaccatcaggaaacaatggaaatcgaagaagaaggattaaaagagtaaaattaatatctaacaaagggactgaaactgacaatgacccaagttgtgtccatcctatcattaagaggagacaatgtcgaccagagattagaatgtggcaaacaagagagaaagcaaaattttcagatggagaaaagtgccgtagggaggcttttaggcgtttgggtaatggggtgtctgatgacctgtcaagtgaagaagatggtgaagcacggacacagatgatattattgcgtaggagtgtggaaggggcctcaagtgacaatggttgtgaagttaagaatagaaaatcaatactttcaaggcacctaaactctcaggtaaagaaaaccactacaaggtggtgtcatattgtgcgggattcagatagtctggctgaatcagaatttgaatcagcagccttcagccagggctctagatcgggtgtgagtggtggctctcgaagcctcaacatgtcaagaagagactcagaaagcacccgccatgactcggagactgaggacatgttatgggacgacctgctacatggcccagagtgccggtcatctgtcaccagtgacagtgagggggcccatgtgaatacccttcactcagggaccaaacgtgaccccaaagaggatgtttttcagcagaatcatttattctggcttcagaattcaagtccttcctctgatcgagttagtgcaataatctgggaggggaatgagtgcaaaaagatggatatgtctgtgttggaaataagtggcatcatcatgagcagggtcaatgcctatcagcaaggagtaggttatcagatgctgggaaatgttgtcactattggattagcattttttccattcttacatcgacttttccgtgagaagagccttgaccaactaaagtccatttcagctgaggagatcttgactctcttttgtggggcaccacctgttacacctattattgttttgtcgataattaatttttttgaaagattgtgtcttacttggatgttttttttcatgatgtgtgtggcagagagaacatataaacagagatttttatttgcaaaactcttcagccatattacttctgccaggaaagctaggaaatatgaaatacctcatttcagacttaagaaggtggagaatattaaaatatggttatcactgcgttcctatctaaagagacgggggccacagcgttcagttgatgtggttgtatcctcggttttcctactgacactttcgattgctttcatttgttgtgctcaggttctccaaggacataaaactttcctgaatgatgcttataactgggagtttttgatctgggaaacagctttactactttttttattgcgtctggcctcactggggtctgaaaccaataagaaatacagcaatgtttcaatattacttacagaacagattaatttatatcttaagatggaaaaaaagccaaataagaaagaacagcttactctagtaaacaatgtattaaagctgtccaccaagttgttgaaagagctggacacaccatttagactctatggactgacaatgaatcccttaatctacaatatcacaagagtagttatcctttctgctgtctcaggtgttataagtgatcttctaggatttaatataagactgtggaaaattaaatcataagctgagtaaatgcctggactctcccctggctggtatcaaaacttacctatcaaggaaagtgatgactgcagaaaccagtgagatacccacctgcttgttcacatgcacaggtgctctcagctctgccaaagcgaatgaatggtgtttccggaggagcaagtccttttccaactgggtgtgcatgctaaaaacctgtattttcatgcttttcaaacaacatgaatagtcagctgactaaagactgtgtgtgttgtggtaacacaaagacaattttgtaagtttgcgcttcagtactgtgacagttatgtttactggacatagtcttttgggcaactatgatagatgcccaaagcatgaagcaaatatcttttattggaaatatgcaaattcaatacttttccattatagtctatagaactggagatttcatttctctatcaaagagagatcaagcgaactattttaggttaaatccgaataaaagaactttactggagact

SEQ ID NO: 172517 - DNA, 3075 bp, Homo sapiens
  Payload ID: 13920
  Gene Symbol: PHTF1
  Gene Name: putative homeodomain transcription factor 1
  ENST ID: ENST00000369600
  CDS Start-End: 446-2575
gctgccgccgcctcctcctcccgggctcccgggctctcggggtccggggcctttgcacctgtcttttccagctgggcacaaagccttttgctgtcgccgtggcgactggaggccttcacttttaatccccctcattttccagttcattctctgcttattttctggtcagtccgtgaccctgtaggcggcctctgaccggcgatcgatttgccgccctcagggcgctgggcggccggctgcctccgaagctggggcggcctccgcggtctccatggtaacggcctctccggcgtctccgcctggaggggaagatgcggcctgcctggcccgccgcctcgcccccggcctcacggtgggaccccgggcactgaggacggaggtcccgggcgccggcccgcggggcaacgggcactagtgaaatcccattctctggctggagacacagatggcctcaaatgagagagatgctatatcgtggtaccaaaagaagattggagcctacgatcagcagatatgggaaaagtcaatcgaacagactcagattaagggtttgaaaaacaaaccgaaaaagatgggccacataaagccagacttgattgacgttgacttaatcagagttatagcaattgtcttatatttgatgatgcctattgtgaacataagtgaagtacttggacccttgtgccttatgctactcatgggaactgtccactgtcaaattgtgtctactcagataacaagaccatcaggaaacaatggaaatcgaagaagaagaaaattacgaaaaactgtaaatggtgatgggagccgagaaaatggaaataactcctctgataaagtcagaggaatagaaactttggaatctgtacccattattggtggtttttgggagactatctttggcaacaggattaaaagagtaaaattaatatctaacaaagggactgaaactgacaatgacccaagttgtgtccatcctatcattaagaggagacaatgtcgaccagagattagaatgtggcaaacaagagagaaagcaaaattttcagatggagaaaagtgccgtagggaggcttttaggcgtttgggtaatggggtgtctgatgacctgtcaagtgaagaagatggtgaagcacggacacagatgatattattgcgtaggagtgtggaaggggcctcaagtgacaatggttgtgaagttaagaatagaaaatcaatactttcaaggcacctaaactctcaggtaaagaaaaccactacaaggtggtgtcatattgtgcgggattcagatagtctggctgaatcagaatttgaatcagcagccttcagccagggctctagatcgggtgtgagtggtggctctcgaagcctcaacatgtcaagaagagactcagaaagcacccgccatgactcggagactgaggacatgttatgggacgacctgctacatggcccagagtgccggtcatctgtcaccagtgacagtgagggggcccatgtgaatacccttcactcagggaccaaacgtgaccccaaagaggatgtttttcagcagaatcatttattctggcttcagaattcaagtccttcctctgatcgagttagtgcaataatctgggaggggaatgagtgcaaaaagatggatatgtctgtgttggaaataagtggcatcatcatgagcagggtcaatgcctatcagcaaggagtaggttatcagatgctgggaaatgttgtcactattggattagcattttttccattcttacatcgacttttccgtgagaagagccttgaccaactaaagtccatttcagctgaggagatcttgactctcttttgtggggcaccacctgttacacctattattgttttgtcgataattaatttttttgaaagattgtgtcttacttggatgttttttttcatgatgtgtgtggcagagagaacatataaacagagatttttatttgcaaaactcttcagccatattacttctgccaggaaagctaggaaatatgaaatacctcatttcagacttaagaaggtggagaatattaaaatatggttatcactgcgttcctatctaaagagacgggggccacagcgttcagttgatgtggttgtatcctcggttttcctactgacactttcgattgctttcatttgttgtgctcaggttctccaaggacataaaactttcctgaatgatgcttataactgggagtttttgatctgggaaacagctttactactttttttattgcgtctggcctcactggggtctgaaaccaataagaaatacagcaatgtttcaatattacttacagaacagattaatttatatcttaagatggaaaaaaagccaaataagaaagaacagcttactctagtaaacaatgtattaaagctgtccaccaagttgttgaaagagctggacacaccatttagactctatggactgacaatgaatcccttaatctacaatatcacaagagtagttatcctttctgctgtctcaggtgttataagtgatcttctaggatttaatataagactgtggaaaattaaatcataagctgagtaaatgcctggactctcccctggctggtatcaaaacttacctatcaaggaaagtgatgactgcagaaaccagtgagatacccacctgcttgttcacatgcacaggtgctctcagctctgccaaagcgaatgaatggtgtttccggaggagcaagtccttttccaactgggtgtgcatgctaaaaacctgtattttcatgcttttcaaacaacatgaatagtcagctgactaaagactgtgtgtgttgtggtaacacaaagacaattttgtaagtttgcgcttcagtactgtgacagttatgtttactggacatagtcttttgggcaactatgatagatgcccaaagcatgaagcaaatatcttttattggaaatatgcaaattcaatacttttccattatagtctatagaactggagatttcatttctctatcaaagagagatcaagcgaactattttaggttaaatccgaataaaagaactttactggagact

SEQ ID NO: 172518 - DNA, 3273 bp, Homo sapiens
  Payload ID: 13920
  Gene Symbol: PHTF1
  Gene Name: putative homeodomain transcription factor 1
  Uniprot ID: Q9UMS5
  ENST ID: ENST00000369604
  CDS Start-End: 485-2773
gtcactgcatcccggcgcggcccgcagaagacgagcgccgctgccgccgcctcctcctcccgggctcccgggctctcggggtccggggcctttgcacctgtcttttccagctgggcacaaagccttttgctgtcgccgtggcgactggaggccttcacttttaatccccctcattttccagttcattctctgcttattttctggtcagtccgtgaccctgtaggcggcctctgaccggcgatcgatttgccgccctcagggcgctgggcggccggctgcctccgaagctggggcggcctccgcggtctccatggtaacggcctctccggcgtctccgcctggaggggaagatgcggcctgcctggcccgccgcctcgcccccggcctcacggtgggaccccgggcactgaggacggaggtcccgggcgccggcccgcggggcaacgggcactagtgaaatcccattctctggctggagacacagatggcctcaaatgagagagatgctatatcgtggtaccaaaagaagattggagcctacgatcagcagatatgggaaaagtcaatcgaacagactcagattaagggtttgaaaaacaaaccgaaaaagatgggccacataaagccagacttgattgacgttgacttaatcagagggtcaacatttgccaaagcaaaacctgaaattccatggacatctctgactcggaaggggcttgttcgagttgtattttttccattgttcagcaattggtggattcaggttacctctttaagaatctttgtttggctgttactactttatttcatgcaagttatagcaattgtcttatatttgatgatgcctattgtgaacataagtgaagtacttggacccttgtgccttatgctactcatgggaactgtccactgtcaaattgtgtctactcagataacaagaccatcaggaaacaatggaaatcgaagaagaagaaaattacgaaaaactgtaaatggtgatgggagccgagaaaatggaaataactcctctgataaagtcagaggaatagaaactttggaatctgtacccattattggtggtttttgggagactatctttggcaacaggattaaaagagtaaaattaatatctaacaaagggactgaaactgacaatgacccaagttgtgtccatcctatcattaagaggagacaatgtcgaccagagattagaatgtggcaaacaagagagaaagcaaaattttcagatggagaaaagtgccgtagggaggcttttaggcgtttgggtaatggggtgtctgatgacctgtcaagtgaagaagatggtgaagcacggacacagatgatattattgcgtaggagtgtggaaggggcctcaagtgacaatggttgtgaagttaagaatagaaaatcaatactttcaaggcacctaaactctcaggtaaagaaaaccactacaaggtggtgtcatattgtgcgggattcagatagtctggctgaatcagaatttgaatcagcagccttcagccagggctctagatcgggtgtgagtggtggctctcgaagcctcaacatgtcaagaagagactcagaaagcacccgccatgactcggagactgaggacatgttatgggacgacctgctacatggcccagagtgccggtcatctgtcaccagtgacagtgagggggcccatgtgaatacccttcactcagggaccaaacgtgaccccaaagaggatgtttttcagcagaatcatttattctggcttcagaattcaagtccttcctctgatcgagttagtgcaataatctgggaggggaatgagtgcaaaaagatggatatgtctgtgttggaaataagtggcatcatcatgagcagggtcaatgcctatcagcaaggagtaggttatcagatgctgggaaatgttgtcactattggattagcattttttccattcttacatcgacttttccgtgagaagagccttgaccaactaaagtccatttcagctgaggagatcttgactctcttttgtggggcaccacctgttacacctattattgttttgtcgataattaatttttttgaaagattgtgtcttacttggatgttttttttcatgatgtgtgtggcagagagaacatataaacagagatttttatttgcaaaactcttcagccatattacttctgccaggaaagctaggaaatatgaaatacctcatttcagacttaagaaggtggagaatattaaaatatggttatcactgcgttcctatctaaagagacgggggccacagcgttcagttgatgtggttgtatcctcggttttcctactgacactttcgattgctttcatttgttgtgctcaggttctccaaggacataaaactttcctgaatgatgcttataactgggagtttttgatctgggaaacagctttactactttttttattgcgtctggcctcactggggtctgaaaccaataagaaatacagcaatgtttcaatattacttacagaacagattaatttatatcttaagatggaaaaaaagccaaataagaaagaacagcttactctagtaaacaatgtattaaagctgtccaccaagttgttgaaagagctggacacaccatttagactctatggactgacaatgaatcccttaatctacaatatcacaagagtagttatcctttctgctgtctcaggtgttataagtgatcttctaggatttaatataagactgtggaaaattaaatcataagctgagtaaatgcctggactctcccctggctggtatcaaaacttacctatcaaggaaagtgatgactgcagaaaccagtgagatacccacctgcttgttcacatgcacaggtgctctcagctctgccaaagcgaatgaatggtgtttccggaggagcaagtccttttccaactgggtgtgcatgctaaaaacctgtattttcatgcttttcaaacaacatgaatagtcagctgactaaagactgtgtgtgttgtggtaacacaaagacaattttgtaagtttgcgcttcagtactgtgacagttatgtttactggacatagtcttttgggcaactatgatagatgcccaaagcatgaagcaaatatcttttattggaaatatgcaaattcaatacttttccattatagtctatagaactggagatttcatttctctatcaaagagagatcaagcgaactattttaggttaaatccgaataaaagaactttactggagact

SEQ ID NO: 172519 - DNA, 3244 bp, Homo sapiens
  Payload ID: 13920
  Gene Symbol: PHTF1
  Gene Name: putative homeodomain transcription factor 1
  Uniprot ID: Q9UMS5
  ENST ID: ENST00000393357
  CDS Start-End: 453-2741
ctctccggcgtctccgcctggaggggaagatgcggcctgcctggcccgccgcctcgcccccggcctcacggtgggaccccgggcactgaggacggaggtcccgggcgccggcccgcggggcaacgggcactaggtgagagccggacgcgggcgagcgaaggaggcgggtgccgggcgactccagcggcggcccctgcccctcccccgcacccacgaacacgctcgcccgatatattgcagaggcttctccggtcgccgctgcgccagtttttttttgtttgtttgttgtgttttccctggcaaacagctggagaaagagcagctcatggagaggctgagagaagcggttttcgcgtcctacccaaactgggagagtaaccttcagcagctggactcaccgattggttttccttcattttcagtgaaatcccattctctggctggagacacagatggcctcaaatgagagagatgctatatcgtggtaccaaaagaagattggagcctacgatcagcagatatgggaaaagtcaatcgaacagactcagattaagggtttgaaaaacaaaccgaaaaagatgggccacataaagccagacttgattgacgttgacttaatcagagggtcaacatttgccaaagcaaaacctgaaattccatggacatctctgactcggaaggggcttgttcgagttgtattttttccattgttcagcaattggtggattcaggttacctctttaagaatctttgtttggctgttactactttatttcatgcaagttatagcaattgtcttatatttgatgatgcctattgtgaacataagtgaagtacttggacccttgtgccttatgctactcatgggaactgtccactgtcaaattgtgtctactcagataacaagaccatcaggaaacaatggaaatcgaagaagaagaaaattacgaaaaactgtaaatggtgatgggagccgagaaaatggaaataactcctctgataaagtcagaggaatagaaactttggaatctgtacccattattggtggtttttgggagactatctttggcaacaggattaaaagagtaaaattaatatctaacaaagggactgaaactgacaatgacccaagttgtgtccatcctatcattaagaggagacaatgtcgaccagagattagaatgtggcaaacaagagagaaagcaaaattttcagatggagaaaagtgccgtagggaggcttttaggcgtttgggtaatggggtgtctgatgacctgtcaagtgaagaagatggtgaagcacggacacagatgatattattgcgtaggagtgtggaaggggcctcaagtgacaatggttgtgaagttaagaatagaaaatcaatactttcaaggcacctaaactctcaggtaaagaaaaccactacaaggtggtgtcatattgtgcgggattcagatagtctggctgaatcagaatttgaatcagcagccttcagccagggctctagatcgggtgtgagtggtggctctcgaagcctcaacatgtcaagaagagactcagaaagcacccgccatgactcggagactgaggacatgttatgggacgacctgctacatggcccagagtgccggtcatctgtcaccagtgacagtgagggggcccatgtgaatacccttcactcagggaccaaacgtgaccccaaagaggatgtttttcagcagaatcatttattctggcttcagaattcaagtccttcctctgatcgagttagtgcaataatctgggaggggaatgagtgcaaaaagatggatatgtctgtgttggaaataagtggcatcatcatgagcagggtcaatgcctatcagcaaggagtaggttatcagatgctgggaaatgttgtcactattggattagcattttttccattcttacatcgacttttccgtgagaagagccttgaccaactaaagtccatttcagctgaggagatcttgactctcttttgtggggcaccacctgttacacctattattgttttgtcgataattaatttttttgaaagattgtgtcttacttggatgttttttttcatgatgtgtgtggcagagagaacatataaacagagatttttatttgcaaaactcttcagccatattacttctgccaggaaagctaggaaatatgaaatacctcatttcagacttaagaaggtggagaatattaaaatatggttatcactgcgttcctatctaaagagacgggggccacagcgttcagttgatgtggttgtatcctcggttttcctactgacactttcgattgctttcatttgttgtgctcaggttctccaaggacataaaactttcctgaatgatgcttataactgggagtttttgatctgggaaacagctttactactttttttattgcgtctggcctcactggggtctgaaaccaataagaaatacagcaatgtttcaatattacttacagaacagattaatttatatcttaagatggaaaaaaagccaaataagaaagaacagcttactctagtaaacaatgtattaaagctgtccaccaagttgttgaaagagctggacacaccatttagactctatggactgacaatgaatcccttaatctacaatatcacaagagtagttatcctttctgctgtctcaggtgttataagtgatcttctaggatttaatataagactgtggaaaattaaatcataagctgagtaaatgcctggactctcccctggctggtatcaaaacttacctatcaaggaaagtgatgactgcagaaaccagtgagatacccacctgcttgttcacatgcacaggtgctctcagctctgccaaagcgaatgaatggtgtttccggaggagcaagtccttttccaactgggtgtgcatgctaaaaacctgtattttcatgcttttcaaacaacatgaatagtcagctgactaaagactgtgtgtgttgtggtaacacaaagacaattttgtaagtttgcgcttcagtactgtgacagttatgtttactggacatagtcttttgggcaactatgatagatgcccaaagcatgaagcaaatatcttttattggaaatatgcaaattcaatacttttccattatagtctatagaactggagatttcatttctctatcaaagagagatcaagcgaactattttaggttaaatccgaataaaagaactttactggagactttc

SEQ ID NO: 172520 - DNA, 770 bp, Homo sapiens
  Payload ID: 13920
  Gene Symbol: PHTF1
  Gene Name: putative homeodomain transcription factor 1
  ENST ID: ENST00000446739
  CDS Start-End: 456-770
ggcctctccggcgtctccgcctggaggggaagatgcggcctgcctggcccgccgcctcgcccccggcctcacggtgggaccccgggcactgaggacggaggtcccgggcgccggcccgcggggcaacgggcactaggtgagagccggacgcgggcgagcgaaggaggcgggtgccgggcgactccagcggcggcccctgcccctcccccgcacccacgaacacgctcgcccgatatattgcagaggcttctccggtcgccgctgcgccagtttttttttgtttgtttgttgtgttttccctggcaaacagctggagaaagagcagctcatggagaggctgagagaagcggttttcgcgtcctacccaaactgggagagtaaccttcagcagctggactcaccgattggttttccttcattttcagtgaaatcccattctctggctggagacacagatggcctcaaatgagagagatgctatatcgtggtaccaaaagaagattggagcctacgatcagcagatatgggaaaagtcaatcgaacagactcagattaagggtttgaaaaacaaaccgaaaaagatgggccacataaagccagacttgattgacgttgacttaatcagagggtcaacatttgccaaagcaaaacctgaaattccatggacatctctgactcggaaggggcttgttcgagttgtattttttccattgttcagcaattggtggattcaggttacctctttaagaatctttgtttggctgttacta

SEQ ID NO: 172521 - DNA, 1063 bp, Homo sapiens
  Payload ID: 13920
  Gene Symbol: PHTF1
  Gene Name: putative homeodomain transcription factor 1
  ENST ID: ENST00000412670
  CDS Start-End: 1-995
ggcaaacaagagagaaagcaaaattttcagatggagaaaagtgccgtagggaggcttttaggcgtttgggtaatggggtgtctgatgacctgtcaagtgaagaagatggtgaagcacggacacagatgatattattgcgtaggagtgtggaaggggcctcaagtgacaatggttgtgaagttaagaatagaaaatcaatactttcaaggcacctaaactctcaggtaaagaaaaccactacaaggtggtgtcatattgtgcgggattcagatagtctggctgaatcagaatttgaatcagcagccttcagccagggctctagatcgggtgtgagtggtggctctcgaagcctcaacatgtcaagaagagactcagaaagcacccgccatgactcggagactgaggacatgttatgggacgacctgctacatggcccagagtgccggtcatctgtcaccagtgacagtgagggggcccatgtgaatacccttcactcagggaccaaacgtgaccccaaagaggatgtttttcagcagaatcatttattctggcttcagaattcaagtccttcctctgatcgagttagtgcaataatctgggaggggaatgagtgcaaaaagatggatatgtctgtgttggaaataagtggcatcatcatgagcagggtcaatgcctatcagcaaggagtaggttatcagatgctgggaaatgttgtcactattggattagcattttttccattcttacatcgacttttccgtgagaagagccttgaccaactaaagtccatttcagctgaggagatcttgactctcttttgtggggcaccacctgttacacctattattgttttgtcgataattaatttttttgaaagattgtgtcttacttggatgttttttttcatgatgtgtgtggcagagagaacatataaacaggtcagtggagaaataaggaaaattttttacctgtttttgtatatgatattccattgagttgcttttgttctcttgatttggtctctcttcaagttgatgtgggcaataaaggattgataagtgga

SEQ ID NO: 172522 - DNA, 4778 bp, Homo sapiens
  Payload ID: 13921
  Gene Symbol: PHTF2
  Gene Name: putative homeodomain transcription factor 2
  Uniprot ID: Q8N3S3
  ENST ID: ENST00000248550
  CDS Start-End: 77-2434
tgggaaataaagtcatttgtatgtttttctctcttgcacagcctaaaatgaccaatgtgtgatttcagtggaataaatggcgtccaaagtcacagatgctatagtctggtatcaaaagaaggagtttctctctgtggccaccaccgccccaggcccacagcaagtactgcctggctactgccagtgttcactcaaggaccaagggctcttcattcagtgtttgattggagcatatgatcaacaaatatgggaaaaatctgttgaacagagagaaatcaagtttattaaactggggctaaggaataaaccaaagaaaacagcacatgtgaaaccagacctcatagatgttgatcttgtaagagggtctgcatttgcaaaggcaaagcctgaaagtccttggacttctctgaccagaaagggaattgttcgagttgtatttttcccctttttcttccggtggtggttacaagtaacatcaaaggtcatctttttctggcttcttgtcctttatcttcttcaagttgctgcaatagtattattctgctccacttctagcccacacagcatacctctgacagaggtgattgggccgatatggctgatgctgctcctgggaactgtgcattgccagattgtttccacaagaacacccaaacctcctctaagtacagggggtaaaagaagaaggaaattaagaaaagcagcccatttggaagtacatagggaaggagatggttctagtaccacagataacacacaagagggagcagttcagaaccacggtacaagcacctctcacagcgttggcactgtcttcagagatctctggcatgctgctttctttttatcaggatcaaagaaagcaaagaattcaattgataaatcaactgaaactgacaatggctatgtatcccttgatgggaagaagactgttaaaagcggtgaagatggaatacaaaaccatgaacctcagtgtgaaactattcgaccagaagagacagcctggaacacaggaacactgaggaatggtcctagcaaagatacccaaaggacaataacaaatgtctctgatgaagtctccagtgaggaaggtcctgaaacaggatactcattacgtcgtcatgtggacaggacttctgaaggtgttcttcggaatagaaagtcacaccattataagaaacattaccctaatgaggacgcccctaaatcgggtactagttgcagctctcgctgttcaagttccagacaggattctgagagtgcaaggccagaatctgaaacagaagatgtgttatgggaagacttgttacattgtgcagaatgccattcatcttgtaccagtgagacagatgtggaaaatcatcagattaatccatgtgtgaaaaaagaatatagagatgacccttttcatcagagtcatttgccctggctccatagttcccacccaggattagaaaaaataagtgctatagtatgggaaggtaatgattgtaagaaagcagacatgtctgtacttgaaatcagtggaatgataatgaacagagtgaacagccatataccaggaataggataccagatttttggaaatgcagtctctctcatactgggtttaactccatttgttttccgactttctcaagctacagacttggaacaactcacagcacattctgcttcagaactttatgtgattgcatttggttctaatgaagatgtcatagttctttctatggttataataagttttgtggttcgcgtgtctcttgtgtggattttcttttttttgctctgtgtagcagaaagaacttataaacagcgattactttttgcaaaactctttggacatttaacatctgcaaggagggctcgaaaatctgaggttcctcatttccggttgaagaaagtacagaatataaaaatgtggctatctctccgttcctatcttaagcgtcgaggtcctcagcgatcagttgatgtaatagtttcatctgctttcttattgactatctcagttgtatttatctgttgtgcccagctacttcatgtacacgagatcttccttgattgtcactacaattgggaattggtaatctggtgcatctcgttaacactttttctcctaagatttgttacccttggatcagaaacaagtaaaaaatatagtaatacctcaatattacttactgaacagataaacctctacttgaaaatggagaaaaaacctaacaaaaaggaggaactgacactagtgaataatgttttaaaactggctactaaactgctaaaggagttggacagtccttttagattatatgggcttacaatgaatccgctgctttataacatcacccaggttgttatcctgtcagctgtttctggtgttatcagtgacttgcttggatttaatttaaagctatggaagattaagtcatgacaattcaaagaaaagaagatgtagcctcttttccagaataagagtactgactaagctgcctgaaagcttgtcactgattctttgcttcaggagtctcagctagggagttgaagtgtttacatcagactgtcttgtgcaattcttatatttattttactggttcacttttttttacatttattttagtctttatatttttatttttaagcattgatgtacttagttgttgaaagggtgatgaaactgatatccagatacttgagatcctggtaattggtcataaataattggcaaaataacaaattgtgaaaatagaagccattgctcagcaccgtttctccatcaatgccgtgaacttgccttacttgaggaaaaattctttaactttggaatattgcattgaactcagctatacacataaaacattttctttggtaaatcaagatccagtcagggtttctcttgaattattttggaacaatgccaggatccaaactgattaagttacagtttaagcacccttcagtattaatatatacggtattatataacaggtcaacaagtgctctttgatgataaaacttgtaatagagcaataattgtaaatggttaccatactgtaagatattttgataaaaattaactagtaatacttgtatttatttgaaacactgggctgtttgcacagctccaactgtgcatgctcaaaatgtgcactttttaaaattgttacttttaatgcgtatctttatatgggatctgttatagtatactagggcatgatatggtatccttttgagtgaggtatatactcatctcacaagtgaagtgcctactgatattactaaagtacattatgtttactcaagtaaataattttctccccatggtacactctagtgtaggctattcataccacactgaaatgaacaactgaagaataaggctaagaaccaataaaatatttctctaattgctagttgtaaaactgtatccaaattttcagaaaagacagcttcagcttgcaaattctatcctctaaacttatctggtgcattctccccaccccacccccattatataagggctattttagatgcttttaacctccccaacaaataatttgccaagtgtccaatgagaacttatcatgttggtgtgttaggtaaatcgggcaaatatgatagtgtcttacattgggccttgattttaagttgttatatttgtacaatcgagtattttagaaattacatgaaacatgaaacagtttttgcaattttttttaaactgggcatctggtttctaaaaatttatttgaaacaatctagaattttcttggtgcaaagtgtatcatgtggaatatcctcatatttttaccatattttaagaactttaagacgattaattgtaaataatttatttgattggtgcagttctaatccctaaatcataatcttaaaatcaggaatgtgtggagaacagagccatgtcatatcactttgctcttaccattccttttgatcagcctcaattcagcctcattgtgtagtatgttttttctttctatgaaaaacaacagaaagcatttcattttatttgcctatgttcaaatatgtttaataatgaccaaagtgcattctgagttttttcaaggaatgtaatactggagctttaagaacatacttagtttctcatgtgaaaacttaggctttgtctgatgtttttccttcctctattgtctaatgttgaggttgtttttaggaattatgttttataaactttttcaatataaggtacatgcctatacagaacttaacattttgcacagaatatatcaaatatattttgagaaaaaaagtacggcatgagttctgttaggaataaaagatgaaactattgtatctcacaaaaaatcttatttcagaatggaaatatttttgagaaaagtagctgagtatactggtttaagaaaatgcttgttttagattgaggttaacttagagttgggagttgatttattaagtacagtatacctctcaacagtttataaataatatgttgaattatgtcagtgtgggcagcagtagaatactaaaaggaaaatgtcatgttaagcaatttcagaacattaactgaactattttcaaagcagaaaaattgacattgctgcctttaagaataccatgaatgtaagaaattgaaagaaattgtaaaatatcacataatatagaaatggcagttcaaagagaattgtggcagatgttgtgtgtgaactgttgtttctttgccacatgtgttgtatttgaaagttttacagtaagtttaaaataaaacattctgtgac

SEQ ID NO: 172523 - DNA, 4541 bp, Homo sapiens
  Payload ID: 13921
  Gene Symbol: PHTF2
  Gene Name: putative homeodomain transcription factor 2
  Uniprot ID: Q8N3S3
  ENST ID: ENST00000275575
  CDS Start-End: 107-2194
ggcggcgctagcttcggagtctcccgcgcgcacctcagccgcctcctagcggcgcggcgctcgctcctacgcctaaaatgaccaatgtgtgatttcagtggaataaatggcgtccaaagtcacagatgctatagtctggtatcaaaagaagattggagcatatgatcaacaaatatgggaaaaatctgttgaacagagagaaatcaaggggctaaggaataaaccaaagaaaacagcacatgtgaaaccagacctcatagatgttgatcttgtaagagggtctgcatttgcaaaggcaaagcctgaaagtccttggacttctctgaccagaaagggaattgttcgagttgtatttttcccctttttcttccggtggtggttacaagtaacatcaaaggtcatctttttctggcttcttgtcctttatcttcttcaagttgctgcaatagtattattctgctccacttctagcccacacagcatacctctgacagaggtgattgggccgatatggctgatgctgctcctgggaactgtgcattgccagattgtttccacaagaacacccaaacctcctctaagtacagggggtaaaagaagaaggaaattaagaaaagcagcccatttggaagtacatagggaaggagatggttctagtaccacagataacacacaagagggagcagttcagaaccacggtacaagcacctctcacagcgttggcactgtcttcagagatctctggcatgctgctttctttttatcaggatcaaagaaagcaaagaattcaattgataaatcaactgaaactgacaatggctatgtatcccttgatgggaagaagactgttaaaagcggtgaagatggaatacaaaaccatgaacctcagtgtgaaactattcgaccagaagagacagcctggaacacaggaacactgaggaatggtcctagcaaagatacccaaaggacaataacaaatgtctctgatgaagtctccagtgaggaaggtcctgaaacaggatactcattacgtcgtcatgtggacaggacttctgaaggtgttcttcggaatagaaagtcacaccattataagaaacattaccctaatgaggacgcccctaaatcgggtactagttgcagctctcgctgttcaagttccagacaggattctgagagtgcaaggccagaatctgaaacagaagatgtgttatgggaagacttgttacattgtgcagaatgccattcatcttgtaccagtgagacagatgtggaaaatcatcagattaatccatgtgtgaaaaaagaatatagagatgacccttttcatcagagtcatttgccctggctccatagttcccacccaggattagaaaaaataagtgctatagtatgggaaggtaatgattgtaagaaagcagacatgtctgtacttgaaatcagtggaatgataatgaacagagtgaacagccatataccaggaataggataccagatttttggaaatgcagtctctctcatactgggtttaactccatttgttttccgactttctcaagctacagacttggaacaactcacagcacattctgcttcagaactttatgtgattgcatttggttctaatgaagatgtcatagttctttctatggttataataagttttgtggttcgcgtgtctcttgtgtggattttcttttttttgctctgtgtagcagaaagaacttataaacagcgattactttttgcaaaactctttggacatttaacatctgcaaggagggctcgaaaatctgaggttcctcatttccggttgaagaaagtacagaatataaaaatgtggctatctctccgttcctatcttaagcgtcgaggtcctcagcgatcagttgatgtaatagtttcatctgctttcttattgactatctcagttgtatttatctgttgtgcccagataaacctctacttgaaaatggagaaaaaacctaacaaaaaggaggaactgacactagtgaataatgttttaaaactggctactaaactgctaaaggagttggacagtccttttagattatatgggcttacaatgaatccgctgctttataacatcacccaggttgttatcctgtcagctgtttctggtgttatcagtgacttgcttggatttaatttaaagctatggaagattaagtcatgacaattcaaagaaaagaagatgtagcctcttttccagaataagagtactgactaagctgcctgaaagcttgtcactgattctttgcttcaggagtctcagctagggagttgaagtgtttacatcagactgtcttgtgcaattcttatatttattttactggttcacttttttttacatttattttagtctttatatttttatttttaagcattgatgtacttagttgttgaaagggtgatgaaactgatatccagatacttgagatcctggtaattggtcataaataattggcaaaataacaaattgtgaaaatagaagccattgctcagcaccgtttctccatcaatgccgtgaacttgccttacttgaggaaaaattctttaactttggaatattgcattgaactcagctatacacataaaacattttctttggtaaatcaagatccagtcagggtttctcttgaattattttggaacaatgccaggatccaaactgattaagttacagtttaagcacccttcagtattaatatatacggtattatataacaggtcaacaagtgctctttgatgataaaacttgtaatagagcaataattgtaaatggttaccatactgtaagatattttgataaaaattaactagtaatacttgtatttatttgaaacactgggctgtttgcacagctccaactgtgcatgctcaaaatgtgcactttttaaaattgttacttttaatgcgtatctttatatgggatctgttatagtatactagggcatgatatggtatccttttgagtgaggtatatactcatctcacaagtgaagtgcctactgatattactaaagtacattatgtttactcaagtaaataattttctccccatggtacactctagtgtaggctattcataccacactgaaatgaacaactgaagaataaggctaagaaccaataaaatatttctctaattgctagttgtaaaactgtatccaaattttcagaaaagacagcttcagcttgcaaattctatcctctaaacttatctggtgcattctccccaccccacccccattatataagggctattttagatgcttttaacctccccaacaaataatttgccaagtgtccaatgagaacttatcatgttggtgtgttaggtaaatcgggcaaatatgatagtgtcttacattgggccttgattttaagttgttatatttgtacaatcgagtattttagaaattacatgaaacatgaaacagtttttgcaattttttttaaactgggcatctggtttctaaaaatttatttgaaacaatctagaattttcttggtgcaaagtgtatcatgtggaatatcctcatatttttaccatattttaagaactttaagacgattaattgtaaataatttatttgattggtgcagttctaatccctaaatcataatcttaaaatcaggaatgtgtggagaacagagccatgtcatatcactttgctcttaccattccttttgatcagcctcaattcagcctcattgtgtagtatgttttttctttctatgaaaaacaacagaaagcatttcattttatttgcctatgttcaaatatgtttaataatgaccaaagtgcattctgagttttttcaaggaatgtaatactggagctttaagaacatacttagtttctcatgtgaaaacttaggctttgtctgatgtttttccttcctctattgtctaatgttgaggttgtttttaggaattatgttttataaactttttcaatataaggtacatgcctatacagaacttaacattttgcacagaatatatcaaatatattttgagaaaaaaagtacggcatgagttctgttaggaataaaagatgaaactattgtatctcacaaaaaatcttatttcagaatggaaatatttttgagaaaagtagctgagtatactggtttaagaaaatgcttgttttagattgaggttaacttagagttgggagttgatttattaagtacagtatacctctcaacagtttataaataatatgttgaattatgtcagtgtgggcagcagtagaatactaaaaggaaaatgtcatgttaagcaatttcagaacattaactgaactattttcaaagcagaaaaattgacattgctgcctttaagaataccatgaatgtaagaaattgaaagaaattgtaaaatatcacataatatagaaatggcagttcaaagagaattgtggcagatgttgtgtgtgaactgttgtttctttgccacatgtgttgtatttgaaagttttacagtaagtttaaaataaaacattctgtgactga

SEQ ID NO: 172524 - DNA, 4793 bp, Homo sapiens
  Payload ID: 13921
  Gene Symbol: PHTF2
  Gene Name: putative homeodomain transcription factor 2
  Uniprot ID: Q8N3S3
  ENST ID: ENST00000307305
  CDS Start-End: 203-2446
tccggcgcaaaatcctgcgggagagggggtggggcaaccctctggaggcagcgcgcccgcgggcagcctcgttgtggctccttgggctctgttggcggcggcgctagcttcggagtctcccgcgcgcacctcagccgcctcctagcggcgcggcgctcgctcctacgcctaaaatgaccaatgtgtgatttcagtggaataaatggcgtccaaagtcacagatgctatagtctggtatcaaaagaagattggagcatatgatcaacaaatatgggaaaaatctgttgaacagagagaaatcaaggggctaaggaataaaccaaagaaaacagcacatgtgaaaccagacctcatagatgttgatcttgtaagagggtctgcatttgcaaaggcaaagcctgaaagtccttggacttctctgaccagaaagggaattgttcgagttgtatttttcccctttttcttccggtggtggttacaagtaacatcaaaggtcatctttttctggcttcttgtcctttatcttcttcaagttgctgcaatagtattattctgctccacttctagcccacacagcatacctctgacagaggtgattgggccgatatggctgatgctgctcctgggaactgtgcattgccagattgtttccacaagaacacccaaacctcctctaagtacagggggtaaaagaagaaggaaattaagaaaagcagcccatttggaagtacatagggaaggagatggttctagtaccacagataacacacaagagggagcagttcagaaccacggtacaagcacctctcacagcgttggcactgtcttcagagatctctggcatgctgctttctttttatcaggatcaaagaaagcaaagaattcaattgataaatcaactgaaactgacaatggctatgtatcccttgatgggaagaagactgttaaaagcggtgaagatggaatacaaaaccatgaacctcagtgtgaaactattcgaccagaagagacagcctggaacacaggaacactgaggaatggtcctagcaaagatacccaaaggacaataacaaatgtctctgatgaagtctccagtgaggaaggtcctgaaacaggatactcattacgtcgtcatgtggacaggacttctgaaggtgttcttcggaatagaaagtcacaccattataagaaacattaccctaatgaggacgcccctaaatcgggtactagttgcagctctcgctgttcaagttccagacaggattctgagagtgcaaggccagaatctgaaacagaagatgtgttatgggaagacttgttacattgtgcagaatgccattcatcttgtaccagtgagacagatgtggaaaatcatcagattaatccatgtgtgaaaaaagaatatagagatgacccttttcatcagagtcatttgccctggctccatagttcccacccaggattagaaaaaataagtgctatagtatgggaaggtaatgattgtaagaaagcagacatgtctgtacttgaaatcagtggaatgataatgaacagagtgaacagccatataccaggaataggataccagatttttggaaatgcagtctctctcatactgggtttaactccatttgttttccgactttctcaagctacagacttggaacaactcacagcacattctgcttcagaactttatgtgattgcatttggttctaatgaagatgtcatagttctttctatggttataataagttttgtggttcgcgtgtctcttgtgtggattttcttttttttgctctgtgtagcagaaagaacttataaacagcgattactttttgcaaaactctttggacatttaacatctgcaaggagggctcgaaaatctgaggttcctcatttccggttgaagaaagtacagaatataaaaatgtggctatctctccgttcctatcttaagcgtcgaggtcctcagcgatcagttgatgtaatagtttcatctgctttcttattgactatctcagttgtatttatctgttgtgcccagctacttcatgtacacgagatcttccttgattgtcactacaattgggaattggtaatctggtgcatctcgttaacactttttctcctaagatttgttacccttggatcagaaacaagtaaaaaatatagtaatacctcaatattacttactgaacagataaacctctacttgaaaatggagaaaaaacctaacaaaaaggaggaactgacactagtgaataatgttttaaaactggctactaaactgctaaaggagttggacagtccttttagattatatgggcttacaatgaatccgctgctttataacatcacccaggttgttatcctgtcagctgtttctggtgttatcagtgacttgcttggatttaatttaaagctatggaagattaagtcatgacaattcaaagaaaagaagatgtagcctcttttccagaataagagtactgactaagctgcctgaaagcttgtcactgattctttgcttcaggagtctcagctagggagttgaagtgtttacatcagactgtcttgtgcaattcttatatttattttactggttcacttttttttacatttattttagtctttatatttttatttttaagcattgatgtacttagttgttgaaagggtgatgaaactgatatccagatacttgagatcctggtaattggtcataaataattggcaaaataacaaattgtgaaaatagaagccattgctcagcaccgtttctccatcaatgccgtgaacttgccttacttgaggaaaaattctttaactttggaatattgcattgaactcagctatacacataaaacattttctttggtaaatcaagatccagtcagggtttctcttgaattattttggaacaatgccaggatccaaactgattaagttacagtttaagcacccttcagtattaatatatacggtattatataacaggtcaacaagtgctctttgatgataaaacttgtaatagagcaataattgtaaatggttaccatactgtaagatattttgataaaaattaactagtaatacttgtatttatttgaaacactgggctgtttgcacagctccaactgtgcatgctcaaaatgtgcactttttaaaattgttacttttaatgcgtatctttatatgggatctgttatagtatactagggcatgatatggtatccttttgagtgaggtatatactcatctcacaagtgaagtgcctactgatattactaaagtacattatgtttactcaagtaaataattttctccccatggtacactctagtgtaggctattcataccacactgaaatgaacaactgaagaataaggctaagaaccaataaaatatttctctaattgctagttgtaaaactgtatccaaattttcagaaaagacagcttcagcttgcaaattctatcctctaaacttatctggtgcattctccccaccccacccccattatataagggctattttagatgcttttaacctccccaacaaataatttgccaagtgtccaatgagaacttatcatgttggtgtgttaggtaaatcgggcaaatatgatagtgtcttacattgggccttgattttaagttgttatatttgtacaatcgagtattttagaaattacatgaaacatgaaacagtttttgcaattttttttaaactgggcatctggtttctaaaaatttatttgaaacaatctagaattttcttggtgcaaagtgtatcatgtggaatatcctcatatttttaccatattttaagaactttaagacgattaattgtaaataatttatttgattggtgcagttctaatccctaaatcataatcttaaaatcaggaatgtgtggagaacagagccatgtcatatcactttgctcttaccattccttttgatcagcctcaattcagcctcattgtgtagtatgttttttctttctatgaaaaacaacagaaagcatttcattttatttgcctatgttcaaatatgtttaataatgaccaaagtgcattctgagttttttcaaggaatgtaatactggagctttaagaacatacttagtttctcatgtgaaaacttaggctttgtctgatgtttttccttcctctattgtctaatgttgaggttgtttttaggaattatgttttataaactttttcaatataaggtacatgcctatacagaacttaacattttgcacagaatatatcaaatatattttgagaaaaaaagtacggcatgagttctgttaggaataaaagatgaaactattgtatctcacaaaaaatcttatttcagaatggaaatatttttgagaaaagtagctgagtatactggtttaagaaaatgcttgttttagattgaggttaacttagagttgggagttgatttattaagtacagtatacctctcaacagtttataaataatatgttgaattatgtcagtgtgggcagcagtagaatactaaaaggaaaatgtcatgttaagcaatttcagaacattaactgaactattttcaaagcagaaaaattgacattgctgcctttaagaataccatgaatgtaagaaattgaaagaaattgtaaaatatcacataatatagaaatggcagttcaaagagaattgtggcagatgttgtgtgtgaactgttgtttctttgccacatgtgttgtatttgaaagttttacagtaagtttaaaataaaacattctgtgactga

SEQ ID NO: 172525 - DNA, 2516 bp, Homo sapiens
  Payload ID: 13921
  Gene Symbol: PHTF2
  Gene Name: putative homeodomain transcription factor 2
  Uniprot ID: Q8N3S3
  ENST ID: ENST00000450574
  CDS Start-End: 127-1197
aagtaaccagagtgctatgtctgcatgctgttcagtctccttttggaaggtgggaaataaagtcatttgtatgtttttctctcttgcacagcctaaaatgaccaatgtgtgatttcagtggaataaatggcgtccaaagtcacagatgctatagtctggtatcaaaagaagattggagcatatgatcaacaaatatgggaaaaatctgttgaacagagagaaatcaagtttattaaactggggctaaggaataaaccaaagaaaacagcacatgtgaaaccagacctcatagatgttgatcttgtaagagggtctgcatttgcaaaggcaaagcctgaaagtccttggacttctctgaccagaaagggaattgttcgagttgtatttttcccctttttcttccggtggtggttacaagtaacatcaaaggtcatctttttctggcttcttgtcctttatcttcttcaagttgctgcaatagtattattctgctccacttctagcccacacagcatacctctgacagaggtgattgggccgatatggctgatgctgctcctgggaactgtgcattgccagattgtttccacaagaacacccaaacctcctctaagtacagggggtaaaagaagaaggaaattaagaaaagcagcccatttggaagtacatagggaaggagatggttctagtaccacagataacacacaagagggagcagttcagaaccacggtacaagcacctctcacagcgttggcactgtcttcagagatctctggcatgctgctttctttttatcaggatcaaagaaagcaaagaattcaattgataaatcaactgaaactgacaatggctatgtatcccttgatgggaagaagactgttaaaagcggtgaagatggaatacaaaaccatgaacctcagtgtgaaactattcgaccagaagagacagcctggaacacaggaacactgaggaatggtcctagcaaagatacccaaaggacaataacaaatgtctctgatgaagtctccagtgaggaaggtcctgaaacaggatactcattacgtcgtcatgtggacaggacttctgaaggtgttcttcggaatagaaagtcacaccattataagaaacattaccctaatgaggtatatactttgtccttaagtgtatacatacgtatctattttatatgttactaatttataacttctttcaacaattaaaaattgttgaaataaatatttcacattattatcaatatttattattgttgtatgatctggatttataaaatagcagttttaggtttacgtattgcacatgtattgatagatagccacacatttgagctcattttatgcattatctttgaagactcatacattgtttgttgtttgcttttaaagaagaacattctggagagagaatctgcaaactcctgtgttcactttttccacaatttgaaaggctttatacatttgatcatagcaaagttattttaagtaacttccttcatattgctgtcaccagttattaagtccccatacttcaaaattcagttcttttttctttgtttctatttttccttattaatctttattttctctaaacccttttcaactatatcatatctcttgagcttcaaattgtttaaataaagaatttcattcaattgtattttcagtttctaatctaagggtagaacatttggctttaaggcaaataaattacactgtttatcacttttttataaacattaccttctactctttttgagctatgttagtaattttttccttgatggttttgggttaaacttgtaaaacaaacacatgttacgctgtgctggaatatgattgccttcagagtattaagattagaagagttactattctttgcacactcttctttgtggttgtgtctctggttaatctttctggtgattgtggttttgtttcttttcccagtggttgccatacagacactaatgccagtgtgtctgctctattgcctcttcacccatgtcatttgatgtagtgtttcttgttcctaagccagataaccaagcttgtaaaattttgtcttactgtatgtactgttagaagtcagttggtgctggaagggagacggagggctgtttgacccctctcccagaataaattatttagcagtagcagtatttttctcactccatgatcttggcttttgttggtttgcaactgtattttaaacgattgagtttcttgaagcgcagaacattattctacctattaacttttaaattaaaaggttgtttaaaatcttgatttccagctaagtaaggctgatagtaagcattgatttacatcttttttaatgatataagaaattacataaatataaaatatggctataaaattcttcgtctataaagtgaagaatgtagactaggtgatattttaaaagctgcattcagttctcaaaaatttttactcttaaaccagctttaaagggcgtttctaaaaaaaagcaaaataaa

SEQ ID NO: 172526 - DNA, 5198 bp, Homo sapiens
  Payload ID: 13921
  Gene Symbol: PHTF2
  Gene Name: putative homeodomain transcription factor 2
  Uniprot ID: Q8N3S3
  ENST ID: ENST00000416283
  CDS Start-End: 216-2573
agtgactgcaggctccggcgcaaaatcctgcgggagagggggtggggcaaccctctggaggcagcgcgcccgcgggcagcctcgttgtggctccttgggctctgttggcggcggcgctagcttcggagtctcccgcgcgcacctcagccgcctcctagcggcgcggcgctcgctcctacgcctaaaatgaccaatgtgtgatttcagtggaataaatggcgtccaaagtcacagatgctatagtctggtatcaaaagaaggagtttctctctgtggccaccaccgccccaggcccacagcaagtactgcctggctactgccagtgttcactcaaggaccaagggctcttcattcagtgtttgattggagcatatgatcaacaaatatgggaaaaatctgttgaacagagagaaatcaagtttattaaactggggctaaggaataaaccaaagaaaacagcacatgtgaaaccagacctcatagatgttgatcttgtaagagggtctgcatttgcaaaggcaaagcctgaaagtccttggacttctctgaccagaaagggaattgttcgagttgtatttttcccctttttcttccggtggtggttacaagtaacatcaaaggtcatctttttctggcttcttgtcctttatcttcttcaagttgctgcaatagtattattctgctccacttctagcccacacagcatacctctgacagaggtgattgggccgatatggctgatgctgctcctgggaactgtgcattgccagattgtttccacaagaacacccaaacctcctctaagtacagggggtaaaagaagaaggaaattaagaaaagcagcccatttggaagtacatagggaaggagatggttctagtaccacagataacacacaagagggagcagttcagaaccacggtacaagcacctctcacagcgttggcactgtcttcagagatctctggcatgctgctttctttttatcaggatcaaagaaagcaaagaattcaattgataaatcaactgaaactgacaatggctatgtatcccttgatgggaagaagactgttaaaagcggtgaagatggaatacaaaaccatgaacctcagtgtgaaactattcgaccagaagagacagcctggaacacaggaacactgaggaatggtcctagcaaagatacccaaaggacaataacaaatgtctctgatgaagtctccagtgaggaaggtcctgaaacaggatactcattacgtcgtcatgtggacaggacttctgaaggtgttcttcggaatagaaagtcacaccattataagaaacattaccctaatgaggacgcccctaaatcgggtactagttgcagctctcgctgttcaagttccagacaggattctgagagtgcaaggccagaatctgaaacagaagatgtgttatgggaagacttgttacattgtgcagaatgccattcatcttgtaccagtgagacagatgtggaaaatcatcagattaatccatgtgtgaaaaaagaatatagagatgacccttttcatcagagtcatttgccctggctccatagttcccacccaggattagaaaaaataagtgctatagtatgggaaggtaatgattgtaagaaagcagacatgtctgtacttgaaatcagtggaatgataatgaacagagtgaacagccatataccaggaataggataccagatttttggaaatgcagtctctctcatactgggtttaactccatttgttttccgactttctcaagctacagacttggaacaactcacagcacattctgcttcagaactttatgtgattgcatttggttctaatgaagatgtcatagttctttctatggttataataagttttgtggttcgcgtgtctcttgtgtggattttcttttttttgctctgtgtagcagaaagaacttataaacagcgattactttttgcaaaactctttggacatttaacatctgcaaggagggctcgaaaatctgaggttcctcatttccggttgaagaaagtacagaatataaaaatgtggctatctctccgttcctatcttaagcgtcgaggtcctcagcgatcagttgatgtaatagtttcatctgctttcttattgactatctcagttgtatttatctgttgtgcccagctacttcatgtacacgagatcttccttgattgtcactacaattgggaattggtaatctggtgcatctcgttaacactttttctcctaagatttgttacccttggatcagaaacaagtaaaaaatatagtaatacctcaatattacttactgaacagataaacctctacttgaaaatggagaaaaaacctaacaaaaaggaggaactgacactagtgaataatgttttaaaactggctactaaactgctaaaggagttggacagtccttttagattatatgggcttacaatgaatccgctgctttataacatcacccaggttgttatcctgtcagctgtttctggtgttatcagtgacttgcttggatttaatttaaagctatggaagattaagtcatgacaattcaaagaaaagaagatgtagcctcttttccagaataagagtactgactaagctgcctgaaagcttgtcactgattctttgcttcaggagtctcagctagggagttgaagtgtttacatcagactgtcttgtgcaattcttatatttattttactggttcacttttttttacatttattttagtctttatatttttatttttaagcattgatgtacttagttgttgaaagggtgatgaaactgatatccagatacttgagatcctggtaattggtcataaataattggcaaaataacaaattgtgaaaatagaagccattgctcagcaccgtttctccatcaatgccgtgaacttgccttacttgaggaaaaattctttaactttggaatattgcattgaactcagctatacacataaaacattttctttggtaaatcaagatccagtcagggtttctcttgaattattttggaacaatgccaggatccaaactgattaagttacagtttaagcacccttcagtattaatatatacggtattatataacaggtcaacaagtgctctttgatgataaaacttgtaatagagcaataattgtaaatggttaccatactgtaagatattttgataaaaattaactagtaatacttgtatttatttgaaacactgggctgtttgcacagctccaactgtgcatgctcaaaatgtgcactttttaaaattgttacttttaatgcgtatctttatatgggatctgttatagtatactagggcatgatatggtatccttttgagtgaggtatatactcatctcacaagtgaagtgcctactgatattactaaagtacattatgtttactcaagtaaataattttctccccatggtacactctagtgtaggctattcataccacactgaaatgaacaactgaagaataaggctaagaaccaataaaatatttctctaattgctagttgtaaaactgtatccaaattttcagaaaagacagcttcagcttgcaaattctatcctctaaacttatctggtgcattctccccaccccacccccattatataagggctattttagatgcttttaacctccccaacaaataatttgccaagtgtccaatgagaacttatcatgttggtgtgttaggtaaatcgggcaaatatgatagtgtcttacattgggccttgattttaagttgttatatttgtacaatcgagtattttagaaattacatgaaacatgaaacagtttttgcaattttttttaaactgggcatctggtttctaaaaatttatttgaaacaatctagaattttcttggtgcaaagtgtatcatgtggaatatcctcatatttttaccatattttaagaactttaagacgattaattgtaaataatttatttgattggtgcagttctaatccctaaatcataatcttaaaatcaggaatgtgtggagaacagagccatgtcatatcactttgctcttaccattccttttgatcagcctcaattcagcctcattgtgtagtatgttttttctttctatgaaaaacaacagaaagcatttcattttatttgcctatgttcaaatatgtttaataatgaccaaagtgcattctgagttttttcaaggaatgtaatactggagctttaagaacatacttagtttctcatgtgaaaacttaggctttgtctgatgtttttccttcctctattgtctaatgttgaggttgtttttaggaattatgttttataaactttttcaatataaggtacatgcctatacagaacttaacattttgcacagaatatatcaaatatattttgagaaaaaaagtacggcatgagttctgttaggaataaaagatgaaactattgtatctcacaaaaaatcttatttcagaatggaaatatttttgagaaaagtagctgagtatactggtttaagaaaatgcttgttttagattgaggttaacttagagttgggagttgatttattaagtacagtatacctctcaacagtttataaataatatgttgaattatgtcagtgtgggcagcagtagaatactaaaaggaaaatgtcatgttaagcaatttcagaacattaactgaactattttcaaagcagaaaaattgacattgctgcctttaagaataccatgaatgtaagaaattgaaagaaattgtaaaatatcacataatatagaaatggcagttcaaagagaattgtggcagatgttgtgtgtgaactgttgtttctttgccacatgtgttgtatttgaaagttttacagtaagtttaaaataaaacattctgtgactgacggtgtttttttttttaattttcaggtcatatacatttctatggtaattttgtgtttacttaacataaaatttagttagatttggggggagtgaaaataaattttttataactttccaacattttagattttgttatgattcttagaacatgaaagaataatacacaggtttttcatcaccaaaatgatattatatcattaatgtttgtttgcttctttgtttttgaatacagcaaactggctgtggcctgaaatattaaagctcattgtgaaaagat

SEQ ID NO: 172527 - DNA, 3525 bp, Homo sapiens
  Payload ID: 13921
  Gene Symbol: PHTF2
  Gene Name: putative homeodomain transcription factor 2
  Uniprot ID: Q8N3S3
  ENST ID: ENST00000422959
  CDS Start-End: 203-2458
tccggcgcaaaatcctgcgggagagggggtggggcaaccctctggaggcagcgcgcccgcgggcagcctcgttgtggctccttgggctctgttggcggcggcgctagcttcggagtctcccgcgcgcacctcagccgcctcctagcggcgcggcgctcgctcctacgcctaaaatgaccaatgtgtgatttcagtggaataaatggcgtccaaagtcacagatgctatagtctggtatcaaaagaagattggagcatatgatcaacaaatatgggaaaaatctgttgaacagagagaaatcaagtttattaaactggggctaaggaataaaccaaagaaaacagcacatgtgaaaccagacctcatagatgttgatcttgtaagagggtctgcatttgcaaaggcaaagcctgaaagtccttggacttctctgaccagaaagggaattgttcgagttgtatttttcccctttttcttccggtggtggttacaagtaacatcaaaggtcatctttttctggcttcttgtcctttatcttcttcaagttgctgcaatagtattattctgctccacttctagcccacacagcatacctctgacagaggtgattgggccgatatggctgatgctgctcctgggaactgtgcattgccagattgtttccacaagaacacccaaacctcctctaagtacagggggtaaaagaagaaggaaattaagaaaagcagcccatttggaagtacatagggaaggagatggttctagtaccacagataacacacaagagggagcagttcagaaccacggtacaagcacctctcacagcgttggcactgtcttcagagatctctggcatgctgctttctttttatcaggatcaaagaaagcaaagaattcaattgataaatcaactgaaactgacaatggctatgtatcccttgatgggaagaagactgttaaaagcggtgaagatggaatacaaaaccatgaacctcagtgtgaaactattcgaccagaagagacagcctggaacacaggaacactgaggaatggtcctagcaaagatacccaaaggacaataacaaatgtctctgatgaagtctccagtgaggaaggtcctgaaacaggatactcattacgtcgtcatgtggacaggacttctgaaggtgttcttcggaatagaaagtcacaccattataagaaacattaccctaatgaggacgcccctaaatcgggtactagttgcagctctcgctgttcaagttccagacaggattctgagagtgcaaggccagaatctgaaacagaagatgtgttatgggaagacttgttacattgtgcagaatgccattcatcttgtaccagtgagacagatgtggaaaatcatcagattaatccatgtgtgaaaaaagaatatagagatgacccttttcatcagagtcatttgccctggctccatagttcccacccaggattagaaaaaataagtgctatagtatgggaaggtaatgattgtaagaaagcagacatgtctgtacttgaaatcagtggaatgataatgaacagagtgaacagccatataccaggaataggataccagatttttggaaatgcagtctctctcatactgggtttaactccatttgttttccgactttctcaagctacagacttggaacaactcacagcacattctgcttcagaactttatgtgattgcatttggttctaatgaagatgtcatagttctttctatggttataataagttttgtggttcgcgtgtctcttgtgtggattttcttttttttgctctgtgtagcagaaagaacttataaacagcgattactttttgcaaaactctttggacatttaacatctgcaaggagggctcgaaaatctgaggttcctcatttccggttgaagaaagtacagaatataaaaatgtggctatctctccgttcctatcttaagcgtcgaggtcctcagcgatcagttgatgtaatagtttcatctgctttcttattgactatctcagttgtatttatctgttgtgcccagctacttcatgtacacgagatcttccttgattgtcactacaattgggaattggtaatctggtgcatctcgttaacactttttctcctaagatttgttacccttggatcagaaacaagtaaaaaatatagtaatacctcaatattacttactgaacagataaacctctacttgaaaatggagaaaaaacctaacaaaaaggaggaactgacactagtgaataatgttttaaaactggctactaaactgctaaaggagttggacagtccttttagattatatgggcttacaatgaatccgctgctttataacatcacccaggttgttatcctgtcagctgtttctggtgttatcagtgacttgcttggatttaatttaaagctatggaagattaagtcatgacaattcaaagaaaagaagatgtagcctcttttccagaataagagtactgactaagctgcctgaaagcttgtcactgattctttgcttcaggagtctcagctagggagttgaagtgtttacatcagactgtcttgtgcaattcttatatttattttactggttcacttttttttacatttattttagtctttatatttttatttttaagcattgatgtacttagttgttgaaagggtgatgaaactgatatccagatacttgagatcctggtaattggtcataaataattggcaaaataacaaattgtgaaaatagaagccattgctcagcaccgtttctccatcaatgccgtgaacttgccttacttgaggaaaaattctttaactttggaatattgcattgaactcagctatacacataaaacattttctttggtaaatcaagatccagtcagggtttctcttgaattattttggaacaatgccaggatccaaactgattaagttacagtttaagcacccttcagtattaatatatacggtattatataacaggtcaacaagtgctctttgatgataaaacttgtaatagagcaataattgtaaatggttaccatactgtaagatattttgataaaaattaactagtaatacttgtatttatttgaaacactgggctgtttgcacagctccaactgtgcatgctcaaaatgtgcactttttaaaattgttacttttaatgcgtatctttatatgggatctgttatagtatactagggcatgatatggtatccttttgagtgaggtatatactcatctcacaagtgaagtgcctactgatattactaaagtacattatgtttactcaagtaaataattttctccccatggtacactctagtgtaggctattcataccacactgaaatgaacaactgaagaataaggctaagaaccaataaaatatttctctaattgctagttgtaaaactgtatccaaattttcagaaaagacagcttcagcttgcaaattctatcctctaaacttatctggtgcattctccccacc

SEQ ID NO: 172528 - DNA, 1977 bp, Homo sapiens
  Payload ID: 13921
  Gene Symbol: PHTF2
  Gene Name: putative homeodomain transcription factor 2
  Uniprot ID: Q8N3S3
  ENST ID: ENST00000424760
  CDS Start-End: 195-1835
aaaatcctgcgggagagggggtggggcaaccctctggaggcagcgcgcccgcgggcagcctcgttgtggctccttgggctctgttggcggcggcgctagcttcggagtctcccgcgcgcacctcagccgcctcctagcggcgcggcgctcgctcctacgcctaaaatgaccaatgtgtgatttcagtggaataaatggcgtccaaagtcacagatgctatagtctggtatcaaaagaagattggagcatatgatcaacaaatatgggaaaaatctgttgaacagagagaaatcaaggggctaaggaataaaccaaagaaaacagcacatgtgaaaccagacctcatagatgttgatcttgtaagagggtctgcatttgcaaaggcaaagcctgaaagtccttggacttctctgaccagaaagggaattgttcgagttgtatttttcccctttttcttccggtggtggttacaagtaacatcaaaggtcatctttttctggcttcttgtcctttatcttcttcaagttgctgcaatagtattattctgctccacttctagcccacacagcatacctctgacagaggtgattgggccgatatggctgatgctgctcctgggaactgtgcattgccagattgtttccacaagaacacccaaacctcctctaagtacagggggtaaaagaagaaggaaattaagaaaagcagcccatttggaagtacatagggaaggagatggttctagtaccacagataacacacaagagggagcagttcagaaccacggtacaagcacctctcacagcgttggcactgtcttcagagatctctggcatgctgctttctttttatcaggatcaaagaaagcaaagaattcaattgataaatcaactgaaactgacaatggctatgtatcccttgatgggaagaagactgttaaaagcggtgaagatggaatacaaaaccatgaacctcagtgtgaaactattcgaccagaagagacagcctggaacacaggaacactgaggaatggtcctagcaaagatacccaaaggacaataacaaatgtctctgatgaagtctccagtgaggaaggtcctgaaacaggatactcattacgtcgtcatgtggacaggacttctgaaggtgttcttcggaatagaaagtcacaccattataagaaacattaccctaatgaggacgcccctaaatcgggtactagttgcagctctcgctgttcaagttccagacaggattctgagagtgcaaggccagaatctgaaacagaagatgtgttatgggaagacttgttacattgtgcagaatgccattcatcttgtaccagtgagacagatgtggaaaatcatcagattaatccatgtgtgaaaaaagaatatagagatgacccttttcatcagagtcatttgccctggctccatagttcccacccaggattagaaaaaataagtgctatagtatgggaaggtaatgattgtaagaaagcagacatgtctgtacttgaaatcagtggaatgataatgaacagagtgaacagccatataccaggaataggataccagatttttggaaatgcagtctctctcatactgggtttaactccatttgttttccgactttctcaagctacagacttggaacaactcacagcacattctgcttcagaactttatgtgattgcatttggttctaatgaagatgtcatagttctttctatggttataataagttttgtggttcgcgtgtctcttgtgtggattttcttttttttgctctgtgtagcagaaagaacttataaacaggtgggtataatgtagacttccgaataagaatattttatcgttttcataatattaaaagtattcctgaagtactttattatttcattatatcatttttacctaattattttttattttgcttttatagtacctaaccaaataaaatcttaacaattca

SEQ ID NO: 172529 - DNA, 1738 bp, Homo sapiens
  Payload ID: 13921
  Gene Symbol: PHTF2
  Gene Name: putative homeodomain transcription factor 2
  Uniprot ID: Q8N3S3
  ENST ID: ENST00000415251
  CDS Start-End: 120-1178
gggctctgttggcggcggcgctagcttcggagtctcccgcgcgcacctcagccgcctcctagcggcgcggcgctcgctcctacgcctaaaatgaccaatgtgtgatttcagtggaataaatggcgtccaaagtcacagatgctatagtctggtatcaaaagaagattggagcatatgatcaacaaatatgggaaaaatctgttgaacagagagaaatcaaggggctaaggaataaaccaaagaaaacagcacatgtgaaaccagacctcatagatgttgatcttgtaagagggtctgcatttgcaaaggcaaagcctgaaagtccttggacttctctgaccagaaagggaattgttcgagttgtatttttcccctttttcttccggtggtggttacaagtaacatcaaaggtcatctttttctggcttcttgtcctttatcttcttcaagttgctgcaatagtattattctgctccacttctagcccacacagcatacctctgacagaggtgattgggccgatatggctgatgctgctcctgggaactgtgcattgccagattgtttccacaagaacacccaaacctcctctaagtacagggggtaaaagaagaaggaaattaagaaaagcagcccatttggaagtacatagggaaggagatggttctagtaccacagataacacacaagagggagcagttcagaaccacggtacaagcacctctcacagcgttggcactgtcttcagagatctctggcatgctgctttctttttatcaggatcaaagaaagcaaagaattcaattgataaatcaactgaaactgacaatggctatgtatcccttgatgggaagaagactgttaaaagcggtgaagatggaatacaaaaccatgaacctcagtgtgaaactattcgaccagaagagacagcctggaacacaggaacactgaggaatggtcctagcaaagatacccaaaggacaataacaaatgtctctgatgaagtctccagtgaggaaggtcctgaaacaggatactcattacgtcgtcatgtggacaggacttctgaaggtgttcttcggaatagaaagtcacaccattataagaaacattaccctaatgaggtatatactttgtccttaagtgtatacatacgtatctattttatatgttactaatttataacttctttcaacaattaaaaattgttgaaataaatatttcacattattatcaatatttattattgttgtatgatctggatttataaaatagcagttttaggtttacgtattgcacatgtattgatagatagccacacatttgagctcattttatgcattatctttgaagactcatacattgtttgttgtttgcttttaaagaagaacattctggagagagaatctgcaaactcctgtgttcactttttccacaatttgaaaggctttatacatttgatcatagcaaagttattttaagtaacttccttcatattgctgtcaccagttattaagtccccatacttcaaaattcagttcttttttctttgtttctatttttccttattaatctttattttctctaaacccttttcaactatatcatatctcttgagcttcaaattgtttaaataaagaatttcattcaattgtattttcagtttctaatctaagggtagaacatttggctttaaggcaaataaattacactgtttatcacttttttataaacatta

SEQ ID NO: 172530 - DNA, 3584 bp, Homo sapiens
  Payload ID: 13922
  Gene Symbol:
  Gene Name: Putative NPIP-like protein LOC613037  [Source:UniProtKB/Swiss-Prot
  Acc:A6NJU9]
  Uniprot ID: A6NJU9
  ENST ID: ENST00000520915
  CDS Start-End: 76-3492
tcctgtttcacacagaagaaaactgaggttaaaaggggttggcactcatcatgagcccctgttctcattctgcaaatggtgaagctctctattgtcctgaccccacagttcctgtcccatgaccagggccagctcaccaaggagctgcagcagcatgtaaagtcagtgacatgcccatgcgagtacctgaggaaggttatcaatactctggctgaccatcatcatcgtgggactgactttggtggaagtccttggttacatgtcattattgcgtttccgacaagttataaagttgtcattaccctctggatagtttacctttgggtgtctctcctgaagactatcttctggtctcgaaatggacatgatggatccacggatgtacagcagagagcctggaggtccaaccgccgtagacaggaagggctgaggtccatttgtatgcacacaaagaaaagagtttcttcctttcgaggaaataaaattggcctgaaagacgtcattactctacggagacatgtggaaacaaaagttagagctaaaatccgtaagaggaaggtgacaacgaaaatcaaccatcatgacaaaatcaatggaaagaggaagaccgccagaaaacagaaaatgtttcaacgtgcgcaagagttgcggcggcgggcagaggactaccacaaatgcaaaatccccccttctgcaagaaaggctctttgcaactgggtcagaatggcggcagcggagcatcgtcattcttcaggattgccctactggccctacctcacagctgaaactttaaaaaacaggatgggccaccagccacctcctccaactcaacaacattctataactgataactccctgagcctcaagacacctcccgagtgtgtgctcactccccttccaccctcagcggatgataatctcaagacacctcccgagtgtgtgctcactccccttccaccctcagcggatgataatctcaagacacctcctgagtgtctgctcactccccttccaccctcagcggatgataatctcaagacacctcctgagtgtctgctcactccccttccaccctcagcggatgataatctcaagacacctcccgagtgtctgctcactccccttccaccctcagctccaccctcagctccaccctcagcggatgataatctcaagacacgtgccgagtgtctgctccatccccttccaccctcagcggatgataatctcaagacaccttccgagcgtcagctcactccccttccaccctcagctccaccctcagcagatgataatatcaagacacctgccgagcgtctgcgggggccgcttccaccctcagcggatgataatctcaagacaccttccgagcgtcagctcactccccttccaccctcagctccaccctcagcagatgataatatcaagacacctgccgagcgtctgcgggggccgcttccaccctcagcggatgataatctcaagacaccttccgagcgtcagctcactccccttccaccctcagctccaccctcagcagatgataatatcaagacacctgccgagcgtctgcgggggccgcttccaccctcagcggatgataatctcaagacaccttccgagcgtcagctcactccccttccaccctcagctccaccctcagcagatgataatatcaagacacctgccgagcgtctgcgggggccgcttccaccctcagcggatgataatctcaagacaccttccgagcgtcagctcactccccttccaccctcagctccaccctcagcagatgataatatcaagacacctgccttccaccctcagcggatgataatctcaagacaccttccgagcgtcagctcactccccttccaccctcagctccactctcagcagatgataatatcaagatacctgctgagcgtctgcggattccgcttccaccatcagccgatgataatctcaagacaccttccgagcgtcagctcactccccttccaccctcagctccaccctcagcagatgataatatcaagacacctgccgagcgtctgcgggggccgcttccaccctcagcggatgataatctcaagacaccttccgagcgtcagctcactccccttccaccctcagctccaccctcagcagatgataatatcaagacacctgccgagcgtctgcgggggccgcttccaccctcagcggatgataatctcaagacaccttccgagcgtcagctcactccccttccaccctcagctccaccctcagcagatgataatatcaagacacctgccgagcgtctgcggggagcgtctgcgggggccgcttccaccctcagcggatgataatctcaagacaccttccgagcgtcagctcactccccttccaccctcagctccaccctcagcagatgataatatcaagacacctgccgagcgtctgcggaggccgcttccaccctcagcggatgataatctcaagacaccttccgagcgtcagctcactccccttccaccctcagctccaccctcagcagatgataatatcaagacacctgccgagcgtctgcgggggccgcttccaccctcagcggatgataatctcaagacaccttccgagcgtcagctcactccccttccaccctcagctccaccctcagcagatgataatatcaagacacctgccgagcgtctgcgggggccgcttccaccctcagcggatgataatctcaagacaccttccgagcgtcagctcactccccttccaccctcagctccaccctcagcagatgataatatcaagacacctgccgagcgtctgcgggggccgcttccaccctcagcggatgataatctcaagacaccttccgagcgtcagctcactccccttccaccctcagctccaccctcagcagatgataatatcaagacacctgccgagcgtctgcgggggccgcttccaccctcagcggatgataatctcaagacaccttctgagcgtcagctcactccccttccaccctcagctccaccctcagcagatgataatatcaagacacctgccgagcgtctgcgggggccgcttccaccctcagccgatgataatctcaagacacctcccttagctactcaggaggctgaggcagaaaaaccacgcaaacccaagaggcagagggcggctgagatggaaccacctcccgaacccaagaggcggagggtcggtgacgtggaaccgtcacgcaaacccaagaggcggagggccgctgacgtggaaccatcatcacccaaacccaagaggcggagggtcggtgatgtggaaccgtcacgcaaacccaagaggcggagggccgctgacgtggaaccatcatcacccgaacccaagaggcggagggtcggtgacgtggaaccgtcacgcaaacccaagaggcggagggccgctgacgtggaaccatcatcacccgaacccaagaggcggaggttgagctgagaagaggccagtgcactcaagcctgagcaataagaataaaaccgagtagaacaaaataaaaaattcaaaaaacaaaacaaaacccacactcc

SEQ ID NO: 172531 - DNA, 1342 bp, Homo sapiens
  Payload ID: 13922
  Gene Symbol:
  Gene Name: Putative NPIP-like protein LOC613037  [Source:UniProtKB/Swiss-Prot
  Acc:A6NJU9]
  ENST ID: ENST00000543463
  CDS Start-End: 33-1295
aaacattccctcctttggccctacaggtcagaatggcggcagcggagcatcgtcattcttcaggattgccctactggccctacctcacagctgaaactttaaaaaacaggatgggccaccagccacctcctccaactcaacaacattctataactgataactccctgagcctcaagacacctcccgagtgtgtgctcactccccttccaccctcagcggatgataatctcaagacacctcccgagtgtgtgctcactccccttccaccctcagcggatgataatctcaagacacctcctgagtgtctgctcactccccttccaccctcagcggatgataatctcaagacacctcctgagtgtctgctcactccccttccaccctcagcggatgataatctcaagacacctcccgagtgtctgctcactccccttccaccctcagctccaccctcagctccaccctcagcggatgataatctcaagacacgtgccgagtgtctgctccatccccttccaccctcagcggatgataatctcaagacaccttccgagcgtcagctcactccccttccaccctcagctccaccctcagcagatgataatatcaagacacctgccgagcgtctgcgggggccgcttccaccctcagcggatgataatctcaagacaccttccgagcgtcagctcactccccttccaccctcagctccaccctcagcagatgataatatcaagacacctgccgagcgtctgcgggggccgcttccaccctcagcggatgataatctcaagacaccttccgagcgtcagctcactccccttccaccctcagctccaccctcagcagatgataatatcaagacacctgccgagcgtctgcgggggccgcttccaccctcagccgatgataatctcaagacacctcccttagctactcaggaggctgaggcagaaaaaccacgcaaacccaagaggcagagggcggctgagatggaaccacctcccgaacccaagaggcggagggtcggtgacgtggaaccgtcacgcaaacccaagaggcggagggccgctgacgtggaaccatcatcacccaaacccaagaggcggagggtcggtgatgtggaaccgtcacgcaaacccaagaggcggagggccgctgacgtggaaccatcatcacccgaacccaagaggcggagggtcggtgacgtggaaccgtcacgcaaacccaagaggcggagggccgctgacgtggaaccatcatcacccgaacccaagaggcggaggttgagctgagaagaggccagtgcactcaagcctgagcaataagaataaaaccgagt

SEQ ID NO: 172532 - DNA, 797 bp, Homo sapiens
  Payload ID: 13922
  Gene Symbol:
  Gene Name: Putative NPIP-like protein LOC613037 [Source:UniProtKB/Swiss-Prot
  Acc:A6NJU9]
  ENST ID: ENST00000562937
  CDS Start-End: 1-207
catgtcattattgcgtttccgacaagttataaagttgtcattaccctctggatagtttacctttgggtgtctctcctgaagactatcttctggtctcgaaatggacatgatggatccacggatgtacagcagagagcctggaggtccaaccgccgtagacaggaaggtttctcaccttctcctctcctcactctcaccaagggctgaggtccatttgtatgcacacaaagaaaagagtttcttcctttcgaggaaataaaattggcctgaaagacgtcattactctacggagacatgtggaaacaaaagttagagctaaaatccgtaagaggaaggtgacaacgaaaatcaaccatcatgacaaaatcaatggaaagaggaagaccgccagaaaacagaaactaagcgtgaaagaatgtgagcatgcagaaaaggagaggcaggtatcagaggcagaggaaaatgggaaattggatatgaaagaaatacacacctacaagaaaatgtttcaacgtgcgcaagagttgcggcggcgggcagaggactaccacaaatgcaaaatccccccttctgcaagaaaggctctttgcaactgggtcagaatggcggcagcggagcatcgtcattcttcaggattgccctactggccctacctcacagctgaaactttaaaaaacaggatgggccaccagccacctcctccaactcaacaacattctataactgataactccctgagcctcaagacacctcccgagtgtgtgctcactccccttccaccctcagcggatgataat

SEQ ID NO: 172533 - DNA, 570 bp, Homo sapiens
  Payload ID: 13922
  Gene Symbol:
  Gene Name: Putative NPIP-like protein LOC613037 [Source:UniProtKB/Swiss-Prot
  Acc:A6NJU9]
  ENST ID: ENST00000568053
  CDS Start-End: 319-570
gctaaaaatatggtggacctggcattacagctattacaaatctcctaagatgtctcgggtagtgtattagttacttttcatactgctatgaagaaatactggaaactgggtaatttataaagaaaaagaggtttaatgtactcacagttccacaaggctggagaggcctcagaatcatggtggaaggcaaggagcaaaaaggtatgatctcgtgaaaccttgagagaaactgaatgacgaatgaaactattgttcctgtttcacacagaagaaaactgaggttggcactcatcatgagcccctgttctcattctgcaaatggtgaagctctctattgtcctgaccccacagttcctgtcccatgaccagggccagctcaccaaggagctgcagcagcatgtaaagtcagtgacatgcccatgcgagtacctgaggaaggttatcaatactctggctgaccatcatcatcgtgggactgactttggtggaagtccttggttacatgtcattattgcgtttccgacaagttataaagttgtcattaccctctggatagtttacctttgggtg

SEQ ID NO: 172534 - DNA, 519 bp, Homo sapiens; identical to SEQ ID NO: 160653
  Payload ID: 13922
  Gene Symbol:
  Gene Name: Putative NPIP-like protein LOC613037 [Source:UniProtKB/Swiss-Prot
  Acc:A6NJU9]
  ENST ID: ENST00000564219
  CDS Start-End: 63-212

SEQ ID NO: 172535 - DNA, 543 bp, Homo sapiens; identical to SEQ ID NO: 160667
  Payload ID: 13922
  Gene Symbol:
  Gene Name: Putative NPIP-like protein LOC613037 [Source:UniProtKB/Swiss-Prot
  Acc:A6NJU9]
  ENST ID: ENST00000564502
  CDS Start-End: 257-379

SEQ ID NO: 172536 - DNA, 1216 bp, Homo sapiens
  Payload ID: 13922
  Gene Symbol:
  Gene Name: Putative NPIP-like protein LOC613037 [Source:UniProtKB/Swiss-Prot
  Acc:A6NJU9]
  ENST ID: ENST00000618637
  CDS Start-End: 55-807
agccacctccacctctgtcctggccgcctcagggcgccctgaaaggaccaggacatgcgggtgcggtggatgctcttttggctcctctttgggctcctactggaatttatcagccatcagtgcatctctgttatcaatactctggctgaccatcatcatcgtgggactgactttggtggaagtccttggttacatgtcattattgcgtttccgacaagttataaagttgtcattaccctctggatagtttacctttgggtgtctctcctgaagactatcttctggtctcgaaatggacatgatggatccacggatgtacagcagagagcctggaggtccaaccgccgtagacaggaaggaaataaaattggcctgaaagacgtcattactctacggagacatgtggaaacaaaagttagagctaaaatccgtaagaggaaggtgacaacgaaaatcaaccatcatgacaaaatcaatggaaagaggaagaccgccagaaaacagaaaatgtttcaacgtgcgcaagagttgcggcggcgggcagaggactaccacaaatgcaaaatccccccttctgcaagaaaggctctttgcaactgggtaagtttgcttgttttccttgcttttggacatagtctgccaggtcaggacatggatacatttttctccctacagctctgtgctcaagccctgcagagggagatggcagagagaaaggctgcctacaagcatcacagtcccatccctgttggtaaccgtgttgcgcaaaaacaccttcatccccacccagtggggcccctgatctaatattctaagtgtcagaggttccgtatttgtaatagcagatgggccctgactgtaaactagtgaagagtgaatgtaacttattacccacagggacaattccaaatgaaggccttaaatgatgctcagctaagctggttcttgtgtggcctctgtaccttcaaaagctgccgagtcctatgattacacgtgatgggacttgtacacttgaagtgaaacacagttttaaaacttgctttgtttagaattcccacctcatttttccatggacaaaagtattctttatgtcctagtgcacttacaatttggtattacctgggagtgaaaagaaatattacagccgtgcctaagtgacttcttgaggtgagattgttctgtcagaaaaccctctcccagttcccctgcagctctt

SEQ ID NO: 172537 - DNA, 1194 bp, Homo sapiens
  Payload ID: 13923
  Gene Symbol:
  Gene Name: Putative NPIP-like protein LOC729978 [Source:UniProtKB/Swiss-Prot
  Acc:A6NJ64]
  Uniprot ID: A6NJ64
  ENST ID: ENST00000399147
  CDS Start-End: 1-1194
atgttttgttgcttaggatatgaatggctgagcggaggctgtaaaacctggcactctgcttgggttatcaatactctggctgaccatcatcatcgtgggactgactttggtggaagtccttggttacgtatcattattgcatttccgagaagttataaagttgtccttaccctctggacagtttacctttggttgtctttcctgaagactatcttccagtctgaaaatggacatgatgtatccacagatgtacagcagagagccaggaggtccaaccgccgtagacaggaagggctgaggtccatttgtatgcacacaaagaaaagagtttcttcctttccaggaaataaaattggcctgaaagacgtcattactctacggagacatgtggaaacaaaaggtagagctaaaatccgtaagatgaaggtgacaacgaaaatcaaccatcatgacaaaatcaatggaaagaggaagaccgccaaaaaacagaaactaagcgtgaaagaatgtgagcatgcagaaaaggagaggcaggtgtcagaggcagaggaaaatgggaaattggatatgaaagaaatacacacctacatgaaaatgtttcaacgtgcgcaagagttgcggcggcgggcagaggactaccacaaatgcaaaatccccccttctgcaagaaaggctctttgcaactgggtcagaatggcggcagcggagcatcgtcattcttcaggattgccctactggccctacctcacagctgaaactttaaaaaacaggatgggccaccagccacctcctccaactcaacaacattctataactgataactccctgagcctcaagacacctcccgagtgtctgctcactccccttccaccctcagcggatgataatctcaagacacctcccgagtgtctgctcactccccttccaccctcagctccaccctcagcggatgataatctcaagacacctcccttagctactcaggaggctgaggcagaaaaaccacccaaacccaagaggtggagagcggctgagatggaatcaccacccgaacccaagaggcggagggccgctgaggtggaatcaccacccgaacccaagaggcggagggccgctgaggtggaaccatcatcacccgagcccaagaggcggaggttgagtaagctgagaacaggccattgcactcaagcctga

SEQ ID NO: 172538 - DNA, 757 bp, Homo sapiens
  Payload ID: 13923
  Gene Symbol:
  Gene Name: Putative NPIP-like protein LOC729978 [Source:UniProtKB/Swiss-Prot
  Acc:A6NJ64]
  ENST ID: ENST00000538896
  CDS Start-End: 651-757
cgcagatccaagtcgccggacccggtgtggagagcggtgctgaggctacgcgggctggagactcagggttgatggacagatggctacatggatgtgatggagatggtttactatcgggaccttccgcatcctgctgatgttttgttgcttaggatatgaatggctgagcggaggctgtaaaacctggcactctgcttgggtatgaggttcttcctgccatcctgccatcatttgttttttatgttttgtcgccaaaagtgaccttgaggaaccctgggagctcaggaaggaaggagcgcccagaagcagggacagggagctggttggggaggaccagaaatcaggttatcaatactctggctgaccatcatcatcgtgggactgactttggtggaagtccttggttacgtatcattattgcatttccgagaagttataaagttgtccttaccctctggacagtttacctttggttgtctttcctgaagactatcttccagtctgaaaatggacatgatgtatccacagatgtacagcagagagccaggaggtccaaccgccgtagacaggaaggaaataaaattggcctgaaagacgtcattactctacggagacatgtggaaacaaaaggtagagctaaaatccgtaagatgaaggtgacaacgaaaatcaaccatcatgacaaaatcaatggaaagaggaagaccgccaaaaaacagaaactaagcgtgaaagaatgtgagcatgcagaaaagga

SEQ ID NO: 172539 - DNA, 921 bp, Homo sapiens
  Payload ID: 13923
  Gene Symbol:
  Gene Name: Putative NPIP-like protein LOC729978 [Source:UniProtKB/Swiss-Prot
  Acc:A6NJ64]
  ENST ID: ENST00000547494
  CDS Start-End: 1-921
atgttttgttgcttaggatatgaatggctgagcggaggctgtaaaacctggcactctgcttgggttatcaatactctggctgaccatcatcatcgtgggactgactttggtggaagtccttggttacgtatcattattgcatttccgagaagttataaagttgtccttaccctctggacagtttacctttggttgtctttcctgaagactatcttccagtctgaaaatggacatgatgtatccacagatgtacagcagagagccaggaggtccaaccgccgtagacaggaaggaaataaaattggcctgaaagacgtcattactctacggagacatgtggaaacaaaaggtagagctaaaatccgtaagatgaaggtgacaacgaaaatcaaccatcatgacaaaatcaatggaaagaggaagaccgccaaaaaacagaaactaagcgtgaaagaatgtgagcatgcagaaaaggagaggcaggtgtcagaggcagaggaaaatgggaaattggatatgaaagaaatacacacctacatgaaaatgtttcaacgtgcgcaagagttgcggcggcgggcagaggactaccacaaatgcaaaatccccccttctgcaagaaaggctctttgcaactgggtcagaatggcggcagcggagcatcgtcattcttcaggattgccctactggccctacctcacagctgaaactttaaaaaacaggatgggccaccagccacctcctccaactcaacaacattctataactgataactccctgagcctcaagacacctcccgagtgtctgctcactccccttccaccctcagcggatgataatctcaagacacctcccgagtgtctgctcactccccttccaccctcagctccaccctcagcggatgataatctcaagacacctccc

SEQ ID NO: 172540 - DNA, 1216 bp, Homo sapiens
  Payload ID: 13923
  Gene Symbol:
  Gene Name: Putative NPIP-like protein LOC729978 [Source:UniProtKB/Swiss-Prot
  Acc:A6NJ64]
  ENST ID: ENST00000620285
  CDS Start-End: 55-807
agccacctccacctctgtcctggccgcctcagggcgccctgaaaggaccaggacatgcgggtgctgtggatgctcttttggctcctcttttggctcctgctggaatttatcagccatcagtccacctgtgttatcaatactctggctgaccatcatcatcgtgggactgactttggtggaagtccttggttacgtatcattattgcatttccgagaagttataaagttgtccttaccctctggacagtttacctttggttgtctttcctgaagactatcttccagtctgaaaatggacatgatgtatccacagatgtacagcagagagccaggaggtccaaccgccgtagacaggaaggaaataaaattggcctgaaagacgtcattactctacggagacatgtggaaacaaaaggtagagctaaaatccgtaagatgaaggtgacaacgaaaatcaaccatcatgacaaaatcaatggaaagaggaagaccgccaaaaaacagaaaatgtttcaacgtgcgcaagagttgcggcggcgggcagaggactaccacaaatgcaaaatccccccttctgcaagaaaggctctttgcaactgggtaagtttgcttgttttccttgcttttggacatagtctgccaggtcaggacatggatacatttttctccctacagctctgtgctcaagccctgcagagggagatggcagagagaaaggctgcctacaagcatcacagtcccatccctgttggtaaccgtgttgcgcaaaaacaccttcatccccacccagtggggcccctgatctaatattctaagtgtcagaggttccgtatttgtaatagcagatgggccctgactgtaaactagtgaagagtgaatgtaacttattacccacagggacaattccaaatgaaggccttaaatgatgctcagctaagctggttcttgtgtggcctctgtaccttcaaaagctgccgagtcctatgattacacgtgatgggacttgtacacttgaagtgaaacacagttttaaaacttgctttgtttagaattcccacctcatttttccatggacaaaagtattctttatgtcctagtgcacttacaatttggtattacctgggagtgaaaagaaatattacagccatgcctaactgacttcttgaggtgagattgttctgtcagaaaaccctctcccagttcccctgcagctctt

SEQ ID NO: 172541 - DNA, 2722 bp, Homo sapiens
  Payload ID: 13924
  Gene Symbol:
  Gene Name: Putative RNA exonuclease NEF-sp [Source:UniProtKB/Swiss-Prot
  Acc:Q96IC2]
  Uniprot ID: Q96IC2
  ENST ID: ENST00000261377
  CDS Start-End: 210-2534
aaaaagcccgcgaggctgaggggcggttgttgttggcagctgtggctaaggaggggagaacctctgctccccgcccgtcttctcttctgcgtttcccgggctagggggcgtggggagtggttttaggcggcgaagccgctcggcagcaccttccttctttgccaggcagacgcccgttgtagccgttggggaaccgttgagaatccgccatggagccagagagggaagggaccgagagacaccccaggaaggtcagggaaagcaggcaggccccaaataagctggtcggggcagctgaggcgatgaaagccggttgggatctcgaggagagtcagcccgaggccaagaaagcccgcttatctaccattttatttactgacaactgtgaagtaacccatgaccagctgtgtgaattgctgaagtatgcagttctgggcaaatccaatgttccaaaacccagctggtgccagctttttcatcaaaaccacctaaacaacgtagtggtttttgttctgcagggaatgagtcagctacacttttacaggttctatttggagtttggatgtcttcgaaaagcattcagacataaattccgcttgcctccaccatcatctgattttctagctgatgttgttgggctacaaactgaacaaagagctggagatctgcccaagacaatggaagggcctttaccttctaatgcaaaagccgccatcaaccttcaggatgatcccatcattcaaaagtatggctctaagaaagtgggcttgaccagatgccttctgacaaaggaggaaatgagaacgtttcactttccattacaaggttttcctgattgtgaaaactttttacttaccaaatgtaatggttctatagcagacaatagtcctctctttggacttgactgtgaaatgtgcctcacatccaaggggagagagctaacacgcatctcactggttgctgaaggaggctgctgtgttatggatgaactggtcaaacctgaaaacaagattctggactacctcaccagcttttcgggaatcacgaagaagattcttaacccagtgacgaccaaactcaaagatgtacagaggcagttaaaagcactgcttcctcctgatgctgtgttagtgggccactccttagatttggatctcagagcactgaaaatgatacatccatatgttattgatacatcgttgctttatgtcagagagcagggcagaagatttaagctcaagttcttagccaaagttattttggggaaggatatacagtgtccagacagacttggtcatgatgccacagaagatgctagaacaatccttgaattggctcggtatttccttaagcatggcccaaaaaagattgcagaactaaatctagaagcactagctaatcaccaagaaatacaagcagcaggccaagagcctaaaaacacagcagaagtacttcagcacccaaacacaagtgttttagaatgcttggattcagtgggtcagaagcttctttttttgacccgggagacagatgctggtgaacttccatcttccagaaattgtcaaactattaagtgtctttcaaataaagaggttcttgagcaggccagagtggaaatccccctgtttcccttcagcattgttcagttctcttttaaggccttttcacctgtcctcactgaggagatgaacaaaaggatgaggatcaagtggacagagatatcaactgtctatgctgggccatttagcaaaaattgcaatctcagggctctgaagaggctgtttaaaagctttggcccagtccagtcaatgacttttgttcttgaaacccgtcagcctcatctctgtatacagtatgaagtcctagaagctgcccagctggccatagaatccttggatggtattctggtagatggtatctgcatcaaggtgcagaggcctgtgacagagctcacgcttgattgtgacaccctcgtgaatgagctggaaggagattctgaaaaccaaggctctatatatctgtctggagtgagtgaaaccttcaaagaacagctattgcaggagccccgcctctttcttggcctggaagctgtgatcttgcctaaagatcttaaaagtggaaagcagaaaaaatactgtttcctgaaattcaaaagttttggcagtgcccagcaggccctcaacattctcacaggcaaggactggaagctgaaaggcaggcatgccctaacccccaggcacctccatgcctggctcagaggcttaccacctgaatcaacaaggctcccagggcttcgtgttgtacctcccccctttgaacaggaggccttgcagactctgaaactggaccacccgaagatagcagcctggcgctggagccggaagattggaaagctctacaacagcttgtgcccgggcactctctgcctcatcctgctgccaggaaccaagagcactcatggttcactctctggtctaggactgatgggaataaaagaggaagaagaaagcgctggcccaggcctgtgttcgtgagtcggcctgccatgtttccatgtgccatttcttaccccttgtaggcaatggcaaagaatgtggtcaggctgtagcctccccaaccagcagacagctttatggaaacttggtatagcagctaaaagagtttagtttgtttatatggcatgtataagttttcaataaatgcctaaagttcaagcatagta

SEQ ID NO: 172542 - DNA, 2604 bp, Homo sapiens
  Payload ID: 13924
  Gene Symbol:
  Gene Name: Putative RNA exonuclease NEF-sp [Source:UniProtKB/Swiss-Prot
  Acc:Q96IC2]
  ENST ID: ENST00000348433
  CDS Start-End: 188-2419
gcggttgttgttggcagctgtggctaaggaggggagaacctctgctccccgcccgtcttctcttctgcgtttcccgggctagggggcgtggggagtggttttaggcggcgaagccgctcggcagcaccttccttctttgccaggcagacgcccgttgtagccgttggggaaccgttgagaatccgccatggagccagagagggaagggaccgagagacaccccaggaaggtcagggaaagcaggcaggccccaaataagctggtcggggcagctgaggcgatgaaagccggttgggatctcgaggagagtcagcccgaggccaagaaagcccgcttatctaccattttatttactgacaactgtgaagtaacccatgaccagctgtgtgaattgctgaagtatgcagttctgggcaaatccaatgttccaaaacccagctggtgccagctttttcatcaaaaccacctaaacaacgtagtggtttttgttctgcagggaatgagtcagctacacttttacaggttctatttggagtttggatgtcttcgaaaagcattcagacataaattccgcttgcctccaccatcatctgattttctagctgatgttgttgggctacaaactgaacaaagagctggagatctgcccaagacaatggaagggcctttaccttctaatgcaaaagccgccatcaaccttcaggatgatcccatcattcaaaagtatggctctaagaaagtgggcttgaccagatgccttctgacaaaggaggaaatgagaacgtttcactttccattacaaggttttcctgattgtgaaaactttttacttaccaaatgtaatggttctatagcagacaatagtcctctctttggacttgactgtgaaatgtgcctcacatccaaggggagagagctaacacgcatctcactggttgctgaaggaggctgctgtgttatggatgaactggtcaaacctgaaaacaagattctggactacctcaccagcttttcgggaatcacgaagaagattcttaacccagtgacgaccaaactcaaagatgtacagaggcagttaaaagcactgcttcctcctgatgctgtgttagtgggccactccttagatttggatctcagagcactgaaaatgatacatccatatgttattgatacatcgttgctttatgtcagagagcagggcagaagatttaagctcaagttcttagccaaagttattttggggaaggatatacagtgtccagacagacttggtcatgatgccacagaagatgctagaacaatccttgaattggctcggtatttccttaagcatggcccaaaaaagattgcagaactaaatctagaagcactagctaatcaccaagaaatacaagcagcaggccaagagcctaaaaacacagcagaagtacttcagcacccaaacacaagtgttttagaatgcttggattcagtgggtcagaagcttctttttttgacccgggagacagatgctggtgaacttccatcttccagaaattgtcaaactattaagtgtctttcaaataaagaggttcttgagcaggccagagtggaaatccccctgtttcccttcagcattgttcagttctcttttaaggccttttcacctgtcctcactgaggagatgaacaaaaggatgaggatcaagtggacagagatatcaactgtctatgctgggccatttagcaaaaattgcaatctcagggctctgaagaggctgtttaaaagctttggcccagtccagtcaatgacttttgttcttgaaacccgtcaggtgcagaggcctgtgacagagctcacgcttgattgtgacaccctcgtgaatgagctggaaggagattctgaaaaccaaggctctatatatctgtctggagtgagtgaaaccttcaaagaacagctattgcaggagccccgcctctttcttggcctggaagctgtgatcttgcctaaagatcttaaaagtggaaagcagaaaaaatactgtttcctgaaattcaaaagttttggcagtgcccagcaggccctcaacattctcacaggcaaggactggaagctgaaaggcaggcatgccctaacccccaggcacctccatgcctggctcagaggcttaccacctgaatcaacaaggctcccagggcttcgtgttgtacctcccccctttgaacaggaggccttgcagactctgaaactggaccacccgaagatagcagcctggcgctggagccggaagattggaaagctctacaacagcttgtgcccgggcactctctgcctcatcctgctgccaggaaccaagagcactcatggttcactctctggtctaggactgatgggaataaaagaggaagaagaaagcgctggcccaggcctgtgttcgtgagtcggcctgccatgtttccatgtgccatttcttaccccttgtaggcaatggcaaagaatgtggtcaggctgtagcctccccaaccagcagacagctttatggaaacttggtatagcagctaaaagagtttagtttgtttatatggcatgtataagttttcaataaatgcctaaagttcaagcata

SEQ ID NO: 172543 - DNA, 924 bp, Homo sapiens
  Payload ID: 13924
  Gene Symbol:
  Gene Name: Putative RNA exonuclease NEF-sp [Source:UniProtKB/Swiss-Prot
  Acc:Q96IC2]
  ENST ID: ENST00000566276
  CDS Start-End: 287-924
gggagaacctctgctccccgcccgtcttctcttctgcgtttcccgggctagggggcgtggggagtggttttaggcggcgaagccgctcggcagcaccttccttctttgccaggcagacgcccgttgtagccgttggggaaccgttgagaatccggtaaccgatgcggacgaaagcccgcttatctaccattttatttactgacaactgtgaagtaacccatgaccagctgtgtgaattgctgaagtatgcagttctgggcaaatccaatgttccaaaacccagggaatgagtcagctacacttttacaggttctatttggagtttggatgtcttcgaaaagcattcagacataaattccgcttgcctccaccatcatctgattttctagctgatgttgttgggctacaaactgaacaaagagctggagatctgcccaagacaatggaagggcctttaccttctaatgcaaaagccgccatcaaccttcaggatgatcccatcattcaaaagtatggctctaagaaagtgggcttgaccagatgccttctgacaaaggaggaaatgagaacgtttcactttccattacaaggttttcctgattgtgaaaactttttacttaccaaatgtaatggttctatagcagacaatagtcctctctttggacttgactgtgaaatgtgcctcacatccaaggggagagagctaacacgcatctcactggttgctgaaggaggctgctgtgttatggatgaactggtcaaacctgaaaacaagattctggactacctcaccagcttttcgggaatcacgaagaagattcttaacccagtgacgaccaaactcaaagatgtacagaggcagttaaaagcactgcttcctcctgatgctgtgttagtgggccactccttagatttggatctcag

SEQ ID NO: 172544 - DNA, 586 bp, Homo sapiens
  Payload ID: 13924
  Gene Symbol:
  Gene Name: Putative RNA exonuclease NEF-sp [Source:UniProtKB/Swiss-Prot
  Acc:Q96IC2]
  ENST ID: ENST00000568046
  CDS Start-End: 280-586
gcttttccaagtccagctgccggaagtcgctcgacttctacttccggtccgttcaaaaagcccgcgaggctgaggggcggttgttgttggcagctgtggctaaggaggggagaacctctgctccccgcccgtcttctcttctgcgtttcccgggctagggggcgtggggagtggttttaggcggcgaagccgctcggcagcaccttccttctttgccaggcagacgcccgttgtagccgttggggaaccgttgagaatccggtaaccgatgcggacgccatggagccagagagggaagggaccgagagacaccccaggaaggtcagggaaagcaggcaggccccaaataagctggtcggggcagctgaggcgatgaaagccggttgggatctcgaggagagtcagcccgaggccaagaaagcccgcttatctaccattttatttactgacaactgtgaagtaacccatgaccagctgtgtgaattgctgaagtatgcagttctgggcaaatccaatgttccaaaacccagctggtgccagctttttcatcaaaaccacctaaacaacgtagtggtttttgttctgc

SEQ ID NO: 172545 - DNA, 720 bp, Homo sapiens
  Payload ID: 13924
  Gene Symbol:
  Gene Name: Putative RNA exonuclease NEF-sp [Source:UniProtKB/Swiss-Prot
  Acc:Q96IC2]
  ENST ID: ENST00000565340
  CDS Start-End: 290-720
ggcggcgaagccgctcggcagcaccttccttctttgccaggcagacgcccgttgtagccgttggggaaccgttgagaatccgggcctttaccttctaatgcaaaagccgccatcaaccttcaggatgatcccatcattcaaaagtatggctctaagaaagtgggcttgaccagatgccttctgacaaaggaggaaatgagaacgtttcactttccattacaagtgcctcacatccaaggggagagagctaacacgcatctcactggttgctgaaggaggctgctgtgttatggatgaactggtcaaacctgaaaacaagattctggactacctcaccagcttttcgggaatcacgaagaagattcttaacccagtgacgaccaaactcaaagatgtacagaggcagttaaaagcactgcttcctcctgatgctgtgttagtgggccactccttagatttggatctcagagcactgaaaatgatacatccatatgttattgatacatcgttgctttatgtcagagagcagggcagaagatttaagctcaagttcttagccaaagttattttggggaaggatatacagtgtccagacagacttggtcatgatgccacagaagatgctagaacaatccttgaattggctcggtatttccttaagcatggcccaaaaaagattgcagaactaaatctagaagcactagctaatcaccaagaaat

SEQ ID NO: 172546 - DNA, 617 bp, Homo sapiens
  Payload ID: 13924
  Gene Symbol:
  Gene Name: Putative RNA exonuclease NEF-sp [Source:UniProtKB/Swiss-Prot
  Acc:Q96IC2]
  ENST ID: ENST00000561474
  CDS Start-End: 1-617
atggcccaaaaaagattgcagaactaaatctagaagcactagctaatcaccaagaaatacaagcagcaggccaagagcctaaaaacacagcagaagtacttcagcacccaaacacaagtgttttagaatgcttggattcagtgggtcagaagcttctttttttgacccgggagacagatgctggtgaacttccatcttccagaaattgtcaaactattaagtgtctttcaaataaagagatgaggatcaagtggacagagatatcaactgtctatgctgggccatttagcaaaaattgcaatctcagggctctgaagaggctgtttaaaagctttggcccagtccagtcaatgacttttgttcttgaaacccgtcaggtgcagaggcctgtgacagagctcacgcttgattgtgacaccctcgtgaatgagctggaaggagattctgaaaaccaaggctctatatatctgtctggagtgagtgaaaccttcaaagaacagctattgcaggagccccgcctctttcttggcctggaagctgtgatcttgcctaaagatcttaaaagtggaaagcagaaaaaatactgtttcctgaaattcaaaagttttggcagtgcc

SEQ ID NO: 172547 - DNA, 566 bp, Homo sapiens
  Payload ID: 13924
  Gene Symbol:
  Gene Name: Putative RNA exonuclease NEF-sp [Source:UniProtKB/Swiss-Prot
  Acc:Q96IC2]
  ENST ID: ENST00000568647
  CDS Start-End: 82-566
ttgccaggcagacgcccgttgtagccgttggggaaccgttgagaatccggtaaccgatgcggacggtaaagccgtttggccatggagccagagagggaagggaccgagagacaccccaggaaggtcagggaaagcaggcaggccccaaataagctggtcggggcagctgaggcgatgaaagccggttgggatctcgaggagagtcagcccgaggccaagaaagcccgcttatctaccattttatttactgacaactgtgaagtaacccatgaccagctgtgtgaattgctgaagtatgcagttctgggcaaatccaatgttccaaaacccagctggtgccagctttttcatcaaaaccacctaaacaacgtagtggtttttgttctgcagggaatgagtcagctacacttttacaggttctatttggagtttggatgtcttcgaaaagcattcagacataaattccgcttgcctccaccatcatctgattttctagctgatgttgttgggctacaaactgaacaaagagctggagatctgcccaagacaatggaagggcctttacc

SEQ ID NO: 172548 - DNA, 993 bp, Homo sapiens
  Payload ID: 13924
  Gene Symbol:
  Gene Name: Putative RNA exonuclease NEF-sp [Source:UniProtKB/Swiss-Prot
  Acc:Q96IC2]
  ENST ID: ENST00000566518
  CDS Start-End: 62-328
ggcagacgcccgttgtagccgttggggaaccgttgagaatccggtaaccgatgcggacgccatggagccagagagggaagggaccgagagacaccccaggaaggtcagggaaagcaggcaggccccaaataagctggtcggggcagctgaggcgatgaaagccggttgggatctcgaggagagtcagcccgaggccaagaaagcccgcttatctaccattttatttactgacaactgtgaagtaacccatgaccagctgtgtgaattgctgaagtatgcagttctgggcaaatccaatgttccaaaacccagggcctttaccttctaatgcaaaagccgccatcaaccttcaggatgatcccatcattcaaaagtatggctctaagaaagtgggcttgaccagatgccttctgacaaaggaggaaatgagaacgtttcactttccattacaaggttttcctgattgtgaaaactttttacttaccaaatgtaatggttctatagcagacaatagtcctctctttggacttgactgtgaaatgtgcctcacatccaaggggagagagctaacacgcatctcactggttgctgaaggaggctgctgtgttatggatgaactggtcaaacctgaaaacaagattctggactacctcaccagcttttcgggaatcacgaagaagattcttaacccagtgacgaccaaactcaaagatgtacagaggcagttaaaagcactgcttcctcctgatgctgtgttagtgggccactccttagatttggatctcagagcactgaaaatgatacatccatatgttattgatacatcgttgctttatgtcagagagcagggcagaagatttaagctcaagttcttagccaaagttattttggggaaggatatacagtgtccagacagacttggtcatgatgccacagaagatgctagaacaatccttgaattggctcggtatttccttaagcatggcccaaaaa

SEQ ID NO: 172549 - DNA, 2549 bp, Homo sapiens
  Payload ID: 13924
  Gene Symbol:
  Gene Name: Putative RNA exonuclease NEF-sp [Source:UniProtKB/Swiss-Prot
  Acc:Q96IC2]
  ENST ID: ENST00000566993
  CDS Start-End: 213-470
ttcaaaaagcccgcgaggctgaggggcggttgttgttggcagctgtggctaaggaggggagaacctctgctccccgcccgtcttctcttctgcgtttcccgggctagggggcgtggggagtggttttaggcggcgaagccgctcggcagcaccttccttctttgccaggcagacgcccgttgtagccgttggggaaccgttgagaatccgccatggagccagagagggaagggaccgagagacaccccaggaaggtcagggaaagcaggcaggccccaaataagctggtcggggcagctgaggcgatgaaagccggttgggatctcgaggagagtcagcccgaggccaagaaagcccgcttatctaccattttatttactgacaactgtgaagtaacccatgaccagctgtgtgaattgctgaagtatgcagttctgggcaaatccaatgttccaaaacccagggaatgagtcagctacacttttacaggttctatttggagtttggatgtcttcgaaaagcattcagacataaattccgcttgcctccaccatcatctgattttctagctgatgttgttgggctacaaactgaacaaagagctggagatctgcccaagacaatggaagggcctttaccttctaatgcaaaagccgccatcaaccttcaggatgatcccatcattcaaaagtatggctctaagaaagtgggcttgaccagatgccttctgacaaaggaggaaatgagaacgtttcactttccattacaagtgcctcacatccaaggggagagagctaacacgcatctcactggttgctgaaggaggctgctgtgttatggatgaactggtcaaacctgaaaacaagattctggactacctcaccagcttttcgggaatcacgaagaagattcttaacccagtgacgaccaaactcaaagatgtacagaggcagttaaaagcactgcttcctcctgatgctgtgttagtgggccactccttagatttggatctcagagcactgaaaatgatacatccatatgttattgatacatcgttgctttatgtcagagagcagggcagaagatttaagctcaagttcttagccaaagttattttggggaaggatatacagtgtccagacagacttggtcatgatgccacagaagatgctagaacaatccttgaattggctcggtatttccttaagcatggcccaaaaaagattgcagaactaaatctagaagcactagctaatcaccaagaaatacaagcagcaggccaagagcctaaaaacacagcagaagtacttcagcacccaaacacaagtgttttagaatgcttggattcagtgggtcagaagcttctttttttgacccgggagacagatgctggtgaacttccatcttccagaaattgtcaaactattaagtgtctttcaaataaagaggttcttgagcaggccagagtggaaatccccctgtttcccttcagcattgttcagttctcttttaaggccttttcacctgtcctcactgaggagatgaacaaaaggatgaggatcaagtggacagagatatcaactgtctatgctgggccatttagcaaaaattgcaatctcagggctctgaagaggctgtttaaaagctttggcccagtccagtcaatgacttttgttcttgaaacccgtcagcctcatctctgtatacagtatgaagtcctagaagctgcccagctggccatagaatccttggatggtattctggtagatggtatctgcatcaaggtgcagaggcctgtgacagagctcacgcttgattgtgacaccctcgtgaatgagctggaaggagattctgaaaaccaaggctctatatatctgtctggagtgagtgaaaccttcaaagaacagctattgcaggagccccgcctctttcttggcctggaagctgtgatcttgcctaaagatcttaaaagtggaaagcagaaaaaatactgtttcctgaaattcaaaagttttggcagtgcccagcaggccctcaacattctcacaggcaaggactggaagctgaaaggcaggcatgccctaacccccaggcacctccatgcctggctcagaggcttaccacctgaatcaacaaggctcccagggcttcgtgttgtacctcccccctttgaacaggaggccttgcagactctgaaactggaccacccgaagatagcagcctggcgctggagccggaagattggaaagctctacaacagcttgtgcccgggcactctctgcctcatcctgctgccaggaaccaagagcactcatggttcactctctggtctaggactgatgggaataaaagaggaagaagaaagcgctggcccaggcctgtgttcgtgagtcggcctgccatgtttccatgtgccatttcttaccccttgtaggcaatggcaaagaatgtggtcaggctgtagcctccccaaccagcagacagctttatggaaacttggtatagcagctaaaagagtttagtttgtttatatggcatgtataagtttt

SEQ ID NO: 172550 - DNA, 624 bp, Homo sapiens
  Payload ID: 13924
  Gene Symbol:
  Gene Name: Putative RNA exonuclease NEF-sp [Source:UniProtKB/Swiss-Prot
  Acc:Q96IC2]
  ENST ID: ENST00000568501
  CDS Start-End: 389-624
gttgttggcagctgtggctaaggaggggagaacctctgctccccgcccgtcttctcttctgcgtttcccgggctagggggcgtggggagtggttttaggcggcgaagccgctcggcagcaccttccttctttgccaggcagacgcccgttgtagccgttggggaaccgttgagaatccgagacggggttttgccatgttgcccaggctggtcttgaactcctggacttaagcgatctgtccaccttggcctctgcaagttctgggattacagaaagcccgcttatctaccattttatttactgacaactgtgaagtaacccatgaccagctgtgtgaattgctgaagtatgcagttctgggcaaatccaatgttccaaaacccagggaatgagtcagctacacttttacaggttctatttggagtttggatgtcttcgaaaagcattcagacataaattccgcttgcctccaccatcatctgattttctagctgatgttgttgggctacaaactgaacaaagagctggagatctgcccaagacaatggaagggcctttaccttctaatgcaaaagccgccatcaaccttcaggatgatcccatcattcaaaagtatggctctaa

SEQ ID NO: 172551 - DNA, 563 bp, Homo sapiens
  Payload ID: 13924
  Gene Symbol:
  Gene Name: Putative RNA exonuclease NEF-sp [Source:UniProtKB/Swiss-Prot
  Acc:Q96IC2]
  ENST ID: ENST00000563068
  CDS Start-End: 247-563
aaccgatgcggacggtaaagccgtttgggttagagcggcgcgggtgtccagtccgcggaacggggagatcgttggcaccttcgcttttttaggggaacggggatagttcggtaaactgaattgagaagcggatccgagggaggttgaaagctgtcaagcccgtgtagctctcccgctaggaggcggcacgcgggggaataggggcgctggagtttccccagctctacctcatctttctccacagccatggagccagagagggaagggaccgagagacaccccaggaaggtcagggaaagcaggcaggccccaaataagctggtcggggcagctgaggcgatgaaagccggttgggatctcgaggagagtcagcccgaggccaagaaagcccgcttatctaccattttatttactgacaactgtgaagtaacccatgaccagctgtgtgaattgctgaagtatgcagttctgggcaaatccaatgttccaaaacccagctggtgccagctttttcatcaaaaccacctaaacaacgtagtggtttttgttctgcagggaatgag

SEQ ID NO: 172552 - DNA, 2447 bp, Homo sapiens
  Payload ID: 13924
  Gene Symbol:
  Gene Name: Putative RNA exonuclease NEF-sp [Source:UniProtKB/Swiss-Prot
  Acc:Q96IC2]
  Uniprot ID: Q96IC2
  ENST ID: ENST00000564274
  CDS Start-End: 123-2447
agaatccggtaaccgatgcggacggtaaagccgtttgggttagagcggcgcgggtgtccagtccgcggaacggggagatcgttggcaccttcgcttttttaggggaacggggatagttcgccatggagccagagagggaagggaccgagagacaccccaggaaggtcagggaaagcaggcaggccccaaataagctggtcggggcagctgaggcgatgaaagccggttgggatctcgaggagagtcagcccgaggccaagaaagcccgcttatctaccattttatttactgacaactgtgaagtaacccatgaccagctgtgtgaattgctgaagtatgcagttctgggcaaatccaatgttccaaaacccagctggtgccagctttttcatcaaaaccacctaaacaacgtagtggtttttgttctgcagggaatgagtcagctacacttttacaggttctatttggagtttggatgtcttcgaaaagcattcagacataaattccgcttgcctccaccatcatctgattttctagctgatgttgttgggctacaaactgaacaaagagctggagatctgcccaagacaatggaagggcctttaccttctaatgcaaaagccgccatcaaccttcaggatgatcccatcattcaaaagtatggctctaagaaagtgggcttgaccagatgccttctgacaaaggaggaaatgagaacgtttcactttccattacaaggttttcctgattgtgaaaactttttacttaccaaatgtaatggttctatagcagacaatagtcctctctttggacttgactgtgaaatgtgcctcacatccaaggggagagagctaacacgcatctcactggttgctgaaggaggctgctgtgttatggatgaactggtcaaacctgaaaacaagattctggactacctcaccagcttttcgggaatcacgaagaagattcttaacccagtgacgaccaaactcaaagatgtacagaggcagttaaaagcactgcttcctcctgatgctgtgttagtgggccactccttagatttggatctcagagcactgaaaatgatacatccatatgttattgatacatcgttgctttatgtcagagagcagggcagaagatttaagctcaagttcttagccaaagttattttggggaaggatatacagtgtccagacagacttggtcatgatgccacagaagatgctagaacaatccttgaattggctcggtatttccttaagcatggcccaaaaaagattgcagaactaaatctagaagcactagctaatcaccaagaaatacaagcagcaggccaagagcctaaaaacacagcagaagtacttcagcacccaaacacaagtgttttagaatgcttggattcagtgggtcagaagcttctttttttgacccgggagacagatgctggtgaacttccatcttccagaaattgtcaaactattaagtgtctttcaaataaagaggttcttgagcaggccagagtggaaatccccctgtttcccttcagcattgttcagttctcttttaaggccttttcacctgtcctcactgaggagatgaacaaaaggatgaggatcaagtggacagagatatcaactgtctatgctgggccatttagcaaaaattgcaatctcagggctctgaagaggctgtttaaaagctttggcccagtccagtcaatgacttttgttcttgaaacccgtcagcctcatctctgtatacagtatgaagtcctagaagctgcccagctggccatagaatccttggatggtattctggtagatggtatctgcatcaaggtgcagaggcctgtgacagagctcacgcttgattgtgacaccctcgtgaatgagctggaaggagattctgaaaaccaaggctctatatatctgtctggagtgagtgaaaccttcaaagaacagctattgcaggagccccgcctctttcttggcctggaagctgtgatcttgcctaaagatcttaaaagtggaaagcagaaaaaatactgtttcctgaaattcaaaagttttggcagtgcccagcaggccctcaacattctcacaggcaaggactggaagctgaaaggcaggcatgccctaacccccaggcacctccatgcctggctcagaggcttaccacctgaatcaacaaggctcccagggcttcgtgttgtacctcccccctttgaacaggaggccttgcagactctgaaactggaccacccgaagatagcagcctggcgctggagccggaagattggaaagctctacaacagcttgtgcccgggcactctctgcctcatcctgctgccaggaaccaagagcactcatggttcactctctggtctaggactgatgggaataaaagaggaagaagaaagcgctggcccaggcctgtgttcgtga

SEQ ID NO: 172553 - DNA, 580 bp, Homo sapiens
  Payload ID: 13924
  Gene Symbol:
  Gene Name: Putative RNA exonuclease NEF-sp [Source:UniProtKB/Swiss-Prot
  Acc:Q96IC2]
  ENST ID: ENST00000568894
  CDS Start-End: 65-580
attcccgacactccttgcttttccaagtccagctgccggaagtcgctcgacttctacttccgccatggagccagagagggaagggaccgagagacaccccaggaaggtcagggaaagcaggcaggccccaaataagctggtcggggcagctgaggcgatgaaagccggttgggatctcgaggagagtcagcccgaggccaagaaagcccgcttatctaccattttatttactgacaactgtgaagtaacccatgaccagctgtgtgaattgctgaagtatgcagttctgggcaaatccaatgttccaaaacccagctggtgccagctttttcatcaaaaccacctaaacaacgtagtggtttttgttctgcagggaatgagtcagctacacttttacaggttctatttggagtttggatgtcttcgaaaagcattcagacataaattccgcttgcctccaccatcatctgattttctagctgatgttgttgggctacaaactgaacaaagagctggagatctgcccaagacaatggaagggcctttaccttctaatgcaaaagccgccatcaaccttcag

SEQ ID NO: 172554 - DNA, 813 bp, Homo sapiens
  Payload ID: 13924
  Gene Symbol:
  Gene Name: Putative RNA exonuclease NEF-sp [Source:UniProtKB/Swiss-Prot
  Acc:Q96IC2]
  ENST ID: ENST00000563617
  CDS Start-End: 382-813
cgccgtcgggggcactggattcgggcgggctctccgccctggcctctccgaacctgatccctgatcattaaaatgggaatgagtgtaataccaccttcctgcaacaaggctgtcattggctgtcactgggatagtgagtcggccgagtgcggtggctcatgcctgtaattccagcactttgggaggccgaggcgggcggatcacgagaaagcccgcttatctaccattttatttactgacaactgtgaagtaacccatgaccagctgtgtgaattgctgaagtatgcagttctgggcaaatccaatgttccaaaacccagctggtgccagctttttcatcaaaaccacctaaacaacgtagtggtttttgttctgcagggaatgagtcagctacacttttacaggttctatttggagtttggatgtcttcgaaaagcattcagacataaattccgcttgcctccaccatcatctgattttctagctgatgttgttgggctacaaactgaacaaagagctggagatctgcccaagacaatggaagggcctttaccttctaatgcaaaagccgccatcaaccttcaggatgatcccatcattcaaaagtatggctctaagaaagtgggcttgaccagatgccttctgacaaaggaggaaatgagaacgtttcactttccattacaaggttttcctgattgtgaaaactttttacttaccaaatgtaatggttctatagcagacaatagtcctctctttggacttgactgtgaaatgtgcctcacatccaaggggagagagctaacacgcatctca

SEQ ID NO: 172555 - DNA, 1781 bp, Homo sapiens
  Payload ID: 13925
  Gene Symbol:
  Gene Name: Putative short transient receptor potential channel 2-like protein  [Source:UniProtKB/Swiss-Prot
  Acc:Q6ZNB5]
  Uniprot ID: Q6ZNB5
  ENST ID: ENST00000529844
  CDS Start-End: 413-841
aagtttaaattccgctccctccacgaaagagttgtagtgagtgaaaataaatattaaaacacacggaaatgtattttcctggctgcagcacctgccatcttgcctcggtaggactcattttcaaaaacagcagcttcttgaagccccagaacgcattcctgtgctacggaagacggaagagtagctctcggggtcagaaggcgaaggtcagaaggccgaattggcgggagaataggtttggtggtccgagatccgaggcaacggtggctcctcgaggtccacggtcccgggagtaatgtgaggattcttgcttttctggaagctaacacatagtcagtgccaaagtagtgacagaagaaatcttgagaggaagcatttttgtcttgtacttgaaacagctgctgggcccaccatggctcctgtgaagatcagccatgtggtatcattttcttctcaggatcccaagtatcctgtagagaacttgctaaacccagatagtccaaggagaccttggctcggctgccctcaggacaagagtgggcaattgaaagtagaactacagctggagagggcagtgcccactggctacattgatgtgggtaactgtggctgtgcgttcctgcaaattgatgtgggccattcttcctggcccctggacagacctttcataaccctgctccctgcaaccacgctaatgtctctaactgattcaaagcaggggaagaaccgctccggggtccgcatgtttaaagatggtaaagagggcaaaagcagaaaagatgggggtggtctttatgagaaacagagatgcagtactaaagaggactgtgagtgctattaggtgtagactgtgggagggagcctgtgcaggggtttaattatatctgttgggggcaaagggtggttaaggaatggtgtgcttgtgtgtgagatttgtgtggtgaggatgcatgctagctggggagatggagatttatgaactatttatatttatatataacttgtggttcggtagggcccaatatatagaacacacacacttattgattaatatatttttgtggccaggcgtggtggctcatgcctgtaatcccagcactttgggagactgggacaagtggatcatctgaggtcaggagttcgagaccagcctggccagcatggtgaaatcccatctctactaaaaatacaaaaattagccgggcatggtggtgagtgcctttaatcccagctactggggaggctgaggcggcagaattgcttgaacctgggaggcagaggttacaatgagccaagattgggccattgcactccagcctgggtgacaagagtgaaactctgtctcaaataataataataataataacaataatatgtttttgtgggtataagtgtggatgtaggatagatgtttatgtaagtgatggaaggctacatagtggttatagttgtgtagcatataatgtttactgaatttatacaaatctctgttcactaggcactacagaaaaacataagatctgattcctagcctctagggatgtacagtctcataaggatttgtctgttttaagttggaagtatttgtaatgttgtaaaggaagagtgacattggaggggcatatgatttggagaaagtgaggtactgactggacagtgttaggaactaaagatgtggagggttggtgatatcggaatgtgataccgtgagcatgtagagcacgtggtggtgtgagggaggttgaggtcttatgatccaggaagggccaatatatatctca

SEQ ID NO: 172556 - DNA, 933 bp, Homo sapiens
  Payload ID: 13925
  Gene Symbol:
  Gene Name: Putative short transient receptor potential channel 2-like protein  [Source:UniProtKB/Swiss-Prot
  Acc:Q6ZNB5]
  ENST ID: ENST00000528511
  CDS Start-End: 10-631
cacacggaaatgtattttcctggctgcagcacctgccatcttgcctcggtaggactcattttcaaaaacagcagcttcttgaagccccagaacgcattcctgtgctacggaagacggaagagtagctctcggggtcagaaggcgaaggatcccaagtatcctgtagagaacttgctaaacccagatagtccaaggagaccttggctcggctgccctcaggacaagagtgggcaattgaaagtagaactacagctggagagggcagtgcccactggctacattgatgtgggtaactgtggctgtgcgttcctgcaaattgatgtgggccattcttcctggcccctggacagacctttcataaccctgctccctgcaaccacgctaatgtctctaactgattcaaagcaggggaagaaccgctccggggtccgcatgtttaaagatgttgatttcctggctccagcctcaggagagttatgggatcgacttcgcctgacctgctcccgacccttcacgcgtcatcagtcctttggcctggcctttctacgggtgtgttcttctctggactccttagatgactctgtggtgggtccctcagcccttctgagctctgtgctgaacaagataagagagtttaagacatgttttttctcctggagtctgaagaagatggagttagaattttcaccacttcttttgtccatcaatttgaatgatcttcagtttgcagcagatgctgaagtcagcacagtatctaattgcatgttcatcagcattgcacttcagtctgcaatgataatattctgaaggacattcatcattagaagtgaagcttctggctttaaaaagagaagacaaattatatgacacaatattacttactttttatgtttaaatgtctgaaatgttttataataaattaaaagcattaca

SEQ ID NO: 172557 - DNA, 655 bp, Homo sapiens
  Payload ID: 13925
  Gene Symbol:
  Gene Name: Putative short transient receptor potential channel 2-like protein  [Source:UniProtKB/Swiss-Prot
  Acc:Q6ZNB5]
  ENST ID: ENST00000529513
  CDS Start-End: 196-600
gaattggcgggagaataggtttggtggtccgagatccgaggcaacggtggctcctcgaggtccacggtcccgggagtaatgtgaggattcttgcttttctggaagctaacacatagtcagtgccaaagtagtgacagaagaaatcttgagaggaagcatttttgtcttgtacttgaaacagctgctgggcccaccatggctcctgtgaagatcagccatgtggtatcattttcttctcaggatcccaagtatcctgtagagaacttgctaaacccagatagtccaaggagaccttggctcggctgccctcaggacaagagtgggcaattgaaagtagaactacagctggagagggcagtgcccactggctacattgatgtgggtaactgtggctgtgcgttcctgcaaattgatgtgggccattcttcctggcccctggacagacctttcataaccctgctccctgcaaccacgctaatgtctctaactgattcaaagcaggggaagaaccgctccggggtccgcatgtttaaagatggcgtggtggctcatgcctgtaatcccagcactttgggagactgggacaagtggatcatctgaggtcaggagttcgagaccagcctggccagcatggtgaaatcccatctctactaaa

SEQ ID NO: 172558 - DNA, 564 bp, Homo sapiens
  Payload ID: 13925
  Gene Symbol:
  Gene Name: Putative short transient receptor potential channel 2-like protein  [Source:UniProtKB/Swiss-Prot
  Acc:Q6ZNB5]
  ENST ID: ENST00000533047
  CDS Start-End: 299-564
gttgtagtgagtgaaaataaatattaaaacacacggaaatgtattttcctggctgcagcacctgccatcttgcctcggtaggactcattttcaaaaacagcagcttcttgaagccccagaacgcattcctgtgctacggaagacggaagagtagctctcggggtcagaaggcgaaggagtaatgtgaggattcttgcttttctggaagctaacacatagtcagtgccaaagtagtgacagaagaaatcttgagaggaagcatttttgtcttgtacttgaaacagctgctgggcccaccatggctcctgtgaagatcagccatgtggtatcattttcttctcaggatcccaagtatcctgtagagaacttgctaaacccagatagtccaaggagaccttggctcggctgccctcaggacaagagtgggcaattgaaagtagaactacagctggagagggcagtgcccactggctacattgatgtgggtaactgtggctgtgcgttcctgcaaattgatgtgggccattcttcctggcccctggacagacctttcataaccctgct

SEQ ID NO: 172559 - DNA, 588 bp, Homo sapiens
  Payload ID: 13925
  Gene Symbol:
  Gene Name: Putative short transient receptor potential channel 2-like protein  [Source:UniProtKB/Swiss-Prot
  Acc:Q6ZNB5]
  ENST ID: ENST00000528184
  CDS Start-End: 441-588
acacggaaatgtattttcctggctgcagcacctgccatcttgcctcggtaggactcattttcaaaaacagcagcttcttgaagccccagaacgcattcctgtgctacggaagacggaagagtagctctcggggtcagaaggcgaagagatgggatttcgccatgttgcccaggctgatcttgaactcctgggctgaagatatccaccctcctcggcctcccaatgtgctgggattacaggcctgagccaccatgcctggcccaagtgttcattgatgatgagagatgggcttttcgcatcaaatcacaaaaatatgctgagtaatgtgaggattcttgcttttctggaagctaacacatagtcagtgccaaagtagtgacagaagaaatcttgagaggaagcatttttgtcttgtacttgaaacagctgctgggcccaccatggctcctgtgaagatcagccatgtggtatcattttcttctcaggatcccaagtatcctgtagagaacttgctaaacccagatagtccaaggagaccttggctcggctgccctcaggacaagagtgggcaattgaaagtagaactac

SEQ ID NO: 172560 - DNA, 580 bp, Homo sapiens
  Payload ID: 13925
  Gene Symbol:
  Gene Name: Putative short transient receptor potential channel 2-like protein  [Source:UniProtKB/Swiss-Prot
  Acc:Q6ZNB5]
  ENST ID: ENST00000534704
  CDS Start-End: 334-580
tccgaggcaacggtggctcctcgaggtccacggtcccggagatgggatttcgccatgttgcccaggctgatcttgaactcctgggctgaagatatccaccctcctcggcctcccaatgtgctgggattacaggcctgagccaccatgcctggcccaagtgttcattgatgatgagagatgggcttttcgcatcaaatcacaaaaatatgctgagtaatgtgaggattcttgcttttctggaagctaacacatagtcagtgccaaagtagtgacagaagaaatcttgagaggaagcatttttgtcttgtacttgaaacagctgctgggcccaccatggctcctgtgaagatcagccatgtggtatcattttcttctcaggatcccaagtatcctgtagagaacttgctaaacccagatagtccaaggagaccttggctcggctgccctcaggacaagagtgggcaattgaaagtagaactacagctggagagggcagtgcccactggctacattgatgtgggtaactgtggctgtgcgttcctgcaaattgatgtgggccattcttcctggcccctggaca

SEQ ID NO: 172561 - DNA, 754 bp, Homo sapiens
  Payload ID: 13925
  Gene Symbol:
  Gene Name: Putative short transient receptor potential channel 2-like protein  [Source:UniProtKB/Swiss-Prot
  Acc:Q6ZNB5]
  ENST ID: ENST00000532852
  CDS Start-End: 1-426
caggacaagagtgggcaattgaaagtagaactacagctggagagggcagtgcccactggctacattgatgtgggtaactgtggctgtgcgttcctgcaaattgatgtgggccattcttcctggcccctggacagacctttcataaccctgctccctgcaaccacgctaatgtctctaactgattcaaagcaggggaagaaccgctccggggtccgcatgtttaaagatgttgatttcctggctccagcctcaggagagttatgggatcgacttcgcctgacctgctcccgacccttcacgcgtcatcagtcctttggcctggcctttctacgggtgtgttcttctctggactccttagatgactctgtggtgggtccctcagcccttctgagctctgtgctgaacaaggtgggagaaatgttttagaggcaagagaggctgctaaacatcctacaatataaaggaaacatccccacagcaaaaaaaaaaaactgttcttctcaaaatgttgacagtgctggagatcagacacattgctctactttatattttattgtctgtccctgaacttctttattaaatggccaatattgtatggtaaaatcgagagtatcatcagaaagaaaattaagaaaaacaatcagaattagaaattagaggctcctctgcctatggaatagccattcttttattcctttgctttcttaataaactttgtctcacttaaaaataaaaagaaattagattttctgga

SEQ ID NO: 172562 - DNA, 1026 bp, Homo sapiens
  Payload ID: 13926
  Gene Symbol:
  Gene Name: Putative UPF0607 protein ENSP00000381418  [Source:UniProtKB/Swiss-Prot
  Acc:A8MU76]
  Uniprot ID: A8MU76
  ENST ID: ENST00000614215
  CDS Start-End: 1-1026
atgaggctgtgtcttagccctcagaacacgggcaccccacagagggtcctgcctcctgtggtctggagccccccctcgaggaagaaacctgcgctgtctgctcgcaactccacgatgtttggacacctcaggcccctgaggatccctcgtctcagaggcaagtttaaccttcaacttccttcatttgatgagcaggtgatcccagccaggctcccgaagacggagatgagggcagaagagcccaaagaagcaacggaggtgaaagaccaggtagagacccaggggcaggaggacaataaaaggggcccctgtagcaatggggaagcggcctccacctctaggcccctggagactcagggaaacctcacttcctcctggtacaatcccaggaccttggagggaaatgtccacctcaagagcttgacagaaaacaaccagactgacaaggcccaggtgcatgcagtgagtttctactccaagggccatggagtcgccagttcacacagccctgctggaggcatccttccctttgggaagcctgacccacttccaacagtgctccctgccccagttccgggctgctccctgtggccagagaagggggccttgaaggtgctgggtaaagaccacctgcccagctctccaggcttgctgatggtgggggaggacatgcagcccaaggatcctgcagctcttggatcaagtaggtcttctccacccagagctgccggccacagttcccgcaaaagaaaactgtcggggccactgctgcagctgcaactgacccctcccctgcaactgaggtgggatagagacgaggggcccccaccggctaagcttccatgtctatctcctgaggcactgttggtgggtcaggcttcccaaagagaaggacgcctccagcagggcaacatgcataagaacatgagggtgctaagtagaacatcaaaattcaggagactaagagagctgcttaggaggagaaaggagagacggcagggcaggcgtggtggcccacgcctgtaa

SEQ ID NO: 172563 - DNA, 2621 bp, Homo sapiens
  Payload ID: 13927
  Gene Symbol: PWP1
  Gene Name: PWP1 homolog, endonuclein
  Uniprot ID: Q13610
  ENST ID: ENST00000412830
  CDS Start-End: 169-1674
agaatgacgtctgaaatgagcgccgacgctgcccaaacaggagcctgcgcatgcgctctgccctggcagcggccctgtgcagatccctgagcgtgtggcagcagtgcggtcgtggtccctccctatgcagcctggtttctagcgtgacacgcccttgacttgaggaccatgaaccgcagccgccaggtgacgtgcgtggcctgggtccgctgcggcgtggccaaagagacaccagacaaggtagagctgagtaaagaagaagtaaaacgcctcattgctgaggcaaaggagaaattgcaagaagaaggtggtggcagtgatgaagaggagacaggcagtccttcagaagatggcatgcagagtgcacgcacccaggcacgcccaagagagcccctggaggatggtgacccagaggatgacaggacgcttgatgatgatgagctggctgagtacgacttagataaatatgatgaggaaggtgacccagatgctgagactcttggtgaatctctcttgggtcttacggtctacgggagtaatgatcaagatccttacgttactctgaaagatacagaacaatatgaacgtgaagatttcttgattaagcccagtgataatcttatagtttgtggccgagctgaacaggaccagtgcaatttagaggtgcatgtttataatcaagaagaagactctttttatgtacaccatgatatactcttgtctgcatatcctctgagtgtggaatggctgaattttgatcctagcccagatgattctactggaaattacattgctgtaggaaacatgacccctgttattgaagtgtgggaccttgatatagtggactctttagagccagtcttcacactcggaagtaaactttcaaaaaagaagaaaaagaaaggaaagaagagttcctcagcagaagggcataccgatgctgtccttgacctttcatggaataagctaatcagaaatgttttagcaagtgcatcagctgacaacactgtaattctgtgggatatgtccttggggaaaccagcagctagcctcgctgtacacacagacaaggtccaaacactgcagtttcatccatttgaagcacagactctgatttctggctcatatgataagtcagtggctttgtatgactgccgaagtccagatgaaagccatcgaatgtggcgattcagtgggcagatagagagagtgacttggaatcacttttcaccttgtcatttcttggccagtacagatgacggctttgtatataatttggatgcacgttcagataagccaatttttacacttaatgcacacaatgatgaaatctctggtcttgatcttagcagtcaaatcaagggctgtctcgtgactgcttcagctgacaaatacgtgaagatctgggacatcttaggagataggccaagtctagttcattctagggacatgaaaatgggagttctcttctgttcttcatgttgccctgatttgccatttatttatgcctttggaggtcaaaaagaagggcttcgggtctgggatataagcacagtctcttcagtaaatgaagcatttggaagacgagagaggcttgttcttgggagtgcaagaaattcatctattagtggcccttttggcagcaggagctcagatacacccatggagtcttaatgaagatcatctaatttcctgcttaccttaactgggaattttaaaaagttggcctaaaaatgttccatgcgtggcagcaaccatgcagagtgactgaaacacaattcatttctgactgacattcctttctgcaactgcggtggcaccacaaatatccggtctttgtgcttgctcttcagatggatggtttgtaaggctcttgttgcatttcttaaaaaagagtaataaaaaggatttttaaaaagtaattccttaaacataccatctgtcacagttaatctagatttgtaaataggtagtaatttatagaatttttaaagcgtaaaatccggtaatattaaaagataggtaaacctaggcctggaaaggctgttatttggctaaaattgcacaggaggccatgaacagaggcaagtgccccagagactccactttcattcctaactgttctcaaattaatgctcatgattgagtattctcagtgcaactcgtagagtttgataagtaaaagttacatgcccctgttttcctagcatgatattcactgttatcaaagacaagaggcagaccattcattcattctcaaaacactgaatgccattctgtgcctagtgctatacaaggcatgggagattcagtgtgaataagtctttgctctccacctaacaagggacagttttaattatagattgtcttcctattaagtatgagttttagtaggcattaaaaatcgtaattagtttgataatatgagacccaaccctaacttgccagaagagtaatcagttcatgaaccattgatatttcctgtatatttcatgaatgtgacttcagtcattctagtgttaatactgtggaatgtcattggtgtagcaacgtgggttcaccaaaacacctttttatacaaaagacagatgtgtgaattaaagagattaaaggatagagta

SEQ ID NO: 172564 - DNA, 1722 bp, Homo sapiens
  Payload ID: 13927
  Gene Symbol: PWP1
  Gene Name: PWP1 homolog, endonuclein
  ENST ID: ENST00000541166
  CDS Start-End: 211-1530
aacgtggacccggaactcggggcgttggctggtgcgactggctggggtgagggcggctttgcccggattgtcgcgactagagctgcagttcagaaggtagagctgagtaaagaagaagtaaaacgcctcattgctgaggcaaaggagaaattgcaagaagaaggtggtggcagtgatgaagaggagacaggcagtccttcagaagatggcatgcagagtgcacgcacccaggcacgcccaagagagcccctggaggatggtgacccagaggatgacaggacgcttgatgatgatgagctggctgagtacgacttagataaatatgatgaggaaggtgacccagatgctgagactcttggtgaatctctcttgggtcttacggtctacgggagtaatgatcaagatccttacgttactctgaaagatacagaacaatatgaacgtgaagatttcttgattaagcccagtgataatcttatagtttgtggccgagctgaacaggaccagtgcaatttagaggtgcatgtttataatcaagaagaagactctttttatgtacaccatgatatactcttgtctgcatatcctctgagtgtggaatggctgaattttgatcctagcccagatgattctactggaaattacattgctgtaggaaacatgacccctgttattgaagtgtgggaccttgatatagtggactctttagagccagtcttcacactcggaagtaaactttcaaaaaagaagaaaaagaaaggaaagaagagttcctcagcagaagggcataccgatgctgtccttgacctttcatggaataagctaatcagaaatgttttagcaagtgcatcagctgacaacactgtaattctgtgggatatgtccttggggaaaccagcagctagcctcgctgtacacacagacaaggtccaaacactgcagtttcatccatttgaagcacagactctgatttctggctcatatgataagtcagtggctttgtatgactgccgaagtccagatgaaagccatcgaatgtggcgattcagtgggcagatagagagagtgacttggaatcacttttcaccttgtcatttcttggccagtacagatgacggctttgtatataatttggatgcacgttcagataagccaatttttacacttaatgcacacaatgatgaaatctctggtcttgatcttagcagtcaaatcaagggctgtctcgtgactgcttcagctgacaaatacgtgaagatctgggacatcttaggagataggccaagtctagttcattctagggacatgaaaatgggagttctcttctgttcttcatgttgccctgatttgccatttatttatgcctttggaggtcaaaaagaagggcttcgggtctgggatataagcacagtctcttcagtaaatgaagcatttggaagacgagagaggcttgttcttgggagtgcaagaaattcatctattagtggcccttttggcagcaggagctcagatacacccatggagtcttaatgaagatcatctaatttcctgcttaccttaactgggaattttaaaaagttggcctaaaaatgttccatgcgtggcagcaaccatgcagagtgactgaaacacaattcatttctgactgacattcctttctgcaactgcggtggcaccacaaatatccggtctttgtgcttgctcttcagatggatggtttgt

SEQ ID NO: 172565 - DNA, 569 bp, Homo sapiens
  Payload ID: 13927
  Gene Symbol: PWP1
  Gene Name: PWP1 homolog, endonuclein
  ENST ID: ENST00000547995
  CDS Start-End: 275-569
gtgcagatccctgagcgtgtggcagcagtgcggtcgtggtccctccctatgcagcctggtttctagcgtgacacgcccttgacttgaggaccatgaaccgcagccgccaggtgacgtgcgtggcctgggtccgctgcggcgtggccaaagagacaccagacaagagctgagtaaagaagaagtaaaacgcctcattgctgaggcaaaggagaaattgcaagaagaaggtggtggcagtgatgaagaggagacaggcagtccttcagaagatggcatgcagagtgcacgcacccaggcacgcccaagagagcccctggaggatggtgacccagaggatgacaggacgcttgatgatgatgagctggctgagtacgacttagataaatatgatgaggaaggtgacccagatgctgagactcttggtgaatctctcttgggtcttacggtctacgggagtaatgatcaagatccttacgttactctgaaagatacagaacaatatgaacgtgaagatttcttgattaagcccagtgataatcttatagtttgtggccgagctgaacaggacc

SEQ ID NO: 172566 - DNA, 851 bp, Homo sapiens
  Payload ID: 13927
  Gene Symbol: PWP1
  Gene Name: PWP1 homolog, endonuclein
  Uniprot ID: Q13610
  ENST ID: ENST00000552760
  CDS Start-End: 99-542
ggccctgtgcagatccctgagcgtgtggcagcagtgcggtcgtggtccctccctatgcagcctggtttctagcgtgacacgcccttgacttgaggaccatgaaccgcagccgccaggtgacgtgcgtggcctgggtccgctgcggcgtggccaaagagacaccagacaaggtagagctgagtaaagaagaagtaaaacgcctcattgctgaggcaaaggagaaattgcaagaagaaggtggtggcagtgatgaagaggagacaggcagtccttcagaagatggcatgcagagtgcacgcacccaggcacgcccaagagagcccctggaggatggtgacccagaggatgacaggacgcttgatgatgatgagctggctgagtacgacttagataaatatgatgaggaaggtgacccagatgctgagactcttggtgaatctctcttgggtcttacggtctacgggagtaatgatcaagatccttacgttactctgaaagatacatcaatgacatttttttcctctcacttaggaacaatatgaacgtgaagatttcttgattaagcccagtgataatcttatagtttgtggccgagctgaacaggaccagtgcaatttagaggtgcatgtttataatcaagaagaagactctttttatgtacaccatgatatactcttgtctgcatatcctctgagtgtggaatggctgaattttgatcctagcccagatgattctactggaaattacattgctgtaggaaacatgacccctgttattgaagtgtgggaccttgatatagtggactctttagagccagtcttcacactcggaagtaaactttcaaaaaagaa

SEQ ID NO: 172567 - DNA, 3297 bp, Homo sapiens
  Payload ID: 13928
  Gene Symbol: PWP2
  Gene Name: PWP2 periodic tryptophan protein homolog (yeast)
  Uniprot ID: Q15269
  ENST ID: ENST00000291576
  CDS Start-End: 128-2887
gcgctgtgggcggtgcacgccgtcgcttcccggaagtgcgtgctgtgggcggtgccgcgcggacccccgggaagtgtctctgtgggcggccgccgggttgagctgcggcacacgtgcgacggccgtgatgaagttcgcttaccggttttcaaatttgctgggtacggtgtaccggcgtgggaacctaaattttacctgcgatggaaattcagttatcagtcccgtgggcaatagagtcactgtatttgaccttaaaaacaacaaatctgacacgctgcccctggccactcggtacaacgtcaagtgcgtggggctgtccccggatggccgcctcgctatcatcgtcgatgaagggggcgatgcgctgctggtcagcctggtctgcaggtctgtgctgcaccacttccacttcaagggctctgtgcacagtgtgtccttctcccctgatggcaggaagtttgttgtcacaaagggtaacattgcccagatgtatcatgcccctgggaagaagcgggagttcaacgccttcgttctggacaagacctattttgggccctacgatgagaccacctgcatcgactggacggatgactccaggtgctttgtggttgggagcaaagacatgtccacctgggtgttcggagccgagcgctgggacaacctcatctactatgcactggggggacataaggatgccatcgtggcctgcttctttgaatccaacagcctggacctgtactcactcagccaggacggagtgctgtgcatgtggcagtgtgacacgccccccgagggcttgcggctgaagccccctgcgggctggaaagcagacctgttgcagcgggaggaggaagaggaggaggaggaggaccaggagggcgacagagagaccaccatccggggaaaagccactccggccgaggaggagaagacaggaaaagtgaagtactcacggctggccaagtacttcttcaataaagaaggggattttaacaacctgacagctgcagcatttcataagaagtctcacctcttggtcactggctttgcttctggaatcttccatcttcatgagctgccagagtttaacctcatccactccctgagcatttcagatcagagcatcgcctcagtggccatcaatagctcgggggactggattgcttttggctgttcaggcctgggccagctgctggtgtgggagtggcagagtgagtcctacgtgctcaagcagcagggccacttcaacagcatggtggccctggcctactcgcccgacggacagtacatcgtgactggcggggacgacggcaaggtcaaggtgtggaacaccctcagcggcttctgcttcgtcacttttacggagcactccagcggggtgaccggtgtgacctttactgccaccggctacgttgtggtgacctcatccatggacgggaccgtgcgagcctttgaccttcacaggtaccgaaacttccgcaccttcacctctccacgccccacccagttctcctgtgtggcggtggatgcgagcggtgagatcgtctctgcaggggcgcaggactcctttgagattttcgtgtggtccatgcagacaggcaggctccttgatgttttgtctggacacgaagggcccatcagtggtctgtgttttaacccaatgaagtccgtcctggccagtgcctcctgggacaagacagtgcgcctatgggacatgtttgacagctggaggaccaaggagacgctggccctgacctctgatgctctggctgtgacttttcgccctgatggtgcggagctggctgtggccacactgaactcacagatcaccttctgggaccctgagaacgcggtgcagacgggctccattgagggcaggcatgacctcaagactggcaggaaggagctggacaagattacagccaagcacgcggccaaggggaaggccttcaccgccctgtgctactctgcagacggccacagcatcctggcgggaggcatgtccaagttcgtgtgcatctaccacgtccgtgagcagattctcatgaagaggttcgagatctcttgcaacctgtctttggacgccatggaggaatttttgaaccgaagaaaaatgacagagtttggcaacctggcactaattgatcaggatgctgggcaggaggatggagtcgcgataccactgccaggcgtcaggaaaggtgacatgagttctcggcacttcaaacctgagatcagggtgacctcactccgcttctctcccactgggcgctgctgggcggccaccaccacggagggactcctcatctactccctggacacccgcgtgctctttgacccgtttgagctggacaccagcgtcacccccgggagggtgcgcgaggcactgcgccagcaggacttcaccagggccatcctcatggccctccggctcaacgagagcaaactggtgcaggaggccctggaggcggtgcccaggggcgagattgaagtggtcacctcctcccttcctgaactgtatgtggagaaagtgctggagtttttagcttcctcctttgaagtgtctcgccacctggaattctacctcctctggactcacaaactgctcatgttgcacggacagaagctgaagtccagagccgggacgctgctgcctgtcattcagttcctccagaagagcatccagcggcacctggacgacctgtcgaaactctgtagctggaaccactataacatgcagtacgcactagcagtttccaagcagcggggcacaaaacgctccctagacccgctgggaagtgaggaggaggcagaagcatctgaagatgacagcctgcatctgcttggaggaggaggcagagactcagaagaagagatgctggcctagagccagccggttgcagcgttggattgtgccggctaagacctgccagggagatgggacccttgtgccacctgggccagcaaagaggaggggtccagagaacagctgaaatactgtcactagtggtagtgacttgcttttcctgtgcacacatgtagcccatcaggacagcgagccgacgggtcacgccaggggccggcacgcactggcacctggccccaggagcggggccgtgtgaacggtgatgaatgttgaaaatgcgtctcagagaggtattcacatgaactttgtatgagacttatttatatctttaacataaaggtttgataaagaacttagggattaaaaaaaagatggagttttctaacgtgaggatgaagtctacacttcagattaaaaagggttatgttgta

SEQ ID NO: 172568 - DNA, 604 bp, Homo sapiens
  Payload ID: 13928
  Gene Symbol: PWP2
  Gene Name: PWP2 periodic tryptophan protein homolog (yeast)
  ENST ID: ENST00000456705
  CDS Start-End: 45-604
gggcggccgccgggttgagctgcggcacacgtgcgacggccgtgatgaagttcgcttaccggttttcaaatttgctgggtacggtgtaccggcgtgggaacctaaattttacctgcgatggaaattcagttatcagtcccgtgggcaatagagtcactgtatttgaccttaaaaacaacaaatctgacacgctgcccctggccactcggtacaacgtcaagtgcgtggggctgtccccggatggccgcctcgctatcatcgtcgatgaaggaagtttgttgtcacaaagggtaacattgcccagatgtatcatgcccctgggaagaagcgggagttcaacgccttcgttctggacaagacctattttgggccctacgatgagaccacctgcatcgactggacggatgactccaggtgctttgtggttgggagcaaagacatgtccacctgggtgttcggagccgagcgctgggacaacctcatctactatgcactggggggacataaggatgccatcgtggcctgcttctttgaatccaacagcctggacctgtactcactcagccaggacggagtgctgtgcatgtggcagtgtgacacgccc

SEQ ID NO: 172569 - DNA, 3346 bp, Homo sapiens
  Payload ID: 13929
  Gene Symbol: PWWP2A
  Gene Name: PWWP domain containing 2A
  Uniprot ID: Q96N64
  ENST ID: ENST00000307063
  CDS Start-End: 36-2303
agccggagttggaggagggagaagctaggaagaaaatggcggccgtggctgcagaggcggcagcgactgcagcgtcccccggggaggggggcgccggcgaggccgagccggagatggagcccatccccggcagtgaggccggcactgaccccctcccggtcacggccactgaagcgtctgtgccggatggcgagactgacgggcagcaatccgctcctcaggccgacgagccgccgctcccgccgccaccgccgccgccgggggagctcgcccgcagcccagaggcggtggggccggagctggaggctgaggagaaactgtccgttcgggtggcggagtcggcggcagccgcgcctcagggagggccggaacttccaccttctcctgcatcgccgccggagcagcccccggctcccgaggagcgcgaggagccgccgctgcctcagcccgtagccccggcgctcgtgccgccggcgggcggggactccacggtgtcgcaactgatcccgggctcggaggtgcgggtcacgctggaccacatcattgaggacgcgcttgtcgtgtcgttccgcttcggggagaagctcttctccggggtcctcatggatctgtccaaaaggtttgggccccatggtatccctgtgacagtatttcccaaaagggaatataaggataaaccagaagccatgccgctccaaagtaatacattccaagaagggacagaagtcaagtgtgaagcaaatggtgctgttcccgatgacccttctcctgtcccgcatcccgagctgagcttggctgaaagcctgtggacttccaaaccaccacctctcttccatgaaggagcaccttatcctccccctttgtttatcagggacacatataaccaatcaatacctcagccacctcctcggaaaattaagcgacccaaacgaaaaatgtacagggaagaacccacttcaataatgaatgctattaaactacgacccaggcaagttctgtgtgataaatgtaaaaacagtgttgttgctgaaaaaaaggaaattagaaaaggtagtagtgcaactgactcttctaaatatgaagataaaaaacggagaaatgaaagtgtaactactgtgaacaaaaaactgaaaactgaccataaagtggatgggaaaaaccaaaatgaaagccagaaaagaaatgctgtggttaaggtttcaaatattgctcacagcagaggcagagtagtaaaagtttctgctcaggcaaatacatcaaaagctcagttaagtactaaaaaagttctccagagtaagaacatggatcatgcgaaagctcgggaagtgttaaaaattgccaaagaaaaggcacaaaagaagcaaaatgaaacctctacttccaaaaatgcacattcaaaagtccatttcacacgtcgatatcagaatcctagctcaggttcccttccaccccgggttcgtttaaaaccacagaggtacaggaatgaagaaaatgactcttctctgaagacaggacttgagaaaatgcggagtggcaagatggcacccaagccccagtctcgctgcacctctacccgctcagcaggtgaggccccttcagaaaatcagagtccctcaaaaggccctgaagaggccagcagtgaggttcaggacacaaatgaagtgcatgtgcctggtgatcaggatgaaccacagacattgggcaaaaagggcagcaaaaacaatatctctgtttatatgaccctaaatcaaaagaaatctgactcttccagtgcttcagtgtgtagcattgatagcacagatgatttgaaatcttccaactctgagtgtagttcttctgaaagctttgattttcctccaggcagtatgcatgcaccttccacctcctccacttcctcctcttcaaaggaagagaaaaagctcagtaattccttgaaaatgaaagtcttttccaaaaacgtctctaaatgcgtcacaccagatggcaggaccatatgtgtaggggacattgtttgggccaagatatatggcttcccttggtggccagcccgtattcttactataactgtgagccggaaagataacggccttttagtccgacaggaggcccgtatttcatggtttgggtctccaacaacatctttccttgctctttcacaactctccccctttttagaaaacttccagtcacgctttaataagaagagaaagggcctgtatcgcaaggctatcacagaggcagctaaggctgccaagcagctgacccccgaagtgcgggctttgttgacacagtttgaaacgtgaacatgggcagtaaggtaggcaagaccattggaagtcaccacagattttctagtctagttaggaataatttctacaaaatagcgtggccagattggagagagaagttgcactcagttggctggctttttaatacttaccttatagccatttttagactgagagcttaaactgaacatataatcaaattttgtgttaaggaagtgagattttagcagtatttttcagttttgaagttcgaaaccatcccaaggcataggagccatagcctcaactgaaattgaatttttgtagggactgttaattgccatttgtacctaatactgtatatatacatatatatacgtgtgtgtgtgtgtatatatatatatccgtgtatgtatatatacacacatatatatgtatatatacacatatatatatatgaaatacagcctgtcactgtgtgacacagattgcatatttgggattgcaataagggcttggtgagctgggggaatagtggatatttaatgactacttgttttttaaataatgaacacttagcctttctatgcgcataatggtgtaaaagttagatggttaggtgtttgacaaacagatggttgcaattcagttacagactggggaaatagcccagtgtttgggattaaaactgtcaagactggataggtgttagtcatcactgtctttcgtccagtggggatttaataaatactttcaagcttctggtttgggagtttagataggtttgattttggatttgtaaatagtgattgctaaatttggtcagatttctcctgactggctgttcctaaattcttaggatatgtcccagtaaaattatactttgtgaattaattgtcatatgtgtaattgttgcattttggatgtacctaatttgataattaaaacaaaataatttccgtttaaggtatctgtttgcaggtcagaaaatgagaaaatgtaattgtgtaatgctctgaaatgtaaaaaaaaaaaaaaaaaccaaaaaaaagctgtaaataaaatcaactaaatccaaa

SEQ ID NO: 172570 - DNA, 3991 bp, Homo sapiens
  Payload ID: 13929
  Gene Symbol: PWWP2A
  Gene Name: PWWP domain containing 2A
  Uniprot ID: Q96N64
  ENST ID: ENST00000456329
  CDS Start-End: 36-1718
agccggagttggaggagggagaagctaggaagaaaatggcggccgtggctgcagaggcggcagcgactgcagcgtcccccggggaggggggcgccggcgaggccgagccggagatggagcccatccccggcagtgaggccggcactgaccccctcccggtcacggccactgaagcgtctgtgccggatggcgagactgacgggcagcaatccgctcctcaggccgacgagccgccgctcccgccgccaccgccgccgccgggggagctcgcccgcagcccagaggcggtggggccggagctggaggctgaggagaaactgtccgttcgggtggcggagtcggcggcagccgcgcctcagggagggccggaacttccaccttctcctgcatcgccgccggagcagcccccggctcccgaggagcgcgaggagccgccgctgcctcagcccgtagccccggcgctcgtgccgccggcgggcggggactccacggtgtcgcaactgatcccgggctcggaggtgcgggtcacgctggaccacatcattgaggacgcgcttgtcgtgtcgttccgcttcggggagaagctcttctccggggtcctcatggatctgtccaaaaggtttgggccccatggtatccctgtgacagtatttcccaaaagggaatataaggataaaccagaagccatgccgctccaaagtaatacattccaagaagggacagaagtcaagtgtgaagcaaatggtgctgttcccgatgacccttctcctgtcccgcatcccgagctgagcttggctgaaagcctgtggacttccaaaccaccacctctcttccatgaaggagcaccttatcctccccctttgtttatcagggacacatataaccaatcaatacctcagccacctcctcggaaaattaagcgacccaaacgaaaaatgtacagggaagaacccacttcaataatgaatgctattaaactacgacccaggcaagttctgtgtgataaatgtaaaaacagtgttgttgctgaaaaaaaggaaattagaaaaggtagtagtgcaactgactcttctaaatatgaagataaaaaacggagaaatgaaagtgtaactactgtgaacaaaaaactgaaaactgaccataaagtggatgggaaaaaccaaaatgaaagccagaaaagaaatgctgtggttaaggtttcaaatattgctcacagcagaggcagagtagtaaaagtttctgctcaggcaaatacatcaaaagctcagttaagtactaaaaaagttctccagagtaagaacatggatcatgcgaaagctcgggaagtgttaaaaattgccaaagaaaaggcacaaaagaagcaaaatgaaacctctacttccaaaaatgcacattcaaaagtccatttcacacgtcgatatcagaatcctagctcaggttcccttccaccccgggttcgtttaaaaccacagaggtacaggaatgaagaaaatgactcttctctgaagacaggacttgagaaaatgcggagtggcaagatggcacccaagccccagtctcgctgcacctctacccgctcagcaggtctcaacaaatggcagctattacatcagacagtgacgagtcctgctgctcccttacagtgtctgacagaccactgtggattcagactgggagcattgaagttaacagtgaaacgggcagcacaaagacattagcaggctgctggtttcatggacctgtaccacaatgacacagagaacaccagagcatcaggactgaatgaaattggagtttttaaagctgcactaagaagtaaatgttaaggcagtggttaaaaacaacagtctataaaggggcacttgcaaattgtgctgtcttaaaccgaagaaaaggtattagggaatattttataaaaaataaacttgcaataaattatgcatgagatgaggagaaaaatgatgtgaattacacacgtaagaactcacttgaattttatatatgaagaaacactgacagtaacttctttggaatgtgaagttcttatcagtacagtttggacaggcctaaaaggcatgggatgatgcagaaatgctgaattatttttcatacttaaactttgtgctttctccaaggtttaggttaatcagttcagatatgagcaaaggtatttctaaaatggctcttctatgaaaagcaatagtcacatatgccaaggccaatgtttccttcaaggtgccagtagaaacaacagaaaataacatcctgctgaaaggatggcaaagtgccccgccccaccccacaaacacaatttggatcttttccttctttaataaagcagggctgtattatcttgaatatatgtttgcttgttagaacatattaagatatatttatttgccactagtatttaacattttgtgcacattttcataattacattcttacctttcaaattttgactcaaagtggataggctagtgttgatattggagtgcaaatgtatatactccaagagctagttcttaattctgctgagttggaaagccttttattattgtctgtatccttactggttttatctagttcaaaaaaggtgacaacgtctaaattttgatgtggacctctctccatagagagccgctcctaagtgcaagaaattccaacaggtgtcagtaggacttggccctgggggacaacaagtggcaggaacaggatcctttaaaacagtgtcaaacttctcatgcatggagcatgaattcttactaatagagactgtagtttttttcttgtctttggtaaatatataaaagaccttaatttttcttttttaatgaatggagaaaacatgagaaaaccagatggacctgttagtactacatttttaaggcattttatatttgatggtgccgtacttttaataataataaaactgaagttttttagtggcaatactgatttattttttaaaccagaaagataatccatattgattacttactacaaaaaagggaaaatatgccaaaaaataaaaaaccttaaaattcatatgaagcaacgtaacagataactgagcacttggctcaagtggtcagacttttcataatgttactgtgtaagtttggaattacctaataaccccaggctcaggattaacagaaggttctgggtgagttttaaaacatttaatatacctatgatttgttttacaacttgaagaaaaggcaggcagtcttgtgtctaatgagcttaatgcaaattctaattatactgcaaataatttaaagttttgattgcattctacaattgtctgtttggaaaattacatattatgaagtcattatatattttatcaaatcagaaaaagtcagctcaggaactgtagcagcagggagttctaaagatgacatgaactatactataggggtgccctactctatatggcctagggctttggtttgggtcagtcttgttctttcagatacataacaccagcagtactttcgggctcacttcaagaaccagataactctcccaaaccatgatacatgaagtgtataatcaagatttttaattaagctttagaattctttatttgtgtagagtgatggaaatgaccaagaagtaataatataaagcaaaagaattgggagagatcaggttttaagtatataaatattttttttttctcatggcatattctcaaaggtgttttgttacaaaccagattttcattttttaaaaaatgagacttggtggtatttaaaacctacacctaccatgttgctatttcactttcattgctttagttgcttaatatttaagctttgcttcatgctaccttttgtctgtatttcaatcttcataagcctattttgttttgtagacttgaatgataaaaattgtttctcatcttaagtatgctcagagttttaaatgttaaagaatgttgtgtaacctttatccaataaagtctttgattttttaaaaa

SEQ ID NO: 172571 - DNA, 1819 bp, Homo sapiens
  Payload ID: 13929
  Gene Symbol: PWWP2A
  Gene Name: PWWP domain containing 2A
  Uniprot ID: Q96N64
  ENST ID: ENST00000523662
  CDS Start-End: 35-1597
gccggagttggaggagggagaagctaggaagaaaatggcggccgtggctgcagaggcggcagcgactgcagcgtcccccggggaggggggcgccggcgaggccgagccggagatggagcccatccccggcagtgaggccggcactgaccccctcccggtcacggccactgaagcgtctgtgccggatggcgagactgacgggcagcaatccgctcctcaggccgacgagccgccgctcccgccgccaccgccgccgccgggggagctcgcccgcagcccagaggcggtggggccggagctggaggctgaggagaaactgtccgttcgggtggcggagtcggcggcagccgcgcctcagggagggccggaacttccaccttctcctgcatcgccgccggagcagcccccggctcccgaggagcgcgaggagccgccgctgcctcagcccgtagccccggcgctcgtgccgccggcgggcggggactccacggtgtcgcaactgatcccgggctcggaggtgcgggtcacgctggaccacatcattgaggacgcgcttgtcgtgtcgttccgcttcggggagaagctcttctccggggtcctcatggatctgtccaaaaggtttgggccccatggtatccctgtgacagtatttcccaaaagggaatataaggataaaccagaagccatgccgctccaaagtaatacattccaagaagggacagaagtcaagtgtgaagcaaatggtgctgttcccgatgacccttctcctgtcccgcatcccgagctgagcttggctgaaagcctgtggacttccaaaccaccacctctcttccatgaaggagcaccttatcctccccctttgtttatcagggacacatataaccaatcaatacctcagccacctcctcggaaaattaagcgacccaaacgaaaaatgtacagggaagaacccacttcaataatgaatgctattaaactacgacccaggcaagttctgtgtgataaatgtaaaaacagtgttgttgctgaaaaaaaggaaattagaaaaggtagtagtgcaactgactcttctaaatatgaagataaaaaacggagaaatgaaagtgtaactactgtgaacaaaaaactgaaaactgaccataaagtggatgggaaaaaccaaaatgaaagccagaaaagaaatgctgtggttaaggtttcaaatattgctcacagcagaggcagagtagtaaaagtttctgctcaggcaaatacatcaaaagctcagttaagtactaaaaaagttctccagagtaagaacatggatcatgcgaaagctcgggaagtgttaaaaattgccaaagaaaaggcacaaaagaagcaaaatgaaacctctacttccaaaaatgcacattcaaaagtccatttcacacgtcgatatcagaatcctagctcaggttcccttccaccccgggttcgtttaaaaccacagaggtacaggaatgaagaaaatgactcttctctgaagacaggacttgagaaaatgcggagtggcaagatggcacccaagccccagtctcgctgcacctctacccgctcagcagcacaaagacattagcaggctgctggtttcatggacctgtaccacaatgacacagagaacaccagagcatcaggactgaatgaaattggagtttttaaagctgcactaagaagtaaatgttaaggcagtggttaaaaacaacagtctataaaggggcacttgcaaattgtgctgtcttaaaccgaagaaaaggtattagggaatattttataaaaaataaacttgcaataaattatg

SEQ ID NO: 172572 - DNA, 767 bp, Homo sapiens
  Payload ID: 13929
  Gene Symbol: PWWP2A
  Gene Name: PWWP domain containing 2A
  ENST ID: ENST00000524050
  CDS Start-End: 1-106
gaagacaggacttgagaaaatgcggagtggcaagatggcacccaagccccagtctcgctgcacctctacccgctcagcagaatttatagaccaggaagctgactaatcatttggaaggaacatccattcaactctcatttacagatgtggaaccaaagaccaaacaattatctgtgagaggccagagatggaaccttgctatgttgctcaggctggtctggatctctggcctcaagcaatactcctgcgttggcctcccaaagtactgtgattacagactatgaagggctgctgaaataaaagtttgggcacggtggctcacgcctgtaatccaaagccaaggtctacttccagtggaggtgagaatgggggtggacgaaaagagaaatccctaatcaccagaggtacaggctccttcccacttcttagcagcttttctcactctgaggcctcccatcttagagtaaagcccaggggacagagtggctgcactctaaaatccatcagcacattcatgcagaggccacccttcccacctgctgcttccagccaatgcctgagcatgggagggactcgtctgaggggcagcactggctccccaatggctttgctgaaactttctcagcaccacactccagtggaaaacttccccgctcccccggcctttcctcctccacaggggtctgccaactctgccaacagcctccagctcccagccccattttcccttgcaggtgtttcccccagtaaatctcttgtacttttaa

SEQ ID NO: 172573 - DNA, 734 bp, Homo sapiens
  Payload ID: 13929
  Gene Symbol: PWWP2A
  Gene Name: PWWP domain containing 2A
  ENST ID: ENST00000521424
  CDS Start-End: 1-210
gtccatttcacacgtcgatatcagaatcctagctcaggttcccttccaccccgggttcgtttaaaaccacagaggtacaggaatgaagaaaatgactcttctctgaagacaggacttgagaaaatgcggagtggcaagatggcacccaagccccagtctcgctgcacctctacccgctcagcagaatttatagaccaggaagctgactaatcatttggaaggaacatccattcaactctcatttacagatgtggaaccaaagaccaaacaattatctgtgagaggccaggtctcaacaaatggcagctattacatcagacagtgacgagtcctgctgctcccttacagtgtctgacagaccactgtggattcagactgggagcattgaagttaacagtgaaacgggcagcacaaagacattagcaggctgctggtttcatggacctgtaccacaatgacacagagaacaccagagcatcaggactgaatgaaattggagtttttaaagctgcactaagaagtaaatgttaaggcagtggttaaaaacaacagtctataaaggggcacttgcaaattgtgctgtcttaaaccgaagaaaaggtattagggaatattttataaaaaataaacttgcaataaattatgcatgagatgaggagaaaaatgatgtgaattacacacgtaagaactcacttgaattttatatatgaagaaacactgacagtaacttcttt

SEQ ID NO: 172574 - DNA, 407 bp, Homo sapiens
  Payload ID: 13929
  Gene Symbol: PWWP2A
  Gene Name: PWWP domain containing 2A
  ENST ID: ENST00000520662
  CDS Start-End: 1-150
tccggggtcctcatggatctgtccaaaagagaccatgaaacgtatggtgcaatagccctacttttggtgggaaaaatatacagccattctggtgaagcagtttgggccccatggtatccctgtgacagtatttcccaaaagggaatataaggataaaccagaagccatgccgctccaaagtaatacattccaagaagggacagaagtcaagtgtgaagcaaatggtgctgttcccgatgacccttctcctgtcccgcatcccgagctgagcttggctgaaagcctgtggacttccaaaccaccacctctcttccatgaaggagcaccttatcctccccctttgtttatcagggacacatataaccaatcaatacctcagccacctcctcggaaaattaagcgaccca

SEQ ID NO: 172575 - DNA, 2651 bp, Homo sapiens
  Payload ID: 13930
  Gene Symbol: PWWP2B
  Gene Name: PWWP domain containing 2B
  Uniprot ID: Q6NUJ5
  ENST ID: ENST00000305233
  CDS Start-End: 60-1832
ggcggcggcggcggcggcggcggcggcggggcgggggcggcctgggacgcggcgggagcatggagccgcgcgccggctgccggctgccggtgcgggtggagcaggtcgtcaacggcgcgctggtggtcacggtgagctgcggcgagcggagcttcgcggggatcctgctggactgcacgaaaaagtccggcctctttggcctacccccgttggctccgctgccccaggtcgatgagtcccctgtcaacgacagccatggccgggctcccgaggagggggatgcagaggtgatgcagctggggtccagctccccccctcctgcccgcggggttcagccccccgagaccacccgccccgagccacccccgcccctcgtgccgccgctgcccgccggaagcctgcccccgtaccctccctacttcgaaggcgcccccttccctcacccgctgtggctccgggacacgtacaagctgtgggtgccccagccgccgcccaggaccatcaagcgcacgcggcggcgtctgtcccgcaaccgcgacccggggcgcctcatcctcagcaccatccgcctgcggccgcgccaggtgctctgtgagaagtgcaagagcacgctgagccccccggaggccagccccggacccccagccgcgcccagggcccgcaggaggctgggcagcggcccggacagggagctccgcaagccggaggagccggagaacggcgagcccacggctgcggccaccgccaggaggagcaagagggagaggcgcgaggaggacagggccccggcagagcaggtcccgcggagcccggtcatcaagatctcctacagcacgccccagggcaagggagaggtggtcaagatcccctcccgcgtgcacggctctctggagcccttccgtccccagcaggccccgcaggacgacggcagccaggaccccgaggtgctggacagagagtcccgggaccggccgtcctgcgcgccctcggcctccatccccaagttgaaactgacacggcctgtgccggccggcgcggacctgccgccccctaagatccgcctgaagccccaccgtctgggggacagcgagcacgagcccgtgtaccgggccgagctggtgggggagctgaacgggtacctgcgggacagctcgccggcgccctgtgcggacggccctgccggtgggctggcggacttgtcttctggaagttcgggtgaggacgatgacttcaagagctgtccccagggtccacagggacgcgagggcttggcttttctcgtcagctgccctgaggggagagcggactgtgccagtgagtcggcgtgcagcagcgacagcctggacgaggccagatcgtccggctcggaagggacgccggcagacacgggtgacctctcgcctggccacggcgcgtcagcgccctcggtgtccagagaggctcgccaaacggtgccgcccctgacggtcaggctgcacacacagagcgtgtcggagtgcatcacggaggacggcaggactgtggccgtgggggacatcgtctggggtaagatccatggttttccttggtggccggcgcgtgttcttgacatcagtctcggccagaaggaggacggagagccgtcttggcgagaagcgaaggtctcgtggtttggttctccgactacgtcgttcttgtctatttcaaaactctcccctttctctgaatttttcaaactgagatttaatcgtaagaagaaggggatgtatcggaaagctataaccgaggctgcaaatgccgcaagacacgtggccccggaaatcagggagctcttaacccagtttgaaacgtaactggttccctgaccaggtcaccgacgatgagggcgcacctgctgtcctggagcttccgatctctgttcggggaccctgtgagccttctggccggctgcgtgcagagcccactgggcacggtggtcggcctggtgtgaggccccccggggaccggcagtgtgtccagggaggggatggccctgagcccagcggctcctcccgctgagtgtatttcttcccaccactcagcgcatggctgccctggctcacgaggcagtcgggactcgtgacttgctggctgctggctgctgctgcctcgcgcgctggggttccatggaggaactgggcctgccgccccggcctcacctgctgcccgcatgctggggtcccatggaggaaccaggcctggcgccccggcctcgcccagcggctggtgtgggcagctgttccctgcctcgcagtgtcctggaggcagctgtctcgcagactcagcttggtctcccgcaggcttcagaaaaacccaattgcacgtgtgggattcttccccagcccttgggtgcggggtctctgtgcacttgagagctgggggacccacccaccgtctcccactccaagttcatcccagagcgtggggcccgctgggcacctggcacctggcctgcagatgctgctacgagtgaccagtgctgtgtggaggaggccaagggcggcccctgggaaaccgggcttcaacagtacaaggaaaagaaacttgctctgttttgtaagagcgtgttccttttcctcttttttgtcactttaaagaccaaaaagaataaagaaagaaaagaaaaaaattaa

SEQ ID NO: 172576 - DNA, 2013 bp, Homo sapiens
  Payload ID: 13930
  Gene Symbol: PWWP2B
  Gene Name: PWWP domain containing 2B
  Uniprot ID: Q6NUJ5
  ENST ID: ENST00000631148
  CDS Start-End: 60-1559
ggcggcggcggcggcggcggcggcggcggggcgggggcggcctgggacgcggcgggagcatggagccgcgcgccggctgccggctgccggtgcgggtggagcaggtcgtcaacggcgcgctggtggtcacggtgagctgcggcgagcggagcttcgcggggatcctgctggactgcacgaaaaagtccggcctctttggcctacccccgttggctccgctgccccaggtcgatgagtcccctgtcaacgacagccatggccgggctcccgaggagggggatgcagaggtgatgcagctggggtccagctccccccctcctgcccgcggggttcagccccccgagaccacccgccccgagccacccccgcccctcgtgccgccgctgcccgccggaagcctgcccccgtaccctccctacttcgaaggcgcccccttccctcacccgctgtggctccgggacacgtacaagctgtgggtgccccagccgccgcccaggaccatcaagcgcacgcggcggcgtctgtcccgcaaccgcgacccggggcgcctcatcctcagcaccatccgcctgcggccgcgccaggtgctctgtgagaagtgcaagagcacgctgagccccccggaggccagccccggacccccagccgcgcccagggcccgcaggaggctgggcagcggcccggacagggagctccgcaagccggaggagccggagaacggcgagcccacggctgcggccaccgccaggaggagcaagagggagaggcgcgaggaggacagggccccggcagagcaggtcccgcggagcccggtcatcaagatctcctacagcacgccccagggcaagggagaggtggtcaagatcccctcccgcgtgcacggctctctggagcccttccgtccccagcaggccccgcaggacgacggcagccaggaccccgaggtgctggacagagagtcccgggaccggccgtcctgcgcgccctcggcctccatccccaagttgaaactgacacggcctgtgccggccggcgcggacctgccgccccctaagatccgcctgaagccccaccgtctgggggacagcgagcacgagcccgtgtaccgggccgagctggtgggggagctgaacgggtacctgcgggacagctcgccggcgccctgtgcggacggccctgccggtgggctggcggacttgtcttctggaagttcgggtgaggacgatgacttcaagagctgtccccagggtccacagggacgcgagggcttggcttttctcgtcagctgccctgaggggagagcggactgtgccagtgagtcggcgtgcagcagcgacagcctggacgaggccagatcgtccggctcggaagggacgccggcagacacgggtgacctctcgcctggccacggcgcgtcagcgccctcggtgtccagagaggctcgccaaacggtgccgcccctgacggtcaggctgcacacacagagcgtgtcggagtgcatcacggaggacggcaggactgtggccgtgggggacatcgtctggggtcaccgacgatgagggcgcacctgctgtcctggagcttccgatctctgttcggggaccctgtgagccttctggccggctgcgtgcagagcccactgggcacggtggtcggcctggtgtgaggccccccggggaccggcagtgtgtccagggaggggatggccctgagcccagcggctcctcccgctgagtgtatttcttcccaccactcagcgcatggctgccctggctcacgaggcagtcgggactcgtgacttgctggctgctggctgctgctgcctcgcgcgctggggttccatggaggaactgggcctgccgccccggcctcacctgctgcccgcatgctggggtcccatggaggaaccaggcctggcgccccggcctcgcccagcggctggtgtgggcagctgttccctgcctcgcagtgtcctggaggcagctgtctcgcagactcagcttggtctcccgc

SEQ ID NO: 172577 - DNA, 1538 bp, Homo sapiens
  Payload ID: 13931
  Gene Symbol: PXDC1
  Gene Name: PX domain containing 1
  ENST ID: ENST00000380277
  CDS Start-End: 1-539
tgcaaagccgacggatagaacctgtgatgggaagacttctgctctgcgcttctcatggggagatagaaaagcacccgagccttcatgcctcgagctatggactggttgccataaaggaagcccacgacatagagaccaggcttaatgaggtggagaagctgctgaagacgatcataagcatgccctgtaaatattctagatcggaagttgtgctcaccttcttcgaaagatctcctctggatcaggtgttaaaaaatgataatgtgcataaaattcaacccagctttcaaagtccagtcaaaatatcagaaatcatgaggtccaatggattttgtttagcaaataccgaaacaatagttattgaccacagtataccaaatggaagagaccagcagctgggcgtggacccaacagagcatttatttgagaatggcagtgagtttccctcagagctggaggacggggacgacccagcagcctacgtcaccaacctgtcatattaccacctggtccccttcgagacagacatttgggactgaacctctctatcaggcctcccccgcctcagctgttcactgccagctctgatgctgtccactgtgctggcccccatggtcacagctgctgccccagctctggaactcccagacgtcccaggccccactgacgccaggaggcctgggtgtcctgcaagtggagcagcaggggctcctagtgggccaggctgaccgcagagtctccagcaagctgaggtcacagccggaggccacagggcctgtgttctgagggtcttcactccctgcttggtgcccacagggctgcgcactgccagggcagggacagttcctgtggggctcgctctcactgctactgcttcctgggaggtgcatccctcttggtgaagtggcctagtgccccccagccaccctgactccccaccattccctcccacggcaaacgcacaaaacgtcttgagggagattttgacaagtcacccattccaggtgccacaggcaggggatgtttagtaatccaggatttctctgagaactgggatatgtggcctttttttttttctttttatcttttatctggaaactgggtttgggtcaaccccaggagtatttgcagaaggcccagcacagtggggggtattggctgcagggcagggaaggcattgccgactagataaccgtgtgagcttggactgagcgttggtggttcttcccaaaggaaaggaatttcttcccggcctgccaggtctctgggccttcagcgcgggtcctggtgctgcggccacaccaccctggggtgctcattgacagagctgccataatgaacttgaaaggacgggaatcacgagggaagctggggctcccctgcccacaggagaggatccccgttcttcaagcttctctgctcagtgtctactaacgaccgacatttgctaatgtaaataatagtaaattattgagaattctaattcttttacacagtctgtttttaatctattttaattaaataaaatctatgactct

SEQ ID NO: 172578 - DNA, 2190 bp, Homo sapiens
  Payload ID: 13931
  Gene Symbol: PXDC1
  Gene Name: PX domain containing 1
  Uniprot ID: Q5TGL8
  ENST ID: ENST00000380283
  CDS Start-End: 496-1191
ttcccggctggtccagtcaccgacctgcggctccggggccgcgagggaggaggcgcggggggcgcgaggcgggggcgagcgcttgggactcggcccggctcccggctccgggggttctcgtggccgcggcagcgcggtctctgcggaggcggcgggggcgcggccagccggacctcttcctttccagagcggcccgcggcgcccgttccgcgggaggcgggcgggaggcggacgcggcctaacctcgacgtcgactaccgcgccgcccgcgatgggaagcgccttataaagccgcgcccggccggcccgagccactcgccgccgcgccgccccgctgccccgaacgcgggccatacgcagcctccttggagtgacgggccgaccccggacgaccccggccacggacagacccgggacgaccccggccggggcgcgcctcctgcgggcgggcgggcggcggggctggggagcccttggcgggggcatgcgtgcgacatggcctcggcggtgtttgagggcacgtcgctcgtgaacatgttcgtgcgcggctgctgggtgaacggcatccgcaggctcatcgtcagccggcgcggcgacgaagaggagttcttcgagatccgcacggagtggtcggaccgcagcgtgctctacctgcaccgcagcctggcggacctgggccgcctgtggcagcgcctgcgcgacgcctttcccgaggaccggtccgaactggcgcaggggccgctgcggcaaggactggttgccataaaggaagcccacgacatagagaccaggcttaatgaggtggagaagctgctgaagacgatcataagcatgccctgtaaatattctagatcggaagttgtgctcaccttcttcgaaagatctcctctggatcaggtgttaaaaaatgataatgtgcataaaattcaacccagctttcaaagtccagtcaaaatatcagaaatcatgaggtccaatggattttgtttagcaaataccgaaacaatagttattgaccacagtataccaaatggaagagaccagcagctgggcgtggacccaacagagcatttatttgagaatggcagtgagtttccctcagagctggaggacggggacgacccagcagcctacgtcaccaacctgtcatattaccacctggtccccttcgagacagacatttgggactgaacctctctatcaggcctcccccgcctcagctgttcactgccagctctgatgctgtccactgtgctggcccccatggtcacagctgctgccccagctctggaactcccagacgtcccaggccccactgacgccaggaggcctgggtgtcctgcaagtggagcagcaggggctcctagtgggccaggctgaccgcagagtctccagcaagctgaggtcacagccggaggccacagggcctgtgttctgagggtcttcactccctgcttggtgcccacagggctgcgcactgccagggcagggacagttcctgtggggctcgctctcactgctactgcttcctgggaggtgcatccctcttggtgaagtggcctagtgccccccagccaccctgactccccaccattccctcccacggcaaacgcacaaaacgtcttgagggagattttgacaagtcacccattccaggtgccacaggcaggggatgtttagtaatccaggatttctctgagaactgggatatgtggcctttttttttttctttttatcttttatctggaaactgggtttgggtcaaccccaggagtatttgcagaaggcccagcacagtggggggtattggctgcagggcagggaaggcattgccgactagataaccgtgtgagcttggactgagcgttggtggttcttcccaaaggaaaggaatttcttcccggcctgccaggtctctgggccttcagcgcgggtcctggtgctgcggccacaccaccctggggtgctcattgacagagctgccataatgaacttgaaaggacgggaatcacgagggaagctggggctcccctgcccacaggagaggatccccgttcttcaagcttctctgctcagtgtctactaacgaccgacatttgctaatgtaaataatagtaaattattgagaattctaattcttttacacagtctgtttttaatctattttaattaaataaaatctatgactct

SEQ ID NO: 172579 - DNA, 1974 bp, Homo sapiens
  Payload ID: 13932
  Gene Symbol: PXK
  Gene Name: PX domain containing serine/threonine kinase
  ENST ID: ENST00000302779
  CDS Start-End: 110-1783
ggggcggcgcgtgttgacagcggcggcggtggaaccgggcgggcggcgggagtcggcgcctcgggttcctacctcgcgtccctaggcggcggcggccgggcgtcccgggatggccttcatggagaagccgccagccggcaaggtgctgctggacgacacggtgccgctgacagcagccatcgaggcgagccagagcctgcagtcccacacggaatatattattcgagtgcaaagaggaatttctgtggaaaacagctggcagattgttagaagatacagtgactttgatttgcttaacaacagcttacagattgcaggcctaagtctacctcttcctcccaaaaaattgattggtaacatggatcgtgaattcatagctgaaaggcagaaaggtcttcagaactatctcaacgtgatcacaacaaatcatatcttgtctaattgtgagctggttaagaagtttttagatccaaacaactattccgcaaactatactgagattgccttgcaacaggtttccatgttcttccgatcagaaccaaagtgggaggtggtggaacctttgaaagacataggttggagaataaggaagaaatatttcttgatgaagattaaaaatcagccaaaggaacggctagtgttaagctgggctgaccttggcccagacaagtatttgtcagataaagattttcagtgtctaatcaaacttctgccttcttgtttgcacccttacatctatcgggttacctttgccacagctaatgaatcctcagcgttgctaattaggatgtttaacgaaaagggaacattgaaggatctgatctacaaggcaaaaccaaaagacccatttctaaagaagtactgcaaccctaagaagattcagggcctggaactccagcaaataaaaacatatggacggcaaatattagaggtactgaagtttcttcatgacaagggattcccttatgggcatcttcacgcctccaatgtgatgctcgatggggacacttgccggctgctggaccttgagaattccttattgggcctgccttccttctaccgatcttatttttcacaattcaggaaaatcaatacattggaaagtgtggatgtccactgctttggccacttactgtatgaaatgacttatggacgaccgccagactcggtgcctgtggactccttccctcctgccccgtccatggctgtggtggccgtgttggagtctacgctgtcttgtgaagcctgtaaaaatggcatgcctaccatctcccggctcttacagatgccattattcagcgatgttttactaaccacttctgaaaaaccacagtttaagatccctacaaagttaaaagaggcattgagaattgccaaagaatgtatagagaagagactaattgaggaacagaaacagattcaccagcatcgaagactgacaagagctcagtcccaccatggatctgaggaggaaagaaaaaaaagaaagattttagctcgaaagaagtcaaaacgatctgctcttgaaaatagtgaagagcattcagcgaagtacagcaactccaataattcagggatatctgcattacctccacctcctccacctccaccaccaccagcagctcccttgcctcctgcgagcaccgaggcacctgcccagctctcgtctcaggctgtgaatggcatgagccgaggggccttgctcagctccatccagaatttccaaaaaggaactttgaggaaagccaaaacctgtgatcacagtgctccgaagatcggctgaagcttcctgtttacacttggagggaaaagttcttttttattcctactcacccctaccccccaaactaccctcttcctgggaaagtaattgctgagccagtacagccacaaacagtactattttgcagatgctcatgtaagcagcttttcgagagaaataattctttaagcagaataaagttaggctggcat

SEQ ID NO: 172580 - DNA, 2037 bp, Homo sapiens
  Payload ID: 13932
  Gene Symbol: PXK
  Gene Name: PX domain containing serine/threonine kinase
  Uniprot ID: Q7Z7A4
  ENST ID: ENST00000356151
  CDS Start-End: 110-1846
ggggcggcgcgtgttgacagcggcggcggtggaaccgggcgggcggcgggagtcggcgcctcgggttcctacctcgcgtccctaggcggcggcggccgggcgtcccgggatggccttcatggagaagccgccagccggcaaggtgctgctggacgacacggtgccgctgacagcagccatcgaggcgagccagagcctgcagtcccacacggaatatattattcgagtgcaaagaggaatttctgtggaaaacagctggcagattgttagaagatacagtgactttgatttgcttaacaacagcttacagattgcaggcctaagtctacctcttcctcccaaaaaattgattggtaacatggatcgtgaattcatagctgaaaggcagaaaggtcttcagaactatctcaacgtgatcacaacaaatcatatcttgtctaattgtgagctggttaagaagtttttagatccaaacaactattccgcaaactatactgagattgccttgcaacaggtttccatgttcttccgatcagaaccaaagtgggaggtggtggaacctttgaaagacataggttggagaataaggaagaaatatttcttgatgaagattaaaaatcagccaaaggaacggctagtgttaagctgggctgaccttggcccagacaagtatttgtcagataaagattttcagtgtctaatcaaacttctgccttcttgtttgcacccttacatctatcgggttacctttgccacagctaatgaatcctcagcgttgctaattaggatgtttaacgaaaagggaacattgaaggatctgatctacaaggcaaaaccaaaagacccatttctaaagaagtactgcaaccctaagaagattcagggcctggaactccagcaaataaaaacatatggacggcaaatattagaggtactgaagtttcttcatgacaagggattcccttatgggcatcttcacgcctccaatgtgatgctcgatggggacacttgccggctgctggaccttgagaattccttattgggcctgccttccttctaccgatcttatttttcacaattcaggaaaatcaatacattggaaagtgtggatgtccactgctttggccacttactgtatgaaatgacttatggacgaccgccagactcggtgcctgtggactccttccctcctgccccgtccatggctgtggtggccgtgttggagtctacgctgtcttgtgaagcctgtaaaaatggcatgcctaccatctcccggctcttacagatgccattattcagcgatgttttactaaccacttctgaaaaaccacagtttaagatccctacaaagttaaaagaggcattgagaattgccaaagaatgtatagagaagagactaattgaggaacagaaacagattcaccagcatcgaagactgacaagagctcagtcccaccatggatctgaggaggaaagaaaaaaaagaaagattttagctcgaaagaagtcaaaacgatctgctcttgaaaatagtgaagagcattcagcgaagtacagcaactccaataattcagcaggatctggggccagctcacctctcacgtccccgtcatcgccaactccaccctctacatcagggatatctgcattacctccacctcctccacctccaccaccaccagcagctcccttgcctcctgcgagcaccgaggcacctgcccagctctcgtctcaggctgtgaatggcatgagccgaggggccttgctcagctccatccagaatttccaaaaaggaactttgaggaaagccaaaacctgtgatcacagtgctccgaagatcggctgaagcttcctgtttacacttggagggaaaagttcttttttattcctactcacccctaccccccaaactaccctcttcctgggaaagtaattgctgagccagtacagccacaaacagtactattttgcagatgctcatgtaagcagcttttcgagagaaataattctttaagcagaataaagttaggctggcat

SEQ ID NO: 172581 - DNA, 1756 bp, Homo sapiens
  Payload ID: 13932
  Gene Symbol: PXK
  Gene Name: PX domain containing serine/threonine kinase
  ENST ID: ENST00000383715
  CDS Start-End: 87-1583
cggcggtggaaccgggcgggcggcgggagtcggcgcctcgggttcctacctcgcgtccctaggcggcggcggccgggcgtcccgggatggccttcatggagaagccgccagccggcaaggtgctgctggacgacacggtgccgctgacagcagccatcgaggcgagccagagcctgcagtcccacacgattgttagaagatacagtgactttgatttgcttaacaacagcttacagattgcaggcctaagtctacctcttcctcccaaaaaattgattggtaacatggatcgtgaattcatagctgaaaggcagaaaggtcttcagaactatctcaacgtgatcacaacaaatcatatcttgtctaattgtgagctggttaagaagtttttagatccaaacaactattccgcaaactatactgagattgccttgcaacaggtttccatgttcttccgatcagaaccaaagtgggaggtggtggaacctttgaaagacataggttggagaataaggaagaaatatttcttgatgaagattaaaaatcagccaaaggaacggctagtgttaagctgggctgaccttggcccagacaagtatttgtcagataaagattttcagtgtctaatcaaacttctgccttcttgtttgcacccttacatctatcgggttacctttgccacagctaatgaatcctcagcgttgctaattaggatgtttaacgaaaagggaacattgaaggatctgatctacaaggcaaaaccaaaagacccatttctaaagaagtactgcaaccctaagaagattcagggcctggaactccagcaaataaaaacatatggacggcaaatattagaggtactgaagtttcttcatgacaagggattcccttatgggcatcttcacgcctccaatgtgatgctcgatggggacacttgccggctgctggaccttgagaattccttattgggcctgccttccttctaccgatcttatttttcacaattcaggaaaatcaatacattggaaagtgtggatgtccactgctttggccacttactgtatgaaatgacttatggacgaccgccagactcggtgcctgtggactccttccctcctgccccgtccatggctgtggtggccgtgttggagtctacgctgtcttgtgaagcctgtaaaaatggcatgcctaccatctcccggctcttacagatgccattattcagcgatgttttactaaccacttctgaaaaaccacagtttaagatccctacaaagttaaaagaggcattgagaattgccaaagaatgtatagagaagagactaattgaggaacagaaacagattcaccagcatcgaagactgacaagagctcagtcccaccatggatctgaggaggaaagaaaaaaaagaaagattttagctcgaaagaagtcaaaacgatctgctcttgaaaatagtgaagagcattcagcgaagtacagcaactccaataattcagcaggatctggggccagctcacctctcacgtccccgtcatcgccaactccaccctctacatcagtagagcatgcaccattttgaacgtgaattttcggtaaagtaaactatgctgatttctcagactttaaagatgctctgtttctgtgtgtgaaataggacccaaagtgtctcgattgctgaagtgatgaacaagtgggaaagcagatttgagactatttccttatctgaatatttaaatgaaatacagcatcttt

SEQ ID NO: 172582 - DNA, 3035 bp, Homo sapiens
  Payload ID: 13932
  Gene Symbol: PXK
  Gene Name: PX domain containing serine/threonine kinase
  Uniprot ID: Q7Z7A4
  ENST ID: ENST00000383716
  CDS Start-End: 100-1647
gtgttgacagcggcggcggtggaaccgggcgggcggcgggagtcggcgcctcgggttcctacctcgcgtccctaggcggcggcggccgggcgtcccgggatggccttcatggagaagccgccagccggcaaggtgctgctggacgacacggtgccgctgacagcagccatcgaggcgagccagagcctgcagtcccacacggaatatattattcgagtgcaaagaggaatttctgtggaaaacagctggcagattgttagaagatacagtgactttgatttgcttaacaacagcttacagattgcaggcctaagtctacctcttcctcccaaaaaattgattggtaacatggatcgtgaattcatagctgaaaggcagaaaggtcttcagaactatctcaacgtgatcacaacaaatcatatcttgtctaattgtgagctggttaagaagtttttagatccaaacaactattccgcaaactatactgagattgccttgcaacaggtttccatgttcttccgatcagaaccaaagtgggaggtggtggaacctttgaaagacataggttggagaataaggaagaaatatttcttgatgaagattaaaaatcagccaaaggaacggctagtgttaagctgggctgaccttggcccagacaagtatttgtcagataaagattttcagtgtctaatcaaacttctgccttcttgtttgcacccttacatctatcgggttacctttgccacagctaatgaatcctcagcgttgctaattaggatgtttaacgaaaagggaacattgaaggatctgatctacaaggcaaaaccaaaagacccatttctaaagaagtactgcaaccctaagaagattcagggcctggaactccagcaaataaaaacatatggacggcaaatattagaggtactgaagtttcttcatgacaagggattcccttatgggcatcttcacgcctccaatgtgatgctcgatggggacacttgccggctgctggaccttgagaattccttattgggcctgccttccttctaccgatcttatttttcacaattcaggaaaatcaatacattggaaagtgtggatgtccactgctttggccacttactgtatgaaatgacttatggacgaccgccagactcggtgcctgtggactccttccctcctgccccgtccatggctgtggtggccgtgttggagtctacgctgtcttgtgaagcctgtaaaaatggcatgcctaccatctcccggctcttacagatgccattattcagcgatgttttactaaccacttctgaaaaaccacagtttaagatccctacaaagttaaaagaggcattgagaattgccaaagaatgtatagagaagagactaattgaggaacagaaacagattcaccagcatcgaagactgacaagagctcagtcccaccatggatctgaggaggaaagaaaaaaaagaaagattttagctcgaaagaagtcaaaacgatctgctcttgaaaatagtgaagagcattcagcgaagtacagcaactccaataattcagcaggatctggggccagctcacctctcacgtccccgtcatcgccaactccaccctctacatcagtagagcatgcaccattttgaacgtgaattttcgggatatctgcattacctccacctcctccacctccaccaccaccagcagctcccttgcctcctgcgagcaccgaggcacctgcccagctctcgtctcaggctgtgaatggcatgagccgaggggccttgctcagctccatccagaatttccaaaaaggaactttgaggaaagccaaaacctgtgatcacagtgctccgaagatcggctgaagcttcctgtttacacttggagggaaaagttcttttttattcctactcacccctaccccccaaactaccctcttcctgggaaagtaattgctgagccagtacagccacaaacagtactattttgcagatgctcatgtaagcagcttttcgagagaaataattctttaagcagaataaagttaggctggcattgctcccttaagatcttgctcctttattaaccctgtaaaggagtcttgtttatcctctaatggccaggcttttgggacagcagcatattgaaatattttcaccaactaaaggaaatagacagaaaaacaatgacaatattcaatcacagcagtaaatggcctttgtgttgcaatcccttctaccccatcagacagctcctagaaacattcctcttacagttcatttctctaaagcattttctgattcttagataactccaatttttgctacctttatcttagacattaacactatagcccaaagcatagttactttgctaaatcagaaagcaactgagttctttgttttctcctcaaatagaatggggaacgttcacaacattctcttaagttctaacaggaataccattgtggttatagaactcagggctgctaaagcaactactctagacccatagttctttttagttagatgtattgaaacagacaaaaatattaacatcagaaaaagctcttgccaattagaggatcttcttaatcctcagcaattaagtttggggtttgaggggggcaggtcattgttacaacagaagtaaatttggcatctatagaaatcaattatgatttttgaaagatttatctaaatatatcaatatagcatctctttaatgttagtcatttattagaaagatcctttatcctgatttgcttaaacctttcaataaattgcactttaaaggattataaataatccatttaaaaattcaagtacacacatcagtgttggttactatgcagagaatgtcattgtgtatagtttcatgtaatctgttatgtcagctgtattttttattaaaatcatgtcaagaaaacgtgttgtctgtagcttgacaagatatttcaaatgagaactttttgtagcgtctgttgttagcaaagaatagattcacacagtctaaggtttccttcctacct

SEQ ID NO: 172583 - DNA, 1653 bp, Homo sapiens
  Payload ID: 13932
  Gene Symbol: PXK
  Gene Name: PX domain containing serine/threonine kinase
  ENST ID: ENST00000468776
  CDS Start-End: 105-275
ggcgcgtgttgacagcggcggcggtggaaccgggcgggcggcgggagtcggcgcctcgggttcctacctcgcgtccctaggcggcggcggccgggcgtcccgggatggccttcatggagaagccgccagccggcaaggtgctgctggacgacacggtgccgctgacagcagccatcgaggcgagccagagcctgcagtcccacacgagattgccttgcaacaggtttccatgttcttccgatcagaaccaaagtgggaggtggtggaacctttgaaagacataggttggagaataaggaagaaatatttcttgatgaagattaaaaatcagccaaaggaacggctagtgttaagctgggctgaccttggcccagacaagtatttgtcagataaagattttcagtgtctaatcaaacttctgccttcttgtttgcacccttacatctatcgggttacctttgccacagctaatgaatcctcagcgttgctaattaggatgtttaacgaaaagggaacattgaaggatctgatctacaaggcaaaaccaaaagacccatttctaaagaagtactgcaaccctaagaagattcagggcctggaactccagcaaataaaaacatatggacggcaaatattagaggtactgaagtttcttcatgacaagggattcccttatgggcatcttcacgcctccaatgtgatgctcgatggggacacttgccggctgctggaccttgagaattccttattgggcctgccttccttctaccgatcttatttttcacaattcaggaaaatcaatacattggaaagtgtggatgtccactgctttggccacttactgtatgaaatgacttatggacgaccgccagactcggtgcctgtggactccttccctcctgccccgtccatggctgtggtggccgtgttggagtctacgctgtcttgtgaagcctgtaaaaatggcatgcctaccatctcccggctcttacagatgccattattcagcgatgttttactaaccacttctgaaaaaccacagtttaagatccctacaaagttaaaagaggcattgagaattgccaaagaatgtatagagaagagactaattgaggaacagaaacagattcaccagcatcgaagactgacaagagctcagtcccaccatggatctgaggaggaaagaaaaaaaagaaagattttagctcgaaagaagtcaaaacgatctgctcttgaaaatagtgaagagcattcagcgaagtacagcaactccaataattcagcaggatctggggccagctcacctctcacgtccccgtcatcgccaactccaccctctacatcagggatatctgcattacctccacctcctccacctccaccaccaccagcagctcccttgcctcctgcgagcaccgaggcacctgcccagctctcgtctcaggctgtgaatggcatgagccgaggggccttgctcagctccatccagaatttccaaaaaggaactttgaggaaagccaaaacctgtgatcacagtgctccgaagatcggctgaagcttcctgtttacacttggagggaaaagttcttttttattcctactcacccctaccccccaaactaccctcttcctgggaaagtaattgctgagcca

SEQ ID NO: 172584 - DNA, 2825 bp, Homo sapiens
  Payload ID: 13932
  Gene Symbol: PXK
  Gene Name: PX domain containing serine/threonine kinase
  ENST ID: ENST00000463280
  CDS Start-End: 92-1540
agcggcggcggtggaaccgggcgggcggcgggagtcggcgcctcgggttcctacctcgcgtccctaggcggcggcggccgggcgtcccgggatggccttcatggagaagccgccagccggcaaggtgctgctggacgacacggtgccgctgacagcagccatcgaggcgagccagagcctgcagtcccacacgattgcaggcctaagtctacctcttcctcccaaaaaattgattggtaacatggatcgtgaattcatagctgaaaggcagaaaggtcttcagaactatctcaacgtgatcacaacaaatcatatcttgtctaattgtgagctggttaagaagtttttagatccaaacaactattccgcaaactatactgagattgccttgcaacaggtttccatgttcttccgatcagaaccaaagtgggaggtggtggaacctttgaaagacataggttggagaataaggaagaaatatttcttgatgaagattaaaaatcagccaaaggaacggctagtgttaagctgggctgaccttggcccagacaagtatttgtcagataaagattttcagtgtctaatcaaacttctgccttcttgtttgcacccttacatctatcgggttacctttgccacagctaatgaatcctcagcgttgctaattaggatgtttaacgaaaagggaacattgaaggatctgatctacaaggcaaaaccaaaagacccatttctaaagaagtactgcaaccctaagaagattcagggcctggaactccagcaaataaaaacatatggacggcaaatattagaggtactgaagtttcttcatgacaagggattcccttatgggcatcttcacgcctccaatgtgatgctcgatggggacacttgccggctgctggaccttgagaattccttattgggcctgccttccttctaccgatcttatttttcacaattcaggaaaatcaatacattggaaagtgtggatgtccactgctttggccacttactgtatgaaatgacttatggacgaccgccagactcggtgcctgtggactccttccctcctgccccgtccatggctgtggtggccgtgttggagtctacgctgtcttgtgaagcctgtaaaaatggcatgcctaccatctcccggctcttacagatgccattattcagcgatgttttactaaccacttctgaaaaaccacagtttaagatccctacaaagttaaaagaggcattgagaattgccaaagaatgtatagagaagagactaattgaggaacagaaacagattcaccagcatcgaagactgacaagagctcagtcccaccatggatctgaggaggaaagaaaaaaaagaaagattttagctcgaaagaagtcaaaacgatctgctcttgaaaatagtgaagagcattcagcgaagtacagcaactccaataattcagcaggatctggggccagctcacctctcacgtccccgtcatcgccaactccaccctctacatcagtagagcatgcaccattttgaacgtgaattttcgggatatctgcattacctccacctcctccacctccaccaccaccagcagctcccttgcctcctgcgagcaccgaggcacctgcccagctctcgtctcaggctgtgaatggcatgagccgaggggccttgctcagctccatccagaatttccaaaaaggaactttgaggaaagccaaaacctgtgatcacagtgctccgaagatcggctgaagcttcctgtttacacttggagggaaaagttcttttttattcctactcacccctaccccccaaactaccctcttcctgggaaagtaattgctgagccagtacagccacaaacagtactattttgcagatgctcatgtaagcagcttttcgagagaaataattctttaagcagaataaagttaggctggcattgctcccttaagatcttgctcctttattaaccctgtaaaggagtcttgtttatcctctaatggccaggcttttgggacagcagcatattgaaatattttcaccaactaaaggaaatagacagaaaaacaatgacaatattcaatcacagcagtaaatggcctttgtgttgcaatcccttctaccccatcagacagctcctagaaacattcctcttacagttcatttctctaaagcattttctgattcttagataactccaatttttgctacctttatcttagacattaacactatagcccaaagcatagttactttgctaaatcagaaagcaactgagttctttgttttctcctcaaatagaatggggaacgttcacaacattctcttaagttctaacaggaataccattgtggttatagaactcagggctgctaaagcaactactctagacccatagttctttttagttagatgtattgaaacagacaaaaatattaacatcagaaaaagctcttgccaattagaggatcttcttaatcctcagcaattaagtttggggtttgaggggggcaggtcattgttacaacagaagtaaatttggcatctatagaaatcaattatgatttttgaaagatttatctaaatatatcaatatagcatctctttaatgttagtcatttattagaaagatcctttatcctgatttgcttaaacctttcaataaattgcactttaaaggattataaataatccatttaaaaattcaagtacacacatcagtgttggttactatgcagagaatgtcattgtgtatagtttcatgtaatctgttatgtcagctgtattttttattaaaatcatgtcaagaaaa

SEQ ID NO: 172585 - DNA, 2031 bp, Homo sapiens
  Payload ID: 13932
  Gene Symbol: PXK
  Gene Name: PX domain containing serine/threonine kinase
  Uniprot ID: Q7Z7A4
  ENST ID: ENST00000484288
  CDS Start-End: 79-1626
gaaccgggcgggcggcgggagtcggcgcctcgggttcctacctcgcgtccctaggcggcggcggccgggcgtcccgggatggccttcatggagaagccgccagccggcaaggtgctgctggacgacacggtgccgctgacagcagccatcgaggcgagccagagcctgcagtcccacacggaatatattattcgagtgcaaagaggaatttctgtggaaaacagctggcagattgttagaagatacagtgactttgatttgcttaacaacagcttacagattgcaggcctaagtctacctcttcctcccaaaaaattgattggtaacatggatcgtgaattcatagctgaaaggcagaaaggtcttcagaactatctcaacgtgatcacaacaaatcatatcttgtctaattgtgagctggttaagaagtttttagatccaaacaactattccgcaaactatactgagattgccttgcaacaggtttccatgttcttccgatcagaaccaaagtgggaggtggtggaacctttgaaagacataggttggagaataaggaagaaatatttcttgatgaagattaaaaatcagccaaaggaacggctagtgttaagctgggctgaccttggcccagacaagtatttgtcagataaagattttcagtgtctaatcaaacttctgccttcttgtttgcacccttacatctatcgggttacctttgccacagctaatgaatcctcagcgttgctaattaggatgtttaacgaaaagggaacattgaaggatctgatctacaaggcaaaaccaaaagacccatttctaaagaagtactgcaaccctaagaagattcagggcctggaactccagcaaataaaaacatatggacggcaaatattagaggtactgaagtttcttcatgacaagggattcccttatgggcatcttcacgcctccaatgtgatgctcgatggggacacttgccggctgctggaccttgagaattccttattgggcctgccttccttctaccgatcttatttttcacaattcaggaaaatcaatacattggaaagtgtggatgtccactgctttggccacttactgtatgaaatgacttatggacgaccgccagactcggtgcctgtggactccttccctcctgccccgtccatggctgtggtggccgtgttggagtctacgctgtcttgtgaagcctgtaaaaatggcatgcctaccatctcccggctcttacagatgccattattcagcgatgttttactaaccacttctgaaaaaccacagtttaagatccctacaaagttaaaagaggcattgagaattgccaaagaatgtatagagaagagactaattgaggaacagaaacagattcaccagcatcgaagactgacaagagctcagtcccaccatggatctgaggaggaaagaaaaaaaagaaagattttagctcgaaagaagtcaaaacgatctgctcttgaaaatagtgaagagcattcagcgaagtacagcaactccaataattcagcaggatctggggccagctcacctctcacgtccccgtcatcgccaactccaccctctacatcagtagagcatgcaccattttgaacgtgaattttcggtaaagtaaactatgctgatttctcagactttaaagatgctctgtttctgtgtgtgaaataggacccaaagtgtctcgattgctgaagtgatgaacaagtgggaaagcagatttgagactatttccttatctgaatatttaaatgaaatacagcatctttaaaaagcacccagtgacttcatctatattcatttcattttcatcatgaccttcaaaatcttcattttcactctgatttcagttttaaaatacagctctaaaacctgcaaatcaactgcatggcattttggtatattttaattttggaaaccataactctcaaagtcccgttgctgcaaaaatgttgattcctagttactctgatgaagaggaaagagtgttaggcacttgag

SEQ ID NO: 172586 - DNA, 1852 bp, Homo sapiens
  Payload ID: 13932
  Gene Symbol: PXK
  Gene Name: PX domain containing serine/threonine kinase
  ENST ID: ENST00000479134
  CDS Start-End: 1-938
catttctaaagaagtactgcaaccctaagaagattcagggcctggaactccagcaaataaaaacatatggacggcaaatattagaggtactgaagtttcttcatgacaagggattcccttatgggcatcttcacgcctccaatgtgatgctcgatggggacacttgccggctgctggaccttgagaattccttattgggcctgccttccttctaccgatcttatttttcacaattcaggaaaatcaatacattggaaagtgtggatgtccactgctttggccacttactgtatgaaatgacttatggacgaccgccagactcggtgcctgtggactccttccctcctgccccgtccatggctgtggtggccgtgttggagtctacgctgtcttgtgaagcctgtaaaaatggcatgcctaccatctcccggctcttacagatgccattattcagcgatgttttactaaccacttctgaaaaaccacagtttaagatccctacaaagttaaaagaggcattgagaattgccaaagaatgtatagagaagagactaattgaggaacagaaacagattcaccagcatcgaagactgacaagagctcagtcccaccatggatctgaggaggaaagaaaaaaaagaaagattttagctcgaaagaagtcaaaacgatctgctcttgaaaatagtgaagagcattcagcgaagtacagcaactccaataattcagggatatctgcattacctccacctcctccacctccaccaccaccagcagctcccttgcctcctgcgagcaccgaggcacctgcccagctctcgtctcaggctgtgaatggcatgagccgaggggccttgctcagctccatccagaatttccaaaaaggaactttgaggaaagccaaaacctgtgatcacagtgctccgaagatcggctgaagcttcctgtttacacttggagggaaaagttcttttttattcctactcacccctaccccccaaactaccctcttcctgggaaagtaattgctgagccagtacagccacaaacagtactattttgcagatgctcatgtaagcagcttttcgagagaaataattctttaagcagaataaagttaggctggcattgctcccttaagatcttgctcctttattaaccctgtaaaggagtcttgtttatcctctaatggccaggcttttgggacagcagcatattgaaatattttcaccaactaaaggaaatagacagaaaaacaatgacaatattcaatcacagcagtaaatggcctttgtgttgcaatcccttctaccccatcagacagctcctagaaacattcctcttacagttcatttctctaaagcattttctgattcttagataactccaatttttgctacctttatcttagacattaacactatagcccaaagcatagttactttgctaaatcagaaagcaactgagttctttgttttctcctcaaatagaatggggaacgttcacaacattctcttaagttctaacaggaataccattgtggttatagaactcagggctgctaaagcaactactctagacccatagttctttttagttagatgtattgaaacagacaaaaatattaacatcagaaaaagctcttgccaattagaggatcttcttaatcctcagcaattaagtttggggtttgaggggggcaggtcattgttacaacagaagtaaatttggcatctatagaaatcaattatgatttttgaaagatttatctaaatatatcaatatagcatctctttaatgttagtcatttattagaaagatcctttatcctgatttgcttaaacctttcaat

SEQ ID NO: 172587 - DNA, 437 bp, Homo sapiens
  Payload ID: 13932
  Gene Symbol: PXK
  Gene Name: PX domain containing serine/threonine kinase
  ENST ID: ENST00000495557
  CDS Start-End: 1-257
gactaattgaggaacagaaacagattcaccagcatcgaagactgacaagagctcagtcccaccatggatctgaggaggaaagaaaaaaaagaaagattttagctcgaaagaagtcaaaacgatctgctcttgaaaatagtgaagagcattcagcgaagtacagcaactccaataattcaggatctggggccagctcacctctcacgtccccgtcatcgccaactccaccctctacatcagagcatgcaccattttgaacgtgaattttcggtaaagtaaactatgctgatttctcagactttaaagatgctctgtttctgtgtgtgaaataggacccaaagtgtctcgattgctgaagtgatgaacaagtgggaaagcagatttgagactatttccttatctgaatatttaaatgaaatacagcatctttaaaaagc

SEQ ID NO: 172588 - DNA, 583 bp, Homo sapiens
  Payload ID: 13932
  Gene Symbol: PXK
  Gene Name: PX domain containing serine/threonine kinase
  ENST ID: ENST00000491164
  CDS Start-End: 245-583
accgcagctcccggcgccgcggggtggaaggagctcggcggcgaccaggaaagcgactccgagttggggggcgggggcgggggctgcgggattcccgggctcaccttggactaggggagcaggaacgagaccgctcaggaccatccacttctgcccgccgccagccttttcctttttgaggccgtgtaatttcctccttgcagctgagggtctgggtgatggggatgagggtgtgccgggccaaatgaagtgtgactccagagcctacttgttgggacagcagagtgtaagtggctggggtctgcagccccgtttccaggaatatattattcgagtgcaaagaggaatttctgtggaaaacagctggcagattgttagaagatacagtgactttgatttgcttaacaacagcttacagattgcaggcctaagtctacctcttcctcccaaaaaattgattggtaacatggatcgtgaattcatagctgaaaggcagaaaggtcttcagaactatctcaacgtgatcacaacaaatcatatcttgtctaattgtgagctggttaagaagtttttagatccaaac

SEQ ID NO: 172589 - DNA, 590 bp, Homo sapiens
  Payload ID: 13932
  Gene Symbol: PXK
  Gene Name: PX domain containing serine/threonine kinase
  ENST ID: ENST00000493474
  CDS Start-End: 1-153
aagaagtcaaaacgatctgctcttgaaaatagtgaagagcattcagcgaagtacagcaactccaataattcaggatctggggccagctcacctctcacgtccccgtcatcgccaactccaccctctacatcagtagagcatgcaccattttgaacgtgaattttcgggatatctgcattacctccacctcctccacctccaccaccaccagcagctcccttgcctcctgcgagcaccgaggcacctgcccagctctcgtctcaggctgtgaatggcatgagccgaggggccttgctcagctccatccagaatttccaaaaaggaactttgaggaaagccaaaacctgtgatcacagtgctccgaagatcggctgaagcttcctgtttacacttggagggaaaagttcttttttattcctactcacccctaccccccaaactaccctcttcctgggaaagtaattgctgagccagtacagccacaaacagtactattttgcagatgctcatgtaagcagcttttcgagagaaataattctttaagcagaataaagttaggctggcattgctcccttaagatcttgctcctt

SEQ ID NO: 172590 - DNA, 2817 bp, Homo sapiens
  Payload ID: 13932
  Gene Symbol: PXK
  Gene Name: PX domain containing serine/threonine kinase
  ENST ID: ENST00000479241
  CDS Start-End: 42-1733
ctacctcgcgtccctaggcggcggcggccgggcgtcccgggatggccttcatggagaagccgccagccggcaaggtgctgctggacgacacggtgccgctgacagcagccatcgaggcgagccagagcctgcagtcccacacgattgttagaagatacagtgactttgatttgcttaacaacagcttacagattgcaggcctaagtctacctcttcctcccaaaaaattgattggtaacatggatcgtgaattcatagctgaaaggcagaaaggtcttcagaactatctcaacgtgatcacaacaaatcatatcttgtctaattgtgagctggttaagaagtttttagatccaaacaactattccgcaaactatactgagattgccttgcaacaggtttccatgttcttccgatcagaaccaaagtgggaggtggtggaacctttgaaagacataggttggagaataaggaagaaatatttcttgatgaagattaaaaatcagccaaaggaacggctagtgttaagctgggctgaccttggcccagacaagtatttgtcagataaagattttcagtgtctaatcaaacttctgccttcttgtttgcacccttacatctatcgggttacctttgccacagctaatgaatcctcagcgttgctaattaggatgtttaacgaaaagggaacattgaaggatctgatctacaaggcaaaaccaaaagacccatttctaaagaagtactgcaaccctaagaagattcagggcctggaactccagcaaataaaaacatatggacggcaaatattagaggtactgaagtttcttcatgacaagggattcccttatgggcatcttcacgcctccaatgtgatgctcgatggggacacttgccggctgctggaccttgagaattccttattgggcctgccttccttctaccgatcttatttttcacaattcaggaaaatcaatacattggaaagtgtggatgtccactgctttggccacttactgtatgaaatgacttatggacgaccgccagactcggtgcctgtggactccttccctcctgccccgtccatggctgtggtggccgtgttggagtctacgctgtcttgtgaagcctgtaaaaatggcatgcctaccatctcccggctcttacagatgccattattcagcgatgttttactaaccacttctgaaaaaccacagtttaagatccctacaaagttaaaagaggcattgagaattgccaaagaatgtatagagaagagactaattgaggaacagaaacagattcaccagcatcgaagactgacaagagctcagtcccaccatggatctgaggaggaaagaaaaaaaagaaagattttagctcgaaagaagtcaaaacgatctgctcttgaaaatagtgaagagcattcagcgaagtacagcaactccaataattcaggatctggggccagctcacctctcacgtccccgtcatcgccaactccaccctctacatcagctgccttaggtttgagtaaaagatgtaaagaaagggatatctgcattacctccacctcctccacctccaccaccaccagcagctcccttgcctcctgcgagcaccgaggcacctgcccagctctcgtctcaggctgtgaatggcatgagccgaggggccttgctcagctccatccagaatttccaaaaaggaactttgaggaaagccaaaacctgtgatcacagtgctccgaagatcggctgaagcttcctgtttacacttggagggaaaagttcttttttattcctactcacccctaccccccaaactaccctcttcctgggaaagtaattgctgagccagtacagccacaaacagtactattttgcagatgctcatgtaagcagcttttcgagagaaataattctttaagcagaataaagttaggctggcattgctcccttaagatcttgctcctttattaaccctgtaaaggagtcttgtttatcctctaatggccaggcttttgggacagcagcatattgaaatattttcaccaactaaaggaaatagacagaaaaacaatgacaatattcaatcacagcagtaaatggcctttgtgttgcaatcccttctaccccatcagacagctcctagaaacattcctcttacagttcatttctctaaagcattttctgattcttagataactccaatttttgctacctttatcttagacattaacactatagcccaaagcatagttactttgctaaatcagaaagcaactgagttctttgttttctcctcaaatagaatggggaacgttcacaacattctcttaagttctaacaggaataccattgtggttatagaactcagggctgctaaagcaactactctagacccatagttctttttagttagatgtattgaaacagacaaaaatattaacatcagaaaaagctcttgccaattagaggatcttcttaatcctcagcaattaagtttggggtttgaggggggcaggtcattgttacaacagaagtaaatttggcatctatagaaatcaattatgatttttgaaagatttatctaaatatatcaatatagcatctctttaatgttagtcatttattagaaagatcctttatcctgatttgcttaaacctttcaataaattgcactttaaaggattataaataatccatttaaaaattcaagtacacacatcagtgttggttactatgcagagaatgtcattgtgtatagtttcatgtaatctgttatgtcagctgtattttttattaaaatcatgtcaag

SEQ ID NO: 172591 - DNA, 1610 bp, Homo sapiens
  Payload ID: 13932
  Gene Symbol: PXK
  Gene Name: PX domain containing serine/threonine kinase
  ENST ID: ENST00000477308
  CDS Start-End: 3-428
ggatggccttcatggagaagccgccagccggcaaggtgctgctggacgacacggtgccgctgacagcagccatcgaggcgagccagagcctgcagtcccacacggaatatattattcgagtgcaaagaggaatttctgtggaaaacagctggcagattgttagaagatacagtgactttgatttgcttaacaacagcttacagattgcaggcctaagtctacctcttcctcccaaaaaattgattggtaacatggatcgtgaattcatagctgaaaggcagaaaggtcttcagaactatctcaacgtgatcacaacaaatcatatcttgtctaattgtgagctggttaagaagtttttagatccaaacaactattccgcaaactatactgcacccttacatctatcgggttacctttgccacagctaatgaatcctcagcgttgctaattaggatgtttaacgaaaagggaacattgaaggatctgatctacaaggcaaaaccaaaagacccatttctaaagaagtactgcaaccctaagaagattcagggcctggaactccagcaaataaaaacatatggacggcaaatattagaggtactgaagtttcttcatgacaagggattcccttatgggcatcttcacgcctccaatgtgatgctcgatggggacacttgccggctgctggaccttgagaattccttattgggcctgccttccttctaccgatcttatttttcacaattcaggaaaatcaatacattggaaagtgtggatgtccactgctttggccacttactgtatgaaatgacttatggacgaccgccagactcggtgcctgtggactccttccctcctgccccgtccatggctgtggtggccgtgttggagtctacgctgtcttgtgaagcctgtaaaaatggcatgcctaccatctcccggctcttacagatgccattattcagcgatgttttactaaccacttctgaaaaaccacagtttaagatccctacaaagttaaaagaggcattgagaattgccaaagaatgtatagagaagagactaattgaggaacagaaacagattcaccagcatcgaagactgacaagagctcagtcccaccatggatctgaggaggaaagaaaaaaaagaaagattttagctcgaaagaagtcaaaacgatctgctcttgaaaatagtgaagagcattcagcgaagtacagcaactccaataattcagcaggatctggggccagctcacctctcacgtccccgtcatcgccaactccaccctctacatcagggatatctgcattacctccacctcctccacctccaccaccaccagcagctcccttgcctcctgcgagcaccgaggcacctgcccagctctcgtctcaggctgtgaatggcatgagccgaggggccttgctcagctccatccagaatttccaaaaaggaactttgaggaaagccaaaacctgtgatcacagtgctccgaagatcggctgaagcttcctgtttacacttggagggaaaagttcttttttattcctactcacccctaccccccaaactaccctcttcctgggaaagtaattgctgagcca

SEQ ID NO: 172592 - DNA, 2171 bp, Homo sapiens
  Payload ID: 13932
  Gene Symbol: PXK
  Gene Name: PX domain containing serine/threonine kinase
  ENST ID: ENST00000459676
  CDS Start-End: 1-612
aattccttattgggcctgccttccttctaccgatcttatttttcacaattcaggaaaatcaatacattggaaagtgtggatgtccactgctttggccacttactgtatgaaatgacttatggacgaccgccagactcggtgcctgtggactccttccctcctgccccgtccatggctgtggtggccgtgttggagtctacgctgtcttgtgaagcctgtaaaaatggcatgcctaccatctcccggctcttacagatgccattattcagcgatgttttactaaccacttctgaaaaaccacagtttaagatccctacaaagttaaaagaggcattgagaattgccaaagaatgtatagagaagagactaattgaggaacagaaacagattcaccagcatcgaagactgacaagagctcagtcccaccatggatctgaggaggaaagaaaaaaaagaaagattttagctcgaaagaagtcaaaacgatctgctcttgaaaatagtgaagagcattcagcgaagtacagcaactccaataattcagcaggatctggggccagctcacctctcacgtccccgtcatcgccaactccaccctctacatcaggttagtgatggagtaaagtgacatgccaccttcctgtccgccaacaggaggagcgggctgtgcctcttcctgccttggcccaacaatttcaggggttagatagcagcagctttctcaagagaaatcagtgggagtgcaaattagcagtgtcatttgggagagctgaggggctagatttccaagctcggctttcacagggaatggaccggtttcagggccactagccacccccgggctccagcttgctgtctttgctgaaaagcttcatgcagagcttctcagattggagcctgtcttggtacatgcttagctgaacaacacaaatgcgccgtggcccaggggtcccgtcctgccaggcctctctcctcagggagcccgtccatagggtcagttttgtcacagagcacaactggtaagatgcctaggtggaggagtgaaagagtcactgcgtttctgattttctggcaacgatttgactctgttttgctctgtaatgtatttaattatctgaatatttttctgttattagcctttgcttcacttttgtaaattagatactagttttgattgaaaaatgtaaaaagaatttatcttggagactgcttataaaaataatccccaattttgttgagtagccccataatactatcttttatttttgaaccaagatgtctctcctaaagtcttttgcaagcccaataaaaacaattgggacaccagtatctccttttgcttcttaaatgaaccagttgttccagatgtgcgaggagctgcttctgccactcagagcttgctggctgtgcctggaagggttcctacaagctgtgtgaagggagaatcattggcagggagttggtatatgagttgatcccatattcattattaataactaacacagcacccaggagctgccaagagcattcttcagctccactcaaatgcttctaactgaccctcctaagaaaatgagagcaaggggactagtgtgaatgacttacttctggctgagggtggctactggtgccttactgctgaatgttctagggcctgttttgggtagcaaagtacctggtccatgggaggatattcttgtccttatctttgtcagcagatttcccaagaaagcccccaaatgttgatcaagacagaaaataggccttttttgtcttttatggagatacactgtttaggctgatcagaaatgtctggtgatctactgcccggactatattaagccattttctagaagataggatattaatttaacaccacttgggcatattaagaaaattggagaaaattagtagtgagaatccagaaatcctcctttaacaagcaaggcacttgaggcgtctgtttaagggttcacagcccctgtctgtgtggttagatctgcccctgctcacttgactgccggttcttatctctaaatgcctttgggaatttacaatttatttggacttttggggggaattctctaatttatctgtgtttaaatgggtgctgtctcatacagtagtaagtttgcgtgagataaggtaacttttagaatgagagaaaaaaa

SEQ ID NO: 172593 - DNA, 813 bp, Homo sapiens
  Payload ID: 13933
  Gene Symbol: PYDC1
  Gene Name: PYD (pyrin domain) containing 1
  Uniprot ID: Q8WXC3
  ENST ID: ENST00000302964
  CDS Start-End: 332-601
acaaagccacttctttgctgggaggtgcctgaccatggaatcagttccattcctgcctcaatgacttgcaacctgtttcctcctctgcagattgggaacagcaatccccacctcaacaatttggcgcccccactctcccaggggaaactgggggaccctctaggcggtgtttgcagagtcccctcccagcaggagccacagggttgaataggagctgccagatcagtctccttcccgggacatccccgggggcggcagctccacctgctgcaggaaaggtaggacctgatggctccaggccctcggaggctcagaggcgcagggctgagccatgggaacgaagcgcgaggccatcctgaaggtgctggagaacctgacaccggaggagctcaagaagttcaagatgaagctggggacggtgccgctgcgcgagggctttgagcgcatcccgcggggcgcgctcgggcagctagatatcgtggacctcaccgacaagctggtcgcctcctactacgaggactacgcagccgagctcgtcgtggccgtgctgcgcgacatgcgcatgttggaggaggccgcacggctgcagcgggctgcgtgagggccactctgagctggaggcgggtcaaggcaaaaggagtaatgcaacgcctgtgaagccagccccacgcgcgcaccagtcgcgtaagacaacagcagtgtctccacctcggggaccaaggacgcctccgtgcctccagaccccgcctcctccagcccctgcacctgtcatttattcttccactgcccaataaatattcatggcagacttta

SEQ ID NO: 172594 - DNA, 990 bp, Homo sapiens
  Payload ID: 13934
  Gene Symbol: PYCARD
  Gene Name: PYD and CARD domain containing
  Uniprot ID: Q9ULZ3
  ENST ID: ENST00000247470
  CDS Start-End: 303-890
gcaggcgccacccatgagcccctctgcggccccctcccgggtcccacctcgcaggccagctggagggcgcgatcctggcgtcccccgacggcctggggccccaatccagaggcctgggtgggaggggaccaagggtgtagtaaggaagcgccttttgctggagggcaacggaccggggcggggagtcgggagaccagagtgggaggaaggcggggagtccaggttccgccccggagccgacttcctcctggtcggcggctgcagcggggtgagcggcggcagcggccggggatcctggagccatggggcgcgcgcgcgacgccatcctggatgcgctggagaacctgaccgccgaggagctcaagaagttcaagctgaagctgctgtcggtgccgctgcgcgagggctacgggcgcatcccgcggggcgcgctgctgtccatggacgccttggacctcaccgacaagctggtcagcttctacctggagacctacggcgccgagctcaccgctaacgtgctgcgcgacatgggcctgcaggagatggccgggcagctgcaggcggccacgcaccagggctctggagccgcgccagctgggatccaggcccctcctcagtcggcagccaagccaggcctgcactttatagaccagcaccgggctgcgcttatcgcgagggtcacaaacgttgagtggctgctggatgctctgtacgggaaggtcctgacggatgagcagtaccaggcagtgcgggccgagcccaccaacccaagcaagatgcggaagctcttcagtttcacaccagcctggaactggacctgcaaggacttgctcctccaggccctaagggagtcccagtcctacctggtggaggacctggagcggagctgaggctccttcccagcaacactccggtcagcccctggcaatcccaccaaatcatcctgaatctgatctttttatacacaatatacgaaaagccagcttgaac

SEQ ID NO: 172595 - DNA, 696 bp, Homo sapiens
  Payload ID: 13934
  Gene Symbol: PYCARD
  Gene Name: PYD and CARD domain containing
  Uniprot ID: Q9ULZ3
  ENST ID: ENST00000350605
  CDS Start-End: 67-597
ccgacttcctcctggtcggcggctgcagcggggtgagcggcggcagcggccggggatcctggagccatggggcgcgcgcgcgacgccatcctggatgcgctggagaacctgaccgccgaggagctcaagaagttcaagctgaagctgctgtcggtgccgctgcgcgagggctacgggcgcatcccgcggggcgcgctgctgtccatggacgccttggacctcaccgacaagctggtcagcttctacctggagacctacggcgccgagctcaccgctaacgtgctgcgcgacatgggcctgcaggagatggccgggcagctgcaggcggccacgcaccagggcctgcactttatagaccagcaccgggctgcgcttatcgcgagggtcacaaacgttgagtggctgctggatgctctgtacgggaaggtcctgacggatgagcagtaccaggcagtgcgggccgagcccaccaacccaagcaagatgcggaagctcttcagtttcacaccagcctggaactggacctgcaaggacttgctcctccaggccctaagggagtcccagtcctacctggtggaggacctggagcggagctgaggctccttcccagcaacactccggtcagcccctggcaatcccaccaaatcatcctgaatctgatctttttatacacaatatacgaaaagccagcttgaa

SEQ ID NO: 172596 - DNA, 1137 bp, Homo sapiens
  Payload ID: 13934
  Gene Symbol: PYCARD
  Gene Name: PYD and CARD domain containing
  ENST ID: ENST00000561508
  CDS Start-End: 761-1137
tggcttcaagttcatggtctttaatctcctggaggctgtctctctttcttttttcttttttttaatcagtgttgggatcaaattctggctcccctaggaagcatctggcaaggtttcgggagccatcgggttggccatgttatgctggaatatttataagcaccggagggttatccccatgtcgtagaaaatgaaactgaagctcagagagatttgcactctctgcccttttgtacaactcatttttccccagtatgtggaattgagggagcttcacgcttctagctgtcatgattccaagattctacgacatgtgggagaggatcctaaggttcggggaaccgcggaggtttcggggttctagaaatccgaggttctaagcctaggtgctccaataaacccagtgagagccagcccaggtttccggtctgtacccgctggtgcaagcccagagacaagcaggcgccacccatgagcccctctgcggccccctcccgggtcccacctcgcaggccagctggagggcgcgatcctggcgtcccccgacggcctggggccccaatccagaggcctgggtgggaggggaccaagggtgtagtaaggaagcgccttttgctggagggcaacggaccggggcggggagtcgggagaccagagtgggaggaaggcggggagtccaggttccgccccggagccgacttcctcctggtcggcggctgcagcggggtgagcggcggcagcggccggggatcctggagccatggggcgcgcgcgcgacgccatcctggatgcgctggagaacctgaccgccgaggagctcaagaagttcaagctgaagctgctgtcggtgccgctgcgcgagggctacgggcgcatcccgcggggcgcgctgctgtccatggacgccttggacctcaccgacaagctggtcagcttctacctggagacctacggcgccgagctcaccgctaacgtgctgcgcgacatgggcctgcaggagatggccgggcagctgcaggcggccacgcaccagggaggctccccacgcttggcctaccgaccaacgggaccccggccccacggcgggaagggaagggaaggggatcacttggcccatatccttccaggctctggagc

SEQ ID NO: 172597 - DNA, 8488 bp, Homo sapiens
  Payload ID: 13935
  Gene Symbol: PYGO1
  Gene Name: pygopus family PHD finger 1
  Uniprot ID: Q9Y3Y4
  ENST ID: ENST00000302000
  CDS Start-End: 96-1355
agtcaagtcgttaaaataccaagtggaggcattctacagacaggtgtccacaccacggccacgcggacacggagtcggggaatctggatccccacatgcccgccgagaactctccagctcccgcttacaaagtttcctcgcatggtggtgatagtggactggatgggttaggaggaccaggtgtacaactaggaagcccagataagaaaaagcgcaaggcaaatacacagggaccttctttccctccattgtctgagtatgctccaccaccgaatccaaactctgaccatctagtggctgctaatccatttgatgacaactataatactatttcctataaaccactaccttcgtcaaatccatatcttggccctggttatcctggctttggaggctatagtacattcagaatgccacctcacgttcccccaagaatgtcttccccatactgtggtccttactcactcaggaaccagccacacccatttcctcagaatcctctgggcatgggttttaatcgacctcatgcttttaactttgggccacatgataattcaagtttcggtaatccatcttataataatgcactaagtcagaatgtcaacatgcctaatcaacattttagacaaaatcctgctgaaaatttcagtcaaattcctccacagaatgctagccaagtttctaaccccgatttggcatctaattttgttcctggaaataattcaaattttacttctccgttagaatctaatcattcttttattcctcccccaaacacttttggtcaagcaaaagcaccacccccaaaacaagactttactcaaggagcaaccaaaaacactaatcaaaattcctctgctcatccacctcacttgaatatggatgacacagtgaatcagagtaatattgaattaaaaaatgttaatcgaaacaatgcagtaaatcaggagaacagccgttcaagtagcactgaagccacaaacaataaccctgcaaatgggacgcagaataagccacgacaaccaagaggtgcagcagatgcctgcaccacagaaaaaagcaataaatcctctcttcacccaaaccgtcatggccattcgtcttctgacccagtgtatccttgtggaatttgtacaaacgaggtgaacgatgatcaggatgccatcttatgtgaggcctcttgtcagaaatggtttcatcggatctgtactggaatgactgaaacagcttatggcctcttaactgcagaagcatctgcagtatggggctgtgatacctgtatggctgacaaagatgtccagttaatgcgtactagagaaacttttggtccatctgcagtgggcagtgatgcttaatcaaaggcattaactaaagtgggtttattttcctgtgcattgcagaagttcattgacacaggattttaatgttttacattatttttttaaatgcatacacaaaaacattatttacttagtttttattaatcacttcatcactagagcaaattttttattgtctttgcttgctgtcttaaatgagaataatgtatatgggggtgctttagaaacataaataaatgttagttgttgttatttatcacaaacataaaagcctcttgaaacttcaaaataatatataacaaatgtaggcaagttttaacttttaaaagttagaatcattgaaaaacgtgtatttcagtgctgaactttggttgtaccatattaaagatttagttcaaaaagtttatcaaggatccacttaacacgtcttcacaacataatatatgtaactgtaacatgggggaaagcatacatttttatggattaaaaaaataatagtatgacaccagattcctcctccactagggtctttggaatcaatgaatttcatatttcaagtgagttttcaggatatctgtttgtacagatacgagacagatcttagcatatagtaaattctcagtaagtattgttgattaacttgtggatggtaccacatgaaattgctaatattagatcagttgaaaattgactgcaattagtaaagttggtataacgtacgttcccagttgtgctatttagaattatgatagtattatgctcctacttttctttgatattgagttgtcttgttattgtttattgttttccagagaaatactatagtatccacagaagaattgtgaatacttttttataattttgaactgggacatattgcagatgaggaaggtagaaacatccatttggccttagagggctctgctagtaaaagaactactcagtggtggtttgaaaaatcttgttctggggatctgaatttcaaaaatgaaccctaggggagatcaaaatccattttaaacaaagatcaattaagagccaaagtgaaatctaacttgcaaacaacaatttgaagccttgcagcagacttaaggaattcccgctctgactggggaaaagtataaaaatggacctgagagtaccctcttgagggatgatcaagaatggagacagttggagttgtgctcattaagattcaaaacagcagaaatccatttttggagcagattataacctgtggccaaaaaaaaaaaatgtgtgctgtttgacagctaatggcaatttatacaatcattggaggctggtaaagctccctaatatgttgccaccattatcattgcaaccaaaaaaattctgaagattgtgtggtgatctacgaaagagataaataattactgttatttaaacccaagtgaaacaatgacggcagcagcatattatcaagaaatttaaattatgcatgaaaatgtgatttaaaaacaatgtcctttgggtaacacacaagaacctacactttcacagacaaggactcgacctcacatgtcacaagctactaaagcaaagttaagtgacttgggctatgaaattttgtcatgtccattttagtcactggacctttattccatggactactgtctatcatttggagctttttctaagaaacaatgcattccccaatcgagatgaagtaactggaagatgttaacaatttatacagcctaacaaatgatgaattttataaaagttagacctttaatattctgttggaagaaaactattcatgctcctgatgcatattttgattgaataaaacttatttttttaaatacattgttttaattttgacctacaaaaacagcaatttcatatggtacaaggtaatacaaggttttctccatttacccttgactagttagaggtgagtacaaaatattttcagtagttgtaaaatatttatctttacaattttaggaaacaaaatgatataaactatacttctaggtactcctttgtgtgaaaactttaccagttgaagcaggttaaaatgcagtattttgggctgacaggcatttgatggtgttcagtagtgtacttgaagatctcattttacttggattttttattatacatatttctctaaatgtttaaggacctagttatgttgctcctgaaagtttaatgagtgctgatttttaataaatgatgcactgtatgctgtatgcctagttgtagcatcagatcatgatttattattaccctgaatagagctagatgatagatattttgagtagaactttccagtgttctcaggagttaacactttacatggtagtacttgagttgtgatcattactaaaatcaattatgcagtttcttaaaccctttatctctttaagtttcagtagttagctgtttttgtgaaaatgaaataacttctcccaagctagtctaaaggtatgtgttatgcaatataattcattttctatttccacatagttgtttttaaaaacctacaaacaggtgaatttttattcaggtgtttaggtcttcaaagcaccttacttaaataagaatctgtaaatattcaaaagaaaaactcacggttcattctgatagtgaatcatagccaaactgtaatcatagctgatgaatagcgttcatgtgtttgaattaattttcctgctagttctacatttgtctctacataatgctaagtcaaaagttatatagatgcttttggatggaataagtgatgaactgtaagaatagccagatgataatttgtctgaagaaggctattatacaaactgaaatggcttcttaggataaatgataagctgccttcaactttaaaaatatgcagtgatggaaaaaaacacaggtggaattgtaccttttttggtataatccctttccttcactgaaagtcctcatcttacacacacacacacacacacacaccccccacagtttctccaacatccttgagttttgcttaaattcaacctggctaactatgagcatctaggtttactcaccaaagctaggttattgacagaaaggtgggtttttttttgttttttttgttttgttttgttttgtttttgttttttgccagtcttgctctgttgcccaggctggagtgcagtgatgagatctcggctcactgcaacgtctgccttcctggttcaagtgattctcctgcctcagcctcctgagtagctgggattacagtcgcccaccatcacacctggctaatttttgtatttttagtagagacgggttcaccatgttggccaggctggtgtcaaactcctgacctcaagtgatctgcccgcctcagcctcccaaagtgctgggattacaggtgtaagccaccacgcctggccagacagaaaattttaaaaagcatcagttcctttctcagaacttgacttgctcatgcactagagaatttgtggtccacatgcttctaggtgttactcgattcactaatactgaaacagctcagcttgtgaaagataaattgttcttcagacagagtgcttagaattagatttgtgatcagtgttttccttttgtgtgaaatactttagagtactgctataattgttattcaaattagaaggttatatacataaaactaaagattttcttgtactagtgcttattcttcataaacacagtgtaaagaaatctacttttttggtggtttgttttagactcccaactctgcctagtggcagaaaaacctcttaatagtgtgggtcatcataaaatctgccaactttaatccaaataagtatcaagagtcttcattcaatattctttcaaacttgtttgtctcgaacaaattagagttttagcacttattgttcaatgtactatagtaattgtatttaatagtaagaaaatatataagcaatgattttttaaaagggagttctcaagagttttggatttctttctgccgtgtatagaggtttcttatgcatggacatttgtgctgttttatatctttttcaattaaaaaaaaatttaaaggcatcaggctccctaagttcatttgtaaatagtggcttggaactctacacaatagggaagctcctaaaggctcatttagaccataatctagttaatagtatcatgctgaactctcagttttctttaggaaaccaatcaatcagtgtaggagggagaaagaagcagaggtcttgtctttttcctgatgtgattaggaggttaagttctttggtgtgggtttctttgcatttgcccccttaccatgctaaactctggtgaaatgtataagcagccttggcttttcctctcctgggtgctctgtgcttcaacattttatatctttcctcccatcagaaatcctgtgtctttgtgtggcagtagtagttggctagactttaagagaaaagcattttctactaaggtatgaatgaagatagtgggaaaagtgtcattaaatttcttttttaaaaaagtatgtttattaagaatgaatctttaatatctaacatttcagacaatatgaccgcatttcagataccatgggaagcagtacatttagtgaattagctggtactgtctgagggtacttccagtttcctttaggctgttgtgacttttcacagcttcctctcctctaattctgaacttagagattttcttctcatttctaatttttagtagcttattgttccatccagtagagcattataaaagtcacatctgcatcttccaacttatggtacagtgatgggaatttggaagcacccctggagcaaagaggctagggatagcattaacatctcccaagacaagtggtataggggaaatgaaggaaagactgtggccatgtatatgccaggcgttaatacatcagagctgcctgtatttaatttaaaacttttgatgaaactcagtggataagcatctttgtcatattttgtcaataatacattacttgcaattatattaaaacttattctaaatacctgtacctttcttgttctgtagatgtgtagatgatgttgcttgtttgtcaaaatattatcttttataaaagaaagtcctgcttcttatcatgatgtatgtgacttaaatgattgtttcatattaaaactatttcttccttatgtactgtttacatatacctctttttgggatattagttcagtacttttatacaaatctgagtgtgttccacattggtgacatgtatttttgcagtaactttttgttttgttcttagaacatgtctaaagtaacacatgcactagtgctgtggtctgtggcaaaattactgtaattcaaattggaaaaaaaaatgtttccagactttgtccaacatttattcctatggcaaaggaaattactatgtaatactaattatttcttatgctggtatgttttaagctactctatgaagtatgtgaaacatcaatatttatggattaatagatggcctgatgtctttcaaatgggagaggagtaaattttagtgttaccaactcatgacacttgtaatacaataaatcttaaaatttttattttccacttacaggtatactttactaaataattaccttaaatggcagtgcatattaggattttttagcacatactactaaaattatatagtaacttttaacttgtgctgatatttcccaaccaaaaaagacatcattcacttcatcataaccaaaataagtagtactgtaatatttatcttcatttatttagacatgattaagataccgtaagactcctctaatttacctggaatttttagccattgattcaaggacttgaatgctgtttacttggtactacctaatgaaaggatttggtaataaaggttataatcacgattttaaagaaaaatgtttcatcttgaaggcaaatttttaagctttttatttagaggtgtttacttaagaatagtaatttaaaagcattcttattttgtcattaagacaagtacccaaaagaattgtaataagtaatacttggccaatgcaaatttgtacatttgaaatcatacacttgaaagaaaaaaatgaaggcttgtgagtgcttaaactgcatatctttttaaaaattcaaattttagacatatcagtttaaattatccttaataaggttttactatgtcagtgatgtatattacaaaatgtctacctatgttatgttaatgatatctctatactgcatcatattcggcatggttatggtatattttgtacttttgattgtggactattgataggattgatatagcaataaatctgattcagacttaatattttttaaaacgctagataccatactgtatcataatcctattatatttgacttgaatgcccaaaattttcatagttctatattttatgttaaaaatttagtattacatgttagggatttatttttgtctgctattttcacatacattcttttagaactgagtctgtttctatttagatcatagacgtctaaagaagtattattaattcatgaactgctttgtggaaaaatttaaataaagtatgaaatgactagattaccccaaattgtttatttttttttttggttaatgaccaggttacaattctcagacaaatgaaattggcttgataactgattgaatatagtagataatggaaagtttgactctttaagggcttccaagtgttaaatacattctcaattctgaattacttcatagtaactacttaaataatggtaagccaattctcctttttctttttgagatatttaacacaatttgcgtcttctgatcccattcccttcttccccaaaaaccatgctagaatttaaaattggaagagtttaatttgtcatctacattttagtttttttattctatagataagtaagaagacaagtagacgttctgctgtcaagacagtccatgttattgttggccattcttttcagggataatgcttaatgttatttgtgcgttgtataaggaatgttgtttatcagtatatagacctaccattagtagaaatgatgtatggcaggctttcttgaataatatgtattgtaagtttgtttcctatagtgttattatggttcagattcttttaaataaagctagtttttaaaga

SEQ ID NO: 172598 - DNA, 2653 bp, Homo sapiens
  Payload ID: 13935
  Gene Symbol: PYGO1
  Gene Name: pygopus family PHD finger 1
  Uniprot ID: Q9Y3Y4
  ENST ID: ENST00000563719
  CDS Start-End: 58-1317
gcatcaaagagaccgaattcccgcggcctgggggggagtcatgctttgcggtctgtaatgtcagcagaacaggagaaggatcccatttcgctgaagagagttcgaggtggtgatagtggactggatgggttaggaggaccaggtgtacaactaggaagcccagataagaaaaagcgcaaggcaaatacacagggaccttctttccctccattgtctgagtatgctccaccaccgaatccaaactctgaccatctagtggctgctaatccatttgatgacaactataatactatttcctataaaccactaccttcgtcaaatccatatcttggccctggttatcctggctttggaggctatagtacattcagaatgccacctcacgttcccccaagaatgtcttccccatactgtggtccttactcactcaggaaccagccacacccatttcctcagaatcctctgggcatgggttttaatcgacctcatgcttttaactttgggccacatgataattcaagtttcggtaatccatcttataataatgcactaagtcagaatgtcaacatgcctaatcaacattttagacaaaatcctgctgaaaatttcagtcaaattcctccacagaatgctagccaagtttctaaccccgatttggcatctaattttgttcctggaaataattcaaattttacttctccgttagaatctaatcattcttttattcctcccccaaacacttttggtcaagcaaaagcaccacccccaaaacaagactttactcaaggagcaaccaaaaacactaatcaaaattcctctgctcatccacctcacttgaatatggatgacacagtgaatcagagtaatattgaattaaaaaatgttaatcgaaacaatgcagtaaatcaggagaacagccgttcaagtagcactgaagccacaaacaataaccctgcaaatgggacgcagaataagccacgacaaccaagaggtgcagcagatgcctgcaccacagaaaaaagcaataaatcctctcttcacccaaaccgtcatggccattcgtcttctgacccagtgtatccttgtggaatttgtacaaacgaggtgaacgatgatcaggatgccatcttatgtgaggcctcttgtcagaaatggtttcatcggatctgtactggaatgactgaaacagcttatggcctcttaactgcagaagcatctgcagtatggggctgtgatacctgtatggctgacaaagatgtccagttaatgcgtactagagaaacttttggtccatctgcagtgggcagtgatgcttaatcaaaggcattaactaaagtgggtttattttcctgtgcattgcagaagttcattgacacaggattttaatgttttacattatttttttaaatgcatacacaaaaacattatttacttagtttttattaatcacttcatcactagagcaaattttttattgtctttgcttgctgtcttaaatgagaataatgtatatgggggtgctttagaaacataaataaatgttagttgttgttatttatcacaaacataaaagcctcttgaaacttcaaaataatatataacaaatgtaggcaagttttaacttttaaaagttagaatcattgaaaaacgtgtatttcagtgctgaactttggttgtaccatattaaagatttagttcaaaaagtttatcaaggatccacttaacacgtcttcacaacataatatatgtaactgtaacatgggggaaagcatacatttttatggattaaaaaaataatagtatgacaccagattcctcctccactagggtctttggaatcaatgaatttcatatttcaagtgagttttcaggatatctgtttgtacagatacgagacagatcttagcatatagtaaattctcagtaagtattgttgattaacttgtggatggtaccacatgaaattgctaatattagatcagttgaaaattgactgcaattagtaaagttggtataacgtacgttcccagttgtgctatttagaattatgatagtattatgctcctacttttctttgatattgagttgtcttgttattgtttattgttttccagagaaatactatagtatccacagaagaattgtgaatacttttttataattttgaactgggacatattgcagatgaggaaggtagaaacatccatttggccttagagggctctgctagtaaaagaactactcagtggtggtttgaaaaatcttgttctggggatctgaatttcaaaaatgaaccctaggggagatcaaaatccattttaaacaaagatcaattaagagccaaagtgaaatctaacttgcaaacaacaatttgaagccttgcagcagacttaaggaattcccgctctgactggggaaaagtataaaaatggacctgagagtaccctcttgagggatgatcaagaatggagacagttggagttgtgctcattaagattcaaaacagcagaaatccatttttggagcagattataacctgtggccaaaaaaaaaaaatgtgtgctgtttgacagctaatggcaatttatacaatcattggaggctggtaaagctccctaatatgttgccaccattatcattgcaaccaaaaaaa

SEQ ID NO: 172599 - DNA, 1306 bp, Homo sapiens
  Payload ID: 13936
  Gene Symbol: PYGO2
  Gene Name: pygopus family PHD finger 2
  ENST ID: ENST00000368456
  CDS Start-End: 158-1267
gcgccttcggctcgcgcgcgcccctccgcggcggctccaccgcccgggatggtacggtccggcagccgggccgcgcgctgccgcccctcggtgagctggtgtgggccgccgctagcggagacgaccctttccactcgcgtggtgccgtggtctgcaaatgaagagtccagaaaagaagcgaaggaagtcaaatactcagggccctgcatactcacatctgacggagtttgcaccacccccaactcccatggtggatcacctggttgcatccaacccttttgaagatgacttcggagcccccaaagtgggggttgcagcccctccattccttggcagtcctgtgcccttcggaggcttccgtgtgcaggggggcatggcgggccaggtacccccaggctacagcactggaggtggagggggcccccagccactccgtcgacagccaccccccttccctcccaatcctatgggccctgctttcaacatgcccccccagggtcctggctacccacccccaggcaacatgaactttcccagccaacccttcaaccagcctctgggtcaaaactttagtcctcccagtgggcagatgatgccgggcccagtggggggatttggtcccatgatctcacccaccatgggacagcctcccagagcagagctgggcccaccttctctgtcccaacgatttgctcagccaggggctccttttggcccttctcctctccagagacctggtcaggggctccccagcctgccgcctaacacaagtccctttcctggtccggaccctggctttcctggccctggtggtgaggatggggggaagcccttgaatccacctgcttctactgcttttccccaggagccccactcaggctccccggctgctgctgttaatgggaaccagcccagtttccccccgaacagcagtgggcggggtgggggcactccagatgccaacagcttggcaccccctggcaaggcaggtgggggctccgggccccagcctcccccaggcttggtgtacccatgtggtgcctgtcggagtgaggtgaacgatgaccaggatgccattctgtgtgaggcctcctgccagaaatggttccaccgtgagtgcacaggcatgactgagagcgcctatgggctgctgaccactgaagcttctgccgtctgggcctgcgatctctgcctcaagaccaaggagatccagtctgtctacatccgtgagggcatggggcagctggtggctgctaacgatgggtgacgctggtgaagtggcccagggaagtgcacatgtctctcc

SEQ ID NO: 172600 - DNA, 3146 bp, Homo sapiens
  Payload ID: 13936
  Gene Symbol: PYGO2
  Gene Name: pygopus family PHD finger 2
  Uniprot ID: Q9BRQ0
  ENST ID: ENST00000368457
  CDS Start-End: 173-1393
gtctggagagagcgcgcagtttgcgcggcggctcggcgcttccctgtcgtcgcactttgtggttgctgcagctcgggggcctgggctgcccctgacaccccttctgggcgatggtgcagcccaagggcgcctccatcccccgccgctgccgctaacccgggtcccccactccatggccgcctcggcgccgcccccaccggacaagctggagggaggtggcggccccgcaccgccccctgcgccgcccagcaccgggaggaagcagggcaaggccggtctgcaaatgaagagtccagaaaagaagcgaaggaagtcaaatactcagggccctgcatactcacatctgacggagtttgcaccacccccaactcccatggtggatcacctggttgcatccaacccttttgaagatgacttcggagcccccaaagtgggggttgcagcccctccattccttggcagtcctgtgcccttcggaggcttccgtgtgcaggggggcatggcgggccaggtacccccaggctacagcactggaggtggagggggcccccagccactccgtcgacagccaccccccttccctcccaatcctatgggccctgctttcaacatgcccccccagggtcctggctacccacccccaggcaacatgaactttcccagccaacccttcaaccagcctctgggtcaaaactttagtcctcccagtgggcagatgatgccgggcccagtggggggatttggtcccatgatctcacccaccatgggacagcctcccagagcagagctgggcccaccttctctgtcccaacgatttgctcagccaggggctccttttggcccttctcctctccagagacctggtcaggggctccccagcctgccgcctaacacaagtccctttcctggtccggaccctggctttcctggccctggtggtgaggatggggggaagcccttgaatccacctgcttctactgcttttccccaggagccccactcaggctccccggctgctgctgttaatgggaaccagcccagtttccccccgaacagcagtgggcggggtgggggcactccagatgccaacagcttggcaccccctggcaaggcaggtgggggctccgggccccagcctcccccaggcttggtgtacccatgtggtgcctgtcggagtgaggtgaacgatgaccaggatgccattctgtgtgaggcctcctgccagaaatggttccaccgtgagtgcacaggcatgactgagagcgcctatgggctgctgaccactgaagcttctgccgtctgggcctgcgatctctgcctcaagaccaaggagatccagtctgtctacatccgtgagggcatggggcagctggtggctgctaacgatgggtgacgctggtgaagtggcccagggaagtgcacatgtctctccctgctcttccagggtgatttttttgatgtttggctcttggtccttgtttccactggctttccatccccatggggcagaaacagtggctcctgggagcagaaaaggaattgaggtgggcaggcagaagagcctggattgctcactgttttgggaaacttacatgttgagatctacagagatccaggaaaccaaagccctgctgagcagagccattttgtggctatttctggaggcccaggagtgtggctgcaagagaaaaggggctggaggaagatccggagggcaggggtgttccctctgctgatgatggatgcccctaacacctgtgcctaacacccctactgaaccccacagctccagccttagtttttggagtcaagtgttaaaggtttctggccagaggaattggggtcttgccatccctgcaatagcccttttatgggctctgggagacagctttagggaataaatggggattttcccctttttctacccactcctttgcttcctccaagacttacccaactccttccccctcagagaaccaaatagcctgaggaagcaggagagttcctggttatggcagtttcttggtgatttggggcttcaagacagtaggtgagagatgctgtcaggacgtatcttcttcataccaaagtcactggtcctttctcagcctctctcgtgcttttctcctaatgaccatatttttgccaaaaattgggatatgttatctgacagaccagaatatttgaagtttgggctgtcctgaaagtctggactttggtggtaccctcctcccccagcccatctgttgcacattatactccgtgtgttcttcaactttcggcgcccttattcccctgccttcctggcttgattgaaggaaagcttgaaaaggcgcagagccctatacctcatttcctccatgataaaaggatccaagtgaggccctgtcacagcctgtgggtaggggatgcggcgggatcctcattgccatggtactcaaaggtagaagagcctggagtttgttgcttctctttgctattctttcatatcctcttgggcctggtgattaattagcaattctcattcctctcagccaaaggcctgcactgggctttatttgtctttttttattttttaagcactgcctgccagagatgggcctggggcctgatgaggaccttagcgctgctcgttctccttttctgttcatgcacacattcctccatggggtggggaaggcaggcatggggtgtggccctcggagaagttaggagtcccccagctcaagatacagtggcaaagacctagtggtcccctacccccacttctctcagttcctggcatgaggagagaagaccctgctctggtggagctgacaacctttgaggctgggaggagagcagcctctgggcatcgttcccagtgtccctcacactaaaacggcgtagatggcaaccccccacccccaccccgctgctcaactcttgtgtttgttgttctgtttgccccatttatctgttgctgtttttgtgttgtcttcccctgctccgcattttgtaaaatggcccctgggggagtgtttttgctggatctgctccctctcgctctctcactccactactttttggaacaaagtgatggcagaatgcggtggtggtgggggtcttttgtactgttggattaataaaatgattttaaaatccca

SEQ ID NO: 172601 - DNA, 1073 bp, Homo sapiens
  Payload ID: 13937
  Gene Symbol: PYM1
  Gene Name: PYM homolog 1, exon junction complex associated factor
  Uniprot ID: Q9BRP8
  ENST ID: ENST00000398213
  CDS Start-End: 4-615
aagatggcgactccctatgttactgacgagaccggcggcaagtatatcgcgtcaacacagcgacctgacgggacctggcgcaagcagcggagggtgaaagaaggatatgtgccccaggaggaggtcccagtatatgaaaacaagtatgtgaagtttttcaagagtaaaccagagttgcccccagggctaagccctgaggccactgctcctgtcaccccatccaggcctgaaggtggtgaaccaggcctctccaagacagccaaacgtaacctgaagcgaaaggagaagaggcggcagcagcaagagaaaggagaggcagaggccttgagcaggactcttgataaggtgtccctggaagagacagcccaactccccagtgctccacagggctctcgggcagcccccacagctgcatctgaccagcctgactcagctgccaccactgagaaagccaagaagataaagaacctaaagaagaaactccggcaggtggaagagctgcagcagcggatccaggctggggaagtcagccagcctagcaaagagcagctagaaaagctagcaaggaggagggcgctagaagaggagttagaggacttggagttaggcctctgaggcctttggggaatagggaatggactgcagaacaaaccgtggggctctctggggtctgggggaatacgggcaacagcagtcaggaggggtaccccccatactggcttacttccacctcctgcggcccagctctgtcctccagagcctagcgtctccctcaatccttcccttttcttcccaacttctactttttggactttccccctcccattcccagtgttcaaaatctcagtgactaccccaggtacctttgctgctgatttgggtgtcttgtttaaaagaaaatcaggtgggtgggaatctcttggagaactgaggctgagggtagagggagtatgcccaagtcttggagtcttggttcctgttcgcggtgtttatgggttatttccctctccatccctcattttttttttttttttaaaaaaagcaaaaatgagaataaacacaagtagacatgt

SEQ ID NO: 172602 - DNA, 1226 bp, Homo sapiens
  Payload ID: 13937
  Gene Symbol: PYM1
  Gene Name: PYM homolog 1, exon junction complex associated factor
  Uniprot ID: Q9BRP8
  ENST ID: ENST00000408946
  CDS Start-End: 153-767
gggcccagcccgaggaggcactcagggttaggaggtctgggcgagaagcaactagggccctcatcacttcgccgccgaatccccggcgccgcccagcggggcagagccaggccagggccgcccgcccaacctggtccgctgcctcttcggccatggaagctgccggcagccctgcggctacggagacaggcaagtatatcgcgtcaacacagcgacctgacgggacctggcgcaagcagcggagggtgaaagaaggatatgtgccccaggaggaggtcccagtatatgaaaacaagtatgtgaagtttttcaagagtaaaccagagttgcccccagggctaagccctgaggccactgctcctgtcaccccatccaggcctgaaggtggtgaaccaggcctctccaagacagccaaacgtaacctgaagcgaaaggagaagaggcggcagcagcaagagaaaggagaggcagaggccttgagcaggactcttgataaggtgtccctggaagagacagcccaactccccagtgctccacagggctctcgggcagcccccacagctgcatctgaccagcctgactcagctgccaccactgagaaagccaagaagataaagaacctaaagaagaaactccggcaggtggaagagctgcagcagcggatccaggctggggaagtcagccagcctagcaaagagcagctagaaaagctagcaaggaggagggcgctagaagaggagttagaggacttggagttaggcctctgaggcctttggggaatagggaatggactgcagaacaaaccgtggggctctctggggtctgggggaatacgggcaacagcagtcaggaggggtaccccccatactggcttacttccacctcctgcggcccagctctgtcctccagagcctagcgtctccctcaatccttcccttttcttcccaacttctactttttggactttccccctcccattcccagtgttcaaaatctcagtgactaccccaggtacctttgctgctgatttgggtgtcttgtttaaaagaaaatcaggtgggtgggaatctcttggagaactgaggctgagggtagagggagtatgcccaagtcttggagtcttggttcctgttcgcggtgtttatgggttatttccctctccatccctcattttttttttttttttaaaaaaagcaaaaatgagaataaacacaagtagacatgtc

SEQ ID NO: 172603 - DNA, 884 bp, Homo sapiens
  Payload ID: 13937
  Gene Symbol: PYM1
  Gene Name: PYM homolog 1, exon junction complex associated factor
  ENST ID: ENST00000454792
  CDS Start-End: 191-424
gggcgagaagcaactagggccctcatcacttcgccgccgaatccccggcgccgcccagcggggcagagccaggccagggccgcccgcccaacctggtccgctgcctcttcggccatggaagctgccggcagccctgcggctacggagacagcttctccactcttcctcctcctccacctccgcccatgaaatggtgcactctccctttaagactaagatggtggcttgctacgatcgggactccacttccggtggggaggggggcgggaccccagcccgctcacgccggaagtggtttgcgttttcaagatggcgactccctatgttactgacgagaccggcggggtgggaaccgccaaacctctcccttctttttgacttcacccttggataccatcaaggccagaggatggaaccaagataacataaaataggtgctcctttgtgataatgggctatttgtatctctgagggcttccacacaggatggccattcaagaagcttctgctctgcctttcattacagtctatctttagtcctcctaaaccttcagctataatctctatgcaatcaacttaaatatatgtttgtagtattgtccctttctcccaaattccatgtaaaacacttgcctgaattgaattgtttccacaaagttgttttcccctgtggactttgtttatatcagtagtttttattttcccaattttccaaattcaagagtgataattataaatagttgtgttcttgtttgttatctttctcactagaatgtatactctaagaaggcaagaaccttgcttgctttattcattgttgtattcctagcttctgttacagtgtctggcacaagagtaagtgctcaataaaaatttaaaatcca

SEQ ID NO: 172604 - DNA, 499 bp, Homo sapiens
  Payload ID: 13937
  Gene Symbol: PYM1
  Gene Name: PYM homolog 1, exon junction complex associated factor
  ENST ID: ENST00000547925
  CDS Start-End: 13-150
gaggctgaagagatgcccagtaatatttgccattcttcctcaggaaggctcatttctcctatcaaggtgaaaagtgagattcagactcaggcaagtatatcgcgtcaacacagcgacctgacgggacctggcgcaagcagcggagggtgaaagaaggatatgtgccccaggaggaggtcccagtatatgaaaacaagtatgtgaagtttttcaagagtaaaccagagttgcccccagggctaagccctgaggccactgctcctgtcaccccatccaggcctgaaggtggtgaaccaggcctctccaagacagccaaacgtaacctgaagcgaaaggagaagaggcggcagcagcaagagaaaggagaggcagaggccttgagcaggactcttgataaggtgtccctggaagagacagcccaactccccagtgctccacagggctctcgggcagcccccacagctgcatctgaccagcctgactcagctgccaccactga

SEQ ID NO: 172605 - DNA, 653 bp, Homo sapiens
  Payload ID: 13937
  Gene Symbol: PYM1
  Gene Name: PYM homolog 1, exon junction complex associated factor
  ENST ID: ENST00000549939
  CDS Start-End: 1-113
agctgccggcagccctgcggctacggagacaggggtgggaaccgccaaacctctcccttctttttgacttcacccttggataccatcaaggccagaggatggaaccaagataacataaaataggtgctcctttgtgataatgggctatttgtatctctgagggcttccacacaggatggccattcaagaagcttctgctctgcctttcattacagtctatctttagtcctcctaaaccttcagctataatctctatgcaatcaacttaaatatatgtttgtagtattgtccctttctcccaaattccatgtaaaacacttgcctgaattgaattgtttccacaaagttgttttcccctgtggactttgtttatatcagtagtttttattttcccaattttccaaattcaagagtgataattataaatagttgtgttcttgtttgttatctttctcactagaatgtatactctaagaaggcaagaaccttgcttgctttattcattgttgtattcctagcttctgttacagtgtctggcacaagagtaagtgctcaataaaaatttaaaatccacgtgtgaataaatgtgattaccatgtgccctaccgtatattgagaaaaataagaatacatgtgaaaagcacgagattaaa

SEQ ID NO: 172606 - DNA, 775 bp, Homo sapiens
  Payload ID: 13937
  Gene Symbol: PYM1
  Gene Name: PYM homolog 1, exon junction complex associated factor
  ENST ID: ENST00000557259
  CDS Start-End: 222-356
agggttagatagggtctccaaccgtccctagaaacacttgtgcgccccagtgcgttcctggagtttgtctgctccacgtcaccaagccgctctgagatctgggtgcaggccagagcctggatattcttcctttcttcatttataaggccccctttttgggtgcaggtgggccttgcgcccttttccctcgcaggtcctggacgtacgaggagttcctggggatgagagggactgtgcctcggaacttctcttggctccctgaggactgttttacaggcagcaagcgctcagtaatggcaagtatatcgcgtcaacacagcgacctgacgggacctggcgcaagcagcggagggtgaaagaaggatatgtgccccaggaggaggtcccagtatatgaaaacaagtatgtgaagtttttcaagagtaaaccagagttgcccccagggctaagccctgaggccactgctcctgtcaccccatccaggcctgaaggtggtgaaccaggcctctccaagacagccaaacgtaacctgaagcgaaaggagaagaggcggcagcagcaagagaaaggagaggcagaggccttgagcaggactcttgataaggtgtccctggaagagacagcccaactccccagtgctccacagggctctcgggcagcccccacagctgcatctgaccagcctgactcagctgccaccactgagaaagccaagaagataaagaacctaaagaagaaactccggcaggtggaagagctgcagcagcggatccag

SEQ ID NO: 172607 - DNA, 4055 bp, Homo sapiens
  Payload ID: 13938
  Gene Symbol: PYROXD1
  Gene Name: pyridine nucleotide-disulphide oxidoreductase domain 1
  Uniprot ID: Q8WU10
  ENST ID: ENST00000240651
  CDS Start-End: 55-1557
cagagtcccgttgctccgccgcgatattcagtaaaccactgggagtccggcagcatggaggcagcgcgccctcccccgacggcagggaagttcgtggtggtcggcggcggcatcgcgggcgtcacttgtgcggagcagttggctactcactttccatcggaagatattctcttggtaacagcttctcctgttattaaagcagttacaaatttcaagcagatttctaaaatattggaagaattcgatgttgaagaacaatcaagtaccatgttaggaaaacgctttcccaacattaaggttatagaatctggcgtaaagcaactgaagagtgaagaacactgcattgtaacagaagatggcaatcagcacgtatataagaaactctgtctgtgtgctggagctaaaccaaagttgatatgtgaaggaaatccttatgtattaggaatccgtgatacagacagtgctcaggaatttcagaaacagcttactaaagctaaaagaataatgatcatagggaacggtggtattgcacttgagttagtgtatgaaattgaaggctgtgaagtgatttgggccattaaagataaagctatagggaatactttcttcgatgcaggagcagctgaattcttgacttcaaagctcattgctgaaaaatcagaggctaaaattgcacataaaagaaccagatatacaactgaaggaaggaaaaaggaagctagaagcaaatctaaagcagataatgtaggaagtgcattgggaccagattggcatgaaggcttgaatcttaaaggaacaaaagagttttctcataagattcaccttgaaactatgtgtgaagtaaagaaaatctaccttcaggatgagtttagaattttgaagaaaaagtccttcacttttccaagagaccataagtcagttacagctgatacagagatgtggcctgtctatgtggaattgaccaatgaaaagatatatggctgcgatttcattgtcagtgctacaggagttacaccaaatgtagaaccttttctccatggtaacagttttgatctaggagaagatggtggcctgaaagtggatgatcatatgcacacatcccttcctgatatctatgctgccggtgacatctgtactacatcctggcagctgagcccagtctggcagcagatgaggctgtggacccaggctagacagatgggatggtatgcagcaaagtgcatggctgcagcgagttcaggagactctattgacatggatttcagctttgaactgtttgctcatgtgacaaaattttttaactataaggttgtactgctgggaaaatacaatgcacagggcttaggttcagatcatgaattaatgctgagatgtaccaaaggacgagaatacatcaaagtcgtcatgcaaaatggacgaatgatgggagctgtcttaattggtgaaaccgatttagaagaaacatttgaaaacctaatcttaaaccaaatgaatctttcatcatatggagaagatctgctagatccaaatattgatatagaagattattttgactaaaaatggaatttcttcaggaatcatataaagttccaaatgacaccagaaaaatcacaagtcaataaaatgaatgactgtattgagttaatgatgaccacactgaaaattacagaagtgataatgatattagtggaaaaatataaaaacataaattctaagtttgaaatcagttcaaagtttatttatagatatatctttccaatacaacactgaccgcttagataaaaatcttaagttatttatttctgtgttttaaacataaatatgtttacttgtgatttagctttggagcaaatttaggtaagttatctacttagccaaatgtactctagtagactagaaccattctttgtgaaatgtcaaaatatggctatggtttcaggaactttaaaatcggttgtattttactttaaatagagatgtagcaatatctcgtttgctaatatttatattgatgacttactccttttttgttgaattgtacttctggttttataacctgaaatcatctacaagcttgtccaactctagcccacgggtctaatgcagcccagaacagctttgaatgcagcccaacacaaatctgtaaactttcttaaaacatgagatttttcttgcaatttttttttttttaagctcatcagctatcgtcagtgttagcatattttatgtgcggcccaagacaattcttcttccaatgtggctcagggaagccaaaagattggacatccctgatctacatatttaacttaaagtatcactcagtgaacctctgtcagtataatattgctttcaaaaagatggttatgtcaaaagaaaaaatatagctaagtatataaaggcataaaaaacttaagacaattacatgaacttattctcaaatattttacattttttgtaaactttcttaaaacatgagatttttcttgcaattttttttttaagctcatcagctatcatcagtgttagcatattttatgtgcggcccaagacaattcttcttccaatgtggctcagggaagccaaaagattggacatccttgatctacatatttaacttaaagtatcactcagtgagcctctgtcagtataatattgctttcaaaaagatagttatgtcaaaagaaaaaatatagctaagtatataaaggcataaaaaacttaagacgattgtatgaacttattctcaaatattttacatttaaagggttttacataaaaatttttcccttgttttatactggaaaattatataattcatgatctctaattttcaaacattctcaaaagtttagatcttcagagataagctctgaaaatatagatccatacatataaaatatctatgaaattcttttaaaaactattgtctaactacaaaaataatggcatatacatgcataaaccatctttaattagaaaatttagtaacattcatatcaggcatcatcgatttttcttttcttagctcctgtattcttagaaccagattgctgaagcatgtttgcagccttcttctggaagttgcctgaatttttttcctccatctttttatcaccttgttcagaatgacaagtttgagacgattcagcctacaaaaaaaaaaaaaaaacaaagcaagcaccttggtaaaaatccagctattcagttttctcatgagattaaatatttcaaaatattctttctgtatcagttggctttttaagtatacaggggtctagttttttatctacaaatttctattcaaatatgagctctattttgaataaaaggggctacgttgtgagagaagttctaaagacctcaaatgtccttagacacaatggcacttgacttgacatgcttttgcagacttgatagtatttggtttaaaacagtggtttctaaccactggaacagcagaaacagacttctcaactattagtaatcacaaccaaataagagcagagtgcataacaaaattagatattcaaacggagtcctcccattccaagaaactggaaacccctagtttatgttaaaaggccagtctaaattctttcacttacatctttacagaaaactatattttctctcttccatacccagaaatctaatcagaaaactgacttttctcatgttcaactggacctaggggaatatgacagaaaagcatcccataggctttaatatactttttaaaatatataaaactgaaaattaatagccatttaccctgaaagagttctgcgtggactttgtcacttgcatagtaatagcatgtgcctcattgttcagaagattagctttaggtcctattttcaaatacgaaatggtagcataagctgtaaaactgtagtcttctctgcagaaaataaaggccaacaataagaaagcttttgaaggaatcacggaaaacaaatttataaaagaaataactatatgcgcagtaattcttaacacattgacttgaaataataaaatttacaagaatgcaaataaagcctttaaagaaaata

SEQ ID NO: 172608 - DNA, 1849 bp, Homo sapiens
  Payload ID: 13938
  Gene Symbol: PYROXD1
  Gene Name: pyridine nucleotide-disulphide oxidoreductase domain 1
  ENST ID: ENST00000375266
  CDS Start-End: 87-254
accgcctcgcggctgcttcctctcctggagtccagagtcccgttgctccgccgcgatattcagtaaaccactgggagtccggcagcatggaggcagcgcgccctcccccgacggcagggaagttcgtggtggtcggcggcggcatcgcgggcgtcacttgtgcggagcagttggctactcactttccatcggaagatattctcttggtaacagcttctcctgttattaaagcagttacaaatttcaagcagtagagacggggtttcaccatattggccaggctggtctggaactcctgacctcgtgatccatccacctcggcctcccaaattgctgggattacagatttctaaaatattggaagaattcgatgttgaagaacaatcaagtaccatgttaggaaaacgctttcccaacattaaggttatagaatctggcgtaaagcaactgaagagtgaagaacactgcattgtaacagaagatggcaatcagcacgtatataagaaactctgtctgtgtgctggagctaaaccaaagttgatatgtgaaggaaatccttatgtattaggaatccgtgatacagacagtgctcaggaatttcagaaacagcttactaaagctaaaagaataatgatcatagggaacggtggtattgcacttgagttagtgtatgaaattgaaggctgtgaagtgatttgggccattaaagataaagctatagggaatactttcttcgatgcaggagcagctgaattcttgacttcaaagctcattgctgaaaaatcagaggctaaaattgcacataaaagaaccagatatacaactgaaggaaggaaaaaggaagctagaagcaaatctaaagcagataatgtaggaagtgcattgggaccagattggcatgaaggcttgaatcttaaaggaacaaaagagttttctcataagattcaccttgaaactatgtgtgaagtaaagaaaatctaccttcaggatgagtttagaattttgaagaaaaagtccttcacttttccaagagaccataagtcagttacagctgatacagagatgtggcctgtctatgtggaattgaccaatgaaaagatatatggctgcgatttcattgtcagtgctacaggagttacaccaaatgtagaaccttttctccatggtaacagttttgatctaggagaagatggtggcctgaaagtggatgatcatatgcacacatcccttcctgatatctatgctgccggtgacatctgtactacatcctggcagctgagcccagtctggcagcagatgaggctgtggacccaggctagacagatgggatggtatgcagcaaagtgcatggctgcagcgagttcaggagactctattgacatggatttcagctttgaactgtttgctcatgtgacaaaattttttaactataaggttgtactgctgggaaaatacaatgcacagggcttaggttcagatcatgaattaatgctgagatgtaccaaaggacgagaatacatcaaagtcgtcatgcaaaatggacgaatgatgggagctgtcttaattggtgaaaccgatttagaagaaacatttgaaaacctaatcttaaaccaaatgaatctttcatcatatggagaagatctgctagatccaaatattgatatagaagattattttgactaaaaatggaatttcttcaggaatcatataaagttccaaatgacaccagaaaaatcacaagtcaataaaatgaatgactgtattgagttaatgatgaccacactgaaaattacagaagtgataatgatattagtggaaaaatataaaaacataaattctaagtttgaaa

SEQ ID NO: 172609 - DNA, 3639 bp, Homo sapiens
  Payload ID: 13938
  Gene Symbol: PYROXD1
  Gene Name: pyridine nucleotide-disulphide oxidoreductase domain 1
  Uniprot ID: Q8WU10
  ENST ID: ENST00000538582
  CDS Start-End: 754-2043
ccttttttgctgcgcccttttccgcacttattgctcccagattttagaaactgcttggtggtcctcagatgacctcactagctttctcttaggcgcagggaggagtgggaggcaaattatagccgagaaaccaaagctggctgatccgtgctcagatccttgtaatgtcagagcagacatgaggactttgtatttagacaaaaaattcagccccctttctttttatttttttttctttttctttgagacggagtctcactctgtcgcccagactggagggcagtggtgcgatcttggcttaatgcaagctttgcctcccgggttcaagcgattcttctgttgcgtcagcctgtagctgggattacaggcgccagccaccacgccccgctaatgtttgtatttttagtagagacgggctttcaccatgttggccaggctggtctcgaactcctgggctcaagcagtctgcccgcttccgcctaccgaagtgctggcattacaggcctgagccacagcacccggccctcagccccctttgttaattatcgtaggtgattgagtttagtttccagatagttgccaagtctttagtgcatcttaactaattaataaagaatcccatatttggctactcactttccatcggaagatattctcttggtaacagcttctcctgttattaaagcagttacaaatttcaagcagatttctaaaatattggaagaattcgatgttgaagaacaatcaagtaccatgttaggaaaacgctttcccaacattaaggttatagaatctggcgtaaagcaactgaagagtgaagaacactgcattgtaacagaagatggcaatcagcacgtatataagaaactctgtctgtgtgctggagctaaaccaaagttgatatgtgaaggaaatccttatgtattaggaatccgtgatacagacagtgctcaggaatttcagaaacagcttactaaagctaaaagaataatgatcatagggaacggtggtattgcacttgagttagtgtatgaaattgaaggctgtgaagtgatttgggccattaaagataaagctatagggaatactttcttcgatgcaggagcagctgaattcttgacttcaaagctcattgctgaaaaatcagaggctaaaattgcacataaaagaaccagatatacaactgaaggaaggaaaaaggaagctagaagcaaatctaaagcagataatgtaggaagtgcattgggaccagattggcatgaaggcttgaatcttaaaggaacaaaagagttttctcataagattcaccttgaaactatgtgtgaagtaaagaaaatctaccttcaggatgagtttagaattttgaagaaaaagtccttcacttttccaagagaccataagtcagttacagctgatacagagatgtggcctgtctatgtggaattgaccaatgaaaagatatatggctgcgatttcattgtcagtgctacaggagttacaccaaatgtagaaccttttctccatggtaacagttttgatctaggagaagatggtggcctgaaagtggatgatcatatgcacacatcccttcctgatatctatgctgccggtgacatctgtactacatcctggcagctgagcccagtctggcagcagatgaggctgtggacccaggctagacagatgggatggtatgcagcaaagtgcatggctgcagcgagttcaggagactctattgacatggatttcagctttgaactgtttgctcatgtgacaaaattttttaactataaggttgtactgctgggaaaatacaatgcacagggcttaggttcagatcatgaattaatgctgagatgtaccaaaggacgagaatacatcaaagtcgtcatgcaaaatggacgaatgatgggagctgtcttaattggtgaaaccgatttagaagaaacatttgaaaacctaatcttaaaccaaatgaatctttcatcatatggagaagatctgctagatccaaatattgatatagaagattattttgactaaaaatggaatttcttcaggaatcatataaagttccaaatgacaccagaaaaatcacaagtcaataaaatgaatgactgtattgagttaatgatgaccacactgaaaattacagaagtgataatgatattagtggaaaaatataaaaacataaattctaagtttgaaatcagttcaaagtttatttatagatatatctttccaatacaacactgaccgcttagataaaaatcttaagttatttatttctgtgttttaaacataaatatgtttacttgtgatttagctttggagcaaatttaggtaagttatctacttagccaaatgtactctagtagactagaaccattctttgtgaaatgtcaaaatatggctatggtttcaggaactttaaaatcggttgtattttactttaaatagagatgtagcaatatctcgtttgctaatatttatattgatgacttactccttttttgttgaattgtacttctggttttataacctgaaatcatctacaagcttgtccaactctagcccacgggtctaatgcagcccagaacagctttgaatgcagcccaacacaaatctgtaaactttcttaaaacatgagatttttcttgcaatttttttttttttaagctcatcagctatcgtcagtgttagcatattttatgtgcggcccaagacaattcttcttccaatgtggctcagggaagccaaaagattggacatccctgatctacatatttaacttaaagtatcactcagtgaacctctgtcagtataatattgctttcaaaaagatggttatgtcaaaagaaaaaatatagctaagtatataaaggcataaaaaacttaagacaattacatgaacttattctcaaatattttacattttttgtaaactttcttaaaacatgagatttttcttgcaattttttttttaagctcatcagctatcatcagtgttagcatattttatgtgcggcccaagacaattcttcttccaatgtggctcagggaagccaaaagattggacatccttgatctacatatttaacttaaagtatcactcagtgagcctctgtcagtataatattgctttcaaaaagatagttatgtcaaaagaaaaaatatagctaagtatataaaggcataaaaaacttaagacgattgtatgaacttattctcaaatattttacatttaaagggttttacataaaaatttttcccttgttttatactggaaaattatataattcatgatctctaattttcaaacattctcaaaagtttagatcttcagagataagctctgaaaatatagatccatacatataaaatatctatgaaattcttttaaaaactattgtctaactacaaaaataatggcatatacatgcataaaccatctttaattagaaaatttagtaacattcatatcaggcatcatcgatttttcttttcttagctcctgtattcttagaaccagattgctgaagcatgtttgcagccttcttctggaagttgcctgaatttttttcctccatctttttatcaccttgttcagaatgacaagtttgagacgattcagcctac

SEQ ID NO: 172610 - DNA, 1471 bp, Homo sapiens
  Payload ID: 13938
  Gene Symbol: PYROXD1
  Gene Name: pyridine nucleotide-disulphide oxidoreductase domain 1
  ENST ID: ENST00000544970
  CDS Start-End: 27-446
cagtaaaccactgggagtccggcagcatggaggcagcgcgccctcccccgacggcagggaagttcgtggtggtcggcggcggcatcgcgggcgtcacttgtgcggagcagttggctactcactttccatcggaagatattctcttggtaacagcttctcctgttattaaagcagttacaaatttcaagcagatttctaaaatattggaagaattcgatgttgaagaacaatcaagtaccatgttaggaaaacgctttcccaacattaaggttatagaatctggcgtaaagcaactgaagagtgaagaacactgcattgtaacagaagatggcaatcagcacgtatataagaaactctgtctgtgtgctggagctaaaccaaagttgatatgtgaaggaaatccttatgtattaggaatccgtgatacagacagtgctcaggtatgaaattgaaggctgtgaagtgatttgggccattaaagataaagctatagggaatactttcttcgatgcaggagcagctgaattcttgacttcaaagctcattgctgaaaaatcagaggctaaaattgcacataaaagaaccagatatacaactgaaggaaggaaaaaggaagctagaagcaaatctaaagcagataatgtaggaagtgcattgggaccagattggcatgaaggcttgaatcttaaaggaacaaaagagttttctcataagattcaccttgaaactatgtgtgaagtaaagaaaatctaccttcaggatgagtttagaattttgaagaaaaagtccttcacttttccaagagaccataagtcagttacagctgatacagagatgtggcctgtctatgtggaattgaccaatgaaaagatatatggctgcgatttcattgtcagtgctacaggagttacaccaaatgtagaaccttttctccatggtaacagttttgatctaggagaagatggtggcctgaaagtggatgatcatatgcacacatcccttcctgatatctatgctgccggtgacatctgtactacatcctggcagctgagcccagtctggcagcagatgaggctgtggacccaggctagacagatgggatggtatgcagcaaagtgcatggctgcagcgagttcaggagactctattgacatggatttcagctttgaactgtttgctcatgtgacaaaattttttaactataaggttgtactgctgggaaaatacaatgcacagggcttaggttcagatcatgaattaatgctgagatgtaccaaaggacgagaatacatcaaagtcgtcatgcaaaatggacgaatgatgggagctgtcttaattggtgaaaccgatttagaagaaacatttgaaaacctaatcttaaaccaaatgaatctttcatcatatggagaagatctgctagatccaaatattgatatagaagattattttgactaaaaatggaatttcttca

SEQ ID NO: 172611 - DNA, 1047 bp, Homo sapiens
  Payload ID: 13938
  Gene Symbol: PYROXD1
  Gene Name: pyridine nucleotide-disulphide oxidoreductase domain 1
  ENST ID: ENST00000543476
  CDS Start-End: 117-536
gtcggattatctggtaaggcaccggaagtgaccgcctcgcggctgcttcctctcctggagtccagagtcccgttgctccgccgcgatattcagtaaaccactgggagtccggcagcatggaggcagcgcgccctcccccgacggcagggaagttcgtggtggtcggcggcggcatcgcgggcgtcacttgtgcggagcagttggctactcactttccatcggaagatattctcttggtaacagcttctcctgttattaaagcagttacaaatttcaagcagatttctaaaatattggaagaattcgatgttgaagaacaatcaagtaccatgttaggaaaacgctttcccaacattaaggttatagaatctggcgtaaagcaactgaagagtgaagaacactgcattgtaacagaagatggcaatcagcacgtatataagaaactctgtctgtgtgctggagctaaaccaaagttgatatgtgaaggaaatccttatgtattaggaatccgtgatacagacagtgctcaggtatgaaattgaaggctgtgaagtgatttgggccattaaagataaagctatagggaatactttcttcgatgcaggagcagctgaattcttgacttcaaagctcattgctgaaaaatcagaggctaaaattgcacataaaagaaccagatatacaactgaaggaaggaaaaaggaagctagaagcaaatctaaagcagataatgtaggaagtgcattgggaccagattggcatgaaggcttgaatcttaaaggaacaaaagagttttctcataagattcaccttgaaactatgtgtgaagtaaagaaaatctaccttcaggatgagtttagaattttgaagaaaaagtccttcacttttccaagagaccataagtcagttacagctgatacagagatgtggcctgtctatgtggaattgaccaatgaaaagatatatggctgcgatttcattgtcagtgctacaggagttacaccaaatgtagaaccttttctccatggtaacagtgtaagtttgatc

SEQ ID NO: 172612 - DNA, 411 bp, Homo sapiens
  Payload ID: 13938
  Gene Symbol: PYROXD1
  Gene Name: pyridine nucleotide-disulphide oxidoreductase domain 1
  ENST ID: ENST00000544187
  CDS Start-End: 1-182
aaaaatcagaggctaaaattgcacataaaagaaccagatatacaactgaaggaaggaaaaaggaagctagaagcaaatctaaagcagataatgtaggaagtgcattgggaccagattggcatgaaggcttgaatcttaaaggaacaaaagagcaatactcacagcatcctcaccagaagtaaactccatctcagataactacgttctttgctcatccatgagaaacaacaactcatcttttcaaattttatcatgagattgcagcaatgtagtctcatcttcaggattcatttctaattacagttcttttgttatttccaccatatctgcctttctccattgaaatcttgaatccctcaaagtcatccatgaagttttctcataagattcaccttgaaactatgtgtgaag

SEQ ID NO: 172613 - DNA, 2028 bp, Homo sapiens
  Payload ID: 13939
  Gene Symbol: PYROXD2
  Gene Name: pyridine nucleotide-disulphide oxidoreductase domain 2
  Uniprot ID: Q8N2H3
  ENST ID: ENST00000370575
  CDS Start-End: 50-1795
ccaatcgctagcaaactccctgcctagcaaggcccagcctggggcagaaatggctgcaagtggccgaggtctctgcaaggctgtggccgcctctcccttcccggcgtggagacgagataacacggaagccaggggaggtctgaagcctgagtatgatgcggtggtgataggagcaggacacaacggactggtggctgcagcgtacctgcagagactgggggtgaacaccgccgtcttcgagaggcgccatgtgatcgggggtgcagctgtcactgaggagatcatcccagggtttaagttctcccgcgcgtcctacctgctcagcctgctgaggccgcagatttacactgatctggagctgaagaaacatgggctgaggcttcatcttcgaaacccctactccttcacccccatgctggaagagggtgcaggcagcaaggtgcccaggtgccttctgctgggcacagacatggcagaaaaccagaagcagatcgcccagttctcccagaaggatgcccaggtctttcccaaatatgaggagttcatgcatcgcttggcattagccattgaccctctgctggatgcggcccccgtggacatggcggccttccagcatggctccttgctgcaaaggatgaggtcgctctccaccctcaagcccctgctgaaggcaggccgcatcctgggagcccagcttccccgatattatgaggtcctcacagctcccattaccaaggtgctggatcagtggttcgagtctgagcctttaaaagccactctagccacagatgcagtgattggagccatgacaagtccccacactccggggagtgggtatgtgctgctgcaccatgtgatggggggcctggagggaatgcagggggcctggggctacgtccaggggggcatgggtgccctctctgatgcgatcgcaagctcagccaccacacatggagcaagcatcttcactgaaaagacagtggcgaaggtgcaggtgaacagtgaaggctgtgttcaaggagttgtgctggaagatggcacagaggtgagaagcaaaatggtgctgtccaacacatcaccgcagatcaccttcctgaagctgacgccacaggagtggcttcctgaggagttcctggagagaatctctcagctggacacccggtcgcctgtcaccaagatcaatgtggccgtagacaggctgcccagcttcctggcggcccccaatgctcccaggggccagccgctgccccatcaccaatgctccatccacctgaactgtgaagacaccctcctccttcatcaggcctttgaagatgccatggatggcctgccttcccacaggcctgtgattgagctctgcatcccttcctcgctggaccccaccctggctccccctggctgccatgtagtctccctcttcactcagtacatgccctatacgctggctggaggcaaggcctgggacgagcaggagagagacgcttatgcagacagagtgtttgattgcatcgaggtctatgcccctggcttcaaggactctgtggttggcagagacatcctcacaccaccagatttggagagaatcttcgggcttcctggagggaacatattccactgcgccatgtccctggaccagctctacttcgcccgccccgtgcccctgcattctggctaccgctgccctctccagggcctgtatctctgtggaagtggggctcatcctggaggaggtgtgatgggagctgctgggcgaaatgcagcacatgtggcctttagggacctcaagagcatgtgaccctgaaccagctctgacccaggaagaagactccacccctgaattccaagtgctccattggatcagcttcccaggaagttcagcttcgggttagtacataaggccaccacaatgctcaagaaattattttagaaaaaacgtacgagttacatttagtgcaagttgaccttatgcccatgcctccatacatggactggttctgttttattaaaactaatatttcatacagatta

SEQ ID NO: 172614 - DNA, 7366 bp, Homo sapiens
  Payload ID: 13940
  Gene Symbol: PDXK
  Gene Name: pyridoxal (pyridoxine, vitamin B6) kinase
  Uniprot ID: O00764
  ENST ID: ENST00000291565
  CDS Start-End: 184-1122
cggagccgcccgctgaggtcagaaggaggcgtctgcgctgatcgggtccgccgcgcgccagagccagagtcgcagccgaggggagccggggccggagcccgagcccgagccgagccggagcccgagcgagcggcggagaccgtgcccccgcctcggccccgcgccgccgcggccaggcccggcatggaggaggagtgccgggtgctctccatacagagccacgtcatccgcggctacgtgggcaaccgggcggccacgttcccgctgcaggttttgggatttgagattgacgcggtgaactctgtccagttttcaaaccacacaggctatgcccactggaagggccaagtgctgaattcagatgagctccaggagttgtacgaaggcctgaggctgaacaacatgaataaatatgactacgtgctcacaggttatacgagggacaagtcgttcctggccatggtggtggacattgtgcaggagctgaagcagcagaaccccaggctggtgtacgtgtgtgatccagtcttgggtgacaagtgggacggcgaaggctcgatgtacgtcccggaggacctccttcccgtctacaaagaaaaagtggtgccgcttgcagacattatcacgcccaaccagtttgaggccgagttactgagtggccggaagatccacagccaggaggaagccttgcgggtgatggacatgctgcactctatgggccccgacaccgtggtcatcaccagctccgacctgccctccccgcagggcagcaactacctgattgtgctggggagtcagaggaggaggaatcccgctggctccgtggtgatggaacgcatccggatggacattcgcaaagtggacgccgtctttgtgggcactggggacctgtttgctgccatgctcctggcgtggacacacaagcaccccaataacctcaaggtggcctgtgagaagaccgtgtctaccttgcaccacgttctgcagaggaccatccagtgtgcaaaagcccaggccggggaaggagtgaggcccagccccatgcagctggagctgcggatggtgcagagcaaaagggacatcgaggacccagagatcgtcgtccaggccacggtgctgtgagggccccgccgcttgcccgtgacacgcagcgcgttggtgtctccgtgtttgtccctgtgaaaacatgtaacgtctgccttagagccatgaccgaaacttgatatttttttctttcatgagtgtccggcatctgctggtcttcattgtgaaacgtgccagtcgtgctttgtgaaaaataacaaagtggtcacagaaatttgtgatctgaaaacccggctcccttccccacaaggctcctgggcctccgggaagacgggcccctgtttgccatctcgggggtgttccctgtgggagggtgagtgggtgaggccgagcctgctgcgtgtggagcctcgagtgggccctggctgccactaccgtacagaggccgtgtcgcgctgggctgggcctgggtggcctctgtctttgcatctctgagaaggagtcgggtggtaacggttggggtcaggaagaattctgccaagtatctttactgtcattctgaccatagcctctttgttcccgcattcgaacttttggttcttactttgctgctcgtttagtccctggggatttcagatcttaggctgttgtttcaccgtatgggagggttgatgtgagcttgcttggagacacacggtgcagcatcagggaccttcccaggccccagcaaattcaagtcggtctgcagacctctcagctacccgcgggacctcttgtaacccatcggcatcttccaggaatccgccgagtgacttgaggaagatgctaacgcagtaaggtctgtgctgggccaagagcagctttgaagctccagagaaccaccccgtcaggttccttgtggaagctcccctcatccgtggtgcagcaggctgagcactgcgcgtttgccacgtgctgcccgtgacagcacattgagccacagcatttgtagacaggacagaggggtgcctgccccctgcccctgctggcacatttaacccttgtcccctgacctcagttctgtgccccaccaaatgcccaggggcaagaggccaccctggaagctgccaatcttccaaggtgggtgtggggcacggtgggggcgggcagctcccaggcccttgggcaggctggggtgacggcagaggccacagcaccagctctgacaagtcctatcatcctctgctcagcagtgacctccctggccccactttgcccagagtttggggtccccccaggtatagctataggcggcagtgcctgtccctggcctgccttgatttcagccacacccctgcagccctgcatcccagctctggggtgtgcagaggtttgtgtctccagggaacccacggctggagagaaatagggagatgcaggaagtgggggcccatggggcccccaagaagcggactctccaaggggtacccccaccccgctaccttccccacggacgggcccctcctggagcccataccctcctgtgaggccattccagtgtcttctagaaagactcgcttgccaggagtgcgttctttgttgaaaaatgccctgaagcgaaaagatgcaggtttatatggaacccccaccccctcccccactctcccactctgttcgttctgaatgtcttcacgagcgtgcatcagggcgcctggctcccccacctcagccagtgagtcagacacgggtttcgcagccatgtttcctggctccgaggacacgggtggcaggcccgttgcagcccagagccactggtccctacagggcgccgccacaccagcaggaaggaggatggctgtgtccggagcctggcggggaggcggcctccccagtatgtgagtgcagggatctgccagaaccacctggccctctgtagggcgtttaactggaaataccctcactgccaagtggagactggggcgtgtgccacattgccagccaccaggaaagcttttctttttcttttttttttttttttaaacaccaagagcacgtatagcatgggggaaagaacctaaatgtctctctgtcctgtgagctggtgaaaaacccagcatgagaacgcagtgtcaggtgtgggactccttctgcccctgcagtgggtgttacgggcggtgtgccctggcgagcaagctttgattcttggttctttgagctcgtttcagaggctgagtccccacatcagctttagttcttggacttccctgtattaagcaagaattaggagaatggctgtccctgcaggcgcctcccgtaaatcctgagctctctggcgcaatctgaaacttctcttctgttttctttggctgtatcagccgaaccaggagaggcctgggctgcgactaaggagaaagaaatcgggggtttctgagagcagatggtgcctttgtgggtgcagggcttttgtggaaattgtcagcctctacgggcagagtccggcatcccctccccagactgcctgctgtcaaaccacggagcagctggagcctgccctgtccacggcccgtttccacccgggcatgttcgtctctcctgacttcggcagaggcccctggtggccttcagtttcagtttctcatccaggaaggtaaccttgggcattggcagtgggtttccctatggcttggatccagattagaattgatctttgttttcactttccatagttaataacatgcaaaataatgagaagaatttattttaaggtgacagctatactggtccaacatcgcctgcttattgtcagggtacagaagtttaatactttcttaatccagtttttcaaacttctccctgtagaccgtaaggatgaattccacaataggatcctttttaaaatcgattttaaattgttgcctagtcctgccaaggttattatgtgcatctgttatttttccaatacatgtaaacagttgcagcatgatgctttgtttaatgtcctgttcttaagctcgttagagccagttttgaaacgtttggtcttaccgtgaacggaggctggcttggcttagccacgctgatgagtaagtgagggatgtctccatcttgagatcaccaggcaagagagttgcctgcaccaggtaagaggccaaagcccctggggtaacagtccccaccgctacccgaggtaaaacaataaaagctatgtggttgagctcaggcctctcgtgcctggtgtcagagaaggcagagcccacagtaggtgcacggtgcaaggccctgggagggcactggccagggaaggtggtatagatggccctcagattgcggggccccgagcagctccccactctgcccgtccaccttccctggctccagcctcattctctctttagtttaactatgcaaagagaggaggttgagagtgttctggcagctggagctcttttccttgtccttcctgccctccgatggggccacctgtgtcggggcagcagtgtccatgtttatggagatcagaggtgtccccactgtgtggctggactgtactctgctgcccgggtagccaggagtctctccctctctcccctgccgcctgcctggtctcatgggcctccttcacacacccctccctgtggatcgcctgcctgggcccagagcaggggaactggagtttgtgagtgagcagagcaggttatgtgcagacagggaaacgagaactttggacctggctttctgagtccaggtgagagctgtgtggccccccgatgccactctgcccgccggagggatgtgcctgctgagccttttccttccacgccgcctctcactgccaggccagcggcttccgctgagactcgctggagaggcggctcccgtgtccgtccaccgagcactcagatggatgctgatcaccagggccgagggggctcccagaaggaccccaggccctggggagggtggctgtgggaggccaagtccactgcccggaagtcttgtcagccctaagccagggaagcctggagcgtggcctggcgggtctgggtggacaccgtccccactccggactcccagcacaggggaggatacctgagcctgtatggccctgtagccctgggcagagctgggcctgtcgtgtgttcctgcctggcaggtgcaggtgctggccatctgcaggtggaaggaggtgggaatcttggattttttgtttttttttgtttttttttttttgaggtgaagtctcgctctgacacccaggctggcgtgcagtggtgtgatctcggctcactgcaaactccgcttcctgggttcaagtggttctcctgccccagcctcccaagtagctgggattacaggcatgcgccaccacgctcagctgatttttgtatttttagtagagatggggtttcaccatgttggccaagctggtctcaaactcctgacctcaagtgatctgcccgcctcggcctcccagagtgctgggattacaggcatgagccagtgcacccggcggaatcttggaatttttatagacagcacctcagtttctgactccagccgcacacctcctgcctctgccagcaggggttgccgccagaccagagccagggccaggtccctgcgtccatcccccccggtaggatggacgtgagccatccttctaggggacttttttcagtgtgcgactcgtctctgttaggtggtaggagccagtttgtgtggcctgtgccacgctccacagtgcgtggctgggctctgtgtgtggcctgtgtcccctgtccctgcaggacccagcaggcatcgtggcgtgacagctgtgtccaagccactgcccgggcatcccatcacccaccagggtgcacggtctctcctgctgggggctttctgtcgcatgtgtgtctcctgtcgactctgcagtttgttctcagagcagaatgtttcctgttctcagtgcacaaagacactggttttcaatcggcgtctaaaaccacgttcctgcctttcattgcaacacggtgtgttcatttgtttaaaacagtttaatgagtaagtttagatgactggtcaatatcttaaaaatgtatattagtaagaagttcttcctggaatttttctttcgattctggcagaataaacaggtgtttttagttttcccactgtctgagccaagcaggaccctgtcccagagcaagagatgtccccttccatctctgacccttgcctgggacaagctttgatggggggccccagcttcaaggctgtggtgggaacagcacccccaaatgccagcctctcctttcttcccatccaccagtatactgcggggccatttctggtctttgtccaacaggaaacccatttctggtgggatatgccttccagtgccacagggccactcaccccatgcatctctgtcctgcccgtcagtgctgggacggacagcaagggcaagcccagtgtctggcggataggtgggtgggaacagagaggggagaatgccgtcctaagcttctgcttggggatcccccacacgacctgggtactgcctgggaaacctgtcctaagtaaaactatggacctcgcctcgcccaccggcctgcgaagccagcatctccgtgaaggtggatggaagcgcctttgtcctcattttgagctgcaagctgggtcagcggctctgaagccctcgagtgactttctaacccaagacccagcccctggcaggaggagggtgggtgcagggctggtgggacaaaaagaggcctcagcaggcctggaagacccttccagtacatcccacagcgtgtcgagcagctgggagaacctgtgtcaagctcgagccgtcataggtccccatgaggtgtctgaagccccttcttggtgatgggaggcagaggtgctgacgttctggagcatggacgtgagtcctcagctggctccgcgtgggcccttggagggtgccaggtgtgtggtgaccttctggatgcctttaacttcatggctgcgtcattcctgatttagaactttaaccggagcttcatctagtgattgcaaaactggaccaatgggaggacggcggcgcagcccgctccctccgtggaatggagctcagctcttcggaggcatcaaagcacctgtcgcctccgtggtccccctgctgagggagtgcggcctctgcaaggttcgggggtggcttcgtttgcctggagtggccggccctgcttgtgccatgtggatgtttgtgagcctcggtcctacagcactgtgtaggctgcatctgtttcgtgctggtcctgttgacttgtatgatatccacaaataaatattttcatggcggtcgtgttga

SEQ ID NO: 172615 - DNA, 2583 bp, Homo sapiens
  Payload ID: 13940
  Gene Symbol: PDXK
  Gene Name: pyridoxal (pyridoxine, vitamin B6) kinase
  ENST ID: ENST00000327574
  CDS Start-End: 351-797
aagccatcccactggcctggactctgctgggattattttgaccccccagggcagagtgtagccatctgactggctttctctctcggcaggagacggggcgcacgcctgcaggcttcagtttcacattcttggtacctcctggtggtgcctgggagggagccactgctgtacagagatgccaattccagaggcatggtccggcacagagcgctggcttccagctgaaggacatgtgtaacagcaggagatacctttctctggggtcccaggctcccgtcctggaccttggcaccccgccccccgtgcattgtcgtcttctgagtctggctttgtctggcacatgaagttggatgggtagactctggaagcgtccagaccagcttgcgatgctgatgaataagctgattttgatggggtgtgtgaaacggagatgccagcccaggggctcagcttgctcgtgctctcatttaaaagcagaaaatagcgacttcattctcggatacgtttgccagccccaaaggattaattatctacacacccagaagcagtggagcagaatattttggcaggattttcaggatttgtgtcatcgttgcttaatatctgtttcttcacagtcggttttgggatttgagattgacgcggtgaactctgtccagttttcaaaccacacagagacaaggtcggtctctgtcgcccaggctggcgtgaagtggcgcaaccagctcactgcagccttgacctcctgggctgaagcaatctttctgcctccacctcccgagtggctgggactatagttgtgcaccagcacgcccacctcctgcccagggttgttactggggtggtcacgtgggcagcttctgcctgggatgggccacaaagccagactcccggcagggacacgggtgttccacacaagctgcgttgttggttccctgacgcccttcaggctggggggtgggaaagccgatcccccaagtgcctgcagagcccacctggcgcaggcctcgccgcctcgaggctgctgctcgcacttctgccccttcccccggccaggcccccgttccttgaggccgtaccacaaggtgcgttcatttttccacaccgtgagctgggcttggcagagcctccaccttgtggccagtattcccagtggcccctttgagaggatttcctggagctccctgtctgagcttcccggactgagggcactgggaaggagcctgcggagctggaggtcagcgggtggacgggttgcgctgtcctggctttcggagtgtagagccagaggggatgggacaggtgccctgctgctgggcttggtggtccctgctgcagggaaggggcagctggtgtgaacacaaggagctgcggggctggagaaggccagggccaggagcctgccgacggacaccagcgaggggccaggccgggccaggagcctgccgacggacaccagcgaggggccaggccgggccagactccctggccggctgggatctgacaggagtgccaggctccttgggccgcccgaggaaccgcttgtttgcctgtgctttttcatctgtaaatggaatgagttggacacaagatccaagcgccctcccctgttggagaaggttcttgtgggctctgggcccatcccacatcccacagtgggcaggaggccaccaagaggtgcaagaccatgccctctgtttcgataggaagctgggcctcagaggggcctggggcctgtgtctgagacccggccaagtgctggacgtctccccttcctcatggctgttatggctgaattacgtccccccaaattctcatgttgcagccttaaccccagcacctcagtgtgggactgggtttggagatggagcccctacagaggtcagcaggttaaaagaggccatcagggctctgggtgggccctgatccaagctgcttggtgtccttgtaagaagaagagatgaggacacagacacacacagagggacagccccatgaggaaacagggaggcaatgccgtctgcaagcccagggcagaggcctcaggaaccagccctggtgacacctggaccttggacccccgtgcccaggacagtaggagaattggagccgcctggctgcagtccttcccgatggcaccctgtattagtccgttctcacactgctaattgttgggaaaagggcttgtggaatgcctgtataaactggccatgaaaatatgggacaataagttgtggaaagccacaagaggcctctgaggaggaaagcctcctaattgccatcatgttcgcatgctcagggcgagacctgctgtcttatctgtaaacaccgtgttcaaggagaaagacattccttcgaagcactggactgtggacagacacacgagctcctggttaagcccgctcccaccagctcctgtccgataagttaaagatacgctgtttgagcacaaaggagattcattgaaaccgctattgctgtagattacgcctgtgacgcactgcctccctttcactgtttcgccctgaatatctgcttctcagatctaagtgactgtactcaataaatagcgtggagaccaga

SEQ ID NO: 172616 - DNA, 2251 bp, Homo sapiens
  Payload ID: 13940
  Gene Symbol: PDXK
  Gene Name: pyridoxal (pyridoxine, vitamin B6) kinase
  ENST ID: ENST00000398081
  CDS Start-End: 202-465
gcgcggaactcgcgggttcggagccgcccgctgaggtcagaaggaggcgtctgcgctgatcgggtccgccgcgcgccagagccagagtcgcagccgaggggagccggggccggagcccgagcccgagccgagccggagcccgagcgagcggcggagaccgtgcccccgcctcggccccgcgccgccgcggccaggcccggcatggaggaggagtgccgggtgctctccatacagagccacgtcatccgcggctacgtgggcaaccgggcggccacgttcccgctgcaggttttgggatttgagattgacgcggtgaactctgtccagttttcaaaccacacagagacaaggtcggtctctgtcgcccaggctggcgtgaagtggcgcaaccagctcactgcagccttgacctcctgggctgaagcaatctttctgcctccacctcccgagtggctgggactatagttgtgcaccagcacgcccacctcctgcccagggttgttactggggtggtcacgtgggcagcttctgcctgggatgggccacaaagccagactcccggcagggacacgggtgttccacacaagctgcgttgttggttccctgacgcccttcaggctggggggtgggaaagccgatcccccaagtgcctgcagagcccacctggcgcaggcctcgccgcctcgaggctgctgctcgcacttctgccccttcccccggccaggcccccgttccttgaggccgtaccacaaggtgcgttcatttttccacaccgtgagctgggcttggcagagcctccaccttgtggccagtattcccagtggcccctttgagaggatttcctggagctccctgtctgagcttcccggactgagggcactgggaaggagcctgcggagctggaggtcagcgggtggacgggttgcgctgtcctggctttcggagtgtagagccagaggggatgggacaggtgccctgctgctgggcttggtggtccctgctgcagggaaggggcagctggtgtgaacacaaggagctgcggggctggagaaggccagggccaggagcctgccgacggacaccagcgaggggccaggccgggccaggagcctgccgacggacaccagcgaggggccaggccgggccagactccctggccggctgggatctgacaggagtgccaggctccttgggccgcccgaggaaccgcttgtttgcctgtgctttttcatctgtaaatggaatgagttggacacaagatccaagcgccctcccctgttggagaaggttcttgtgggctctgggcccatcccacatcccacagtgggcaggaggccaccaagaggtgcaagaccatgccctctgtttcgataggaagctgggcctcagaggggcctggggcctgtgtctgagacccggccaagtgctggacgtctccccttcctcatggctgttatggctgaattacgtccccccaaattctcatgttgcagccttaaccccagcacctcagtgtgggactgggtttggagatggagcccctacagaggtcagcaggttaaaagaggccatcagggctctgggtgggccctgatccaagctgcttggtgtccttgtaagaagaagagatgaggacacagacacacacagagggacagccccatgaggaaacagggaggcaatgccgtctgcaagcccagggcagaggcctcaggaaccagccctggtgacacctggaccttggacccccgtgcccaggacagtaggagaattggagccgcctggctgcagtccttcccgatggcaccctgtattagtccgttctcacactgctaattgttgggaaaagggcttgtggaatgcctgtataaactggccatgaaaatatgggacaataagttgtggaaagccacaagaggcctctgaggaggaaagcctcctaattgccatcatgttcgcatgctcagggcgagacctgctgtcttatctgtaaacaccgtgttcaaggagaaagacattccttcgaagcactggactgtggacagacacacgagctcctggttaagcccgctcccaccagctcctgtccgataagttaaagatacgctgtttgagcacaaaggagattcattgaaaccgctattgctgtagattacgcctgtgacgcactgcctccctttcactgtttcgccctgaatatctgcttctcagatctaagtgactgtactcaataaatagcgtggagaccaga

SEQ ID NO: 172617 - DNA, 7297 bp, Homo sapiens
  Payload ID: 13940
  Gene Symbol: PDXK
  Gene Name: pyridoxal (pyridoxine, vitamin B6) kinase
  Uniprot ID: O00764
  ENST ID: ENST00000468090
  CDS Start-End: 199-1053
cggaactcgcgggttcggagccgcccgctgaggtcagaaggaggcgtctgcgctgatcgggtccgccgcgcgccagagccagagtcgcagccgaggggagccggggccggagcccgagcccgagccgagccggagcccgagcgagcggcggagaccgtgcccccgcctcggccccgcgccgccgcggccaggcccggcatggaggaggagtgccgggtgctctccatacagagccacgtcatccgcggctacgtgggcaaccgggcggccacgttcccgctgcaggttttgggatttgagattgacgcggtgaactctgtccagttttcaaaccacacaggctatgcccactggaagggccaagtgctgaattcagatgagctccaggagttgtacgaaggcctgaggctgaacaacatgaataaatatgactacgtgctcacagtgtgtgatccagtcttgggtgacaagtgggacggcgaaggctcgatgtacgtcccggaggacctccttcccgtctacaaagaaaaagtggtgccgcttgcagacattatcacgcccaaccagtttgaggccgagttactgagtggccggaagatccacagccaggaggaagccttgcgggtgatggacatgctgcactctatgggccccgacaccgtggtcatcaccagctccgacctgccctccccgcagggcagcaactacctgattgtgctggggagtcagaggaggaggaatcccgctggctccgtggtgatggaacgcatccggatggacattcgcaaagtggacgccgtctttgtgggcactggggacctgtttgctgccatgctcctggcgtggacacacaagcaccccaataacctcaaggtggcctgtgagaagaccgtgtctaccttgcaccacgttctgcagaggaccatccagtgtgcaaaagcccaggccggggaaggagtgaggcccagccccatgcagctggagctgcggatggtgcagagcaaaagggacatcgaggacccagagatcgtcgtccaggccacggtgctgtgagggccccgccgcttgcccgtgacacgcagcgcgttggtgtctccgtgtttgtccctgtgaaaacatgtaacgtctgccttagagccatgaccgaaacttgatatttttttctttcatgagtgtccggcatctgctggtcttcattgtgaaacgtgccagtcgtgctttgtgaaaaataacaaagtggtcacagaaatttgtgatctgaaaacccggctcccttccccacaaggctcctgggcctccgggaagacgggcccctgtttgccatctcgggggtgttccctgtgggagggtgagtgggtgaggccgagcctgctgcgtgtggagcctcgagtgggccctggctgccactaccgtacagaggccgtgtcgcgctgggctgggcctgggtggcctctgtctttgcatctctgagaaggagtcgggtggtaacggttggggtcaggaagaattctgccaagtatctttactgtcattctgaccatagcctctttgttcccgcattcgaacttttggttcttactttgctgctcgtttagtccctggggatttcagatcttaggctgttgtttcaccgtatgggagggttgatgtgagcttgcttggagacacacggtgcagcatcagggaccttcccaggccccagcaaattcaagtcggtctgcagacctctcagctacccgcgggacctcttgtaacccatcggcatcttccaggaatccgccgagtgacttgaggaagatgctaacgcagtaaggtctgtgctgggccaagagcagctttgaagctccagagaaccaccccgtcaggttccttgtggaagctcccctcatccgtggtgcagcaggctgagcactgcgcgtttgccacgtgctgcccgtgacagcacattgagccacagcatttgtagacaggacagaggggtgcctgccccctgcccctgctggcacatttaacccttgtcccctgacctcagttctgtgccccaccaaatgcccaggggcaagaggccaccctggaagctgccaatcttccaaggtgggtgtggggcacggtgggggcgggcagctcccaggcccttgggcaggctggggtgacggcagaggccacagcaccagctctgacaagtcctatcatcctctgctcagcagtgacctccctggccccactttgcccagagtttggggtccccccaggtatagctataggcggcagtgcctgtccctggcctgccttgatttcagccacacccctgcagccctgcatcccagctctggggtgtgcagaggtttgtgtctccagggaacccacggctggagagaaatagggagatgcaggaagtgggggcccatggggcccccaagaagcggactctccaaggggtacccccaccccgctaccttccccacggacgggcccctcctggagcccataccctcctgtgaggccattccagtgtcttctagaaagactcgcttgccaggagtgcgttctttgttgaaaaatgccctgaagcgaaaagatgcaggtttatatggaacccccaccccctcccccactctcccactctgttcgttctgaatgtcttcacgagcgtgcatcagggcgcctggctcccccacctcagccagtgagtcagacacgggtttcgcagccatgtttcctggctccgaggacacgggtggcaggcccgttgcagcccagagccactggtccctacagggcgccgccacaccagcaggaaggaggatggctgtgtccggagcctggcggggaggcggcctccccagtatgtgagtgcagggatctgccagaaccacctggccctctgtagggcgtttaactggaaataccctcactgccaagtggagactggggcgtgtgccacattgccagccaccaggaaagcttttctttttcttttttttttttttttaaacaccaagagcacgtatagcatgggggaaagaacctaaatgtctctctgtcctgtgagctggtgaaaaacccagcatgagaacgcagtgtcaggtgtgggactccttctgcccctgcagtgggtgttacgggcggtgtgccctggcgagcaagctttgattcttggttctttgagctcgtttcagaggctgagtccccacatcagctttagttcttggacttccctgtattaagcaagaattaggagaatggctgtccctgcaggcgcctcccgtaaatcctgagctctctggcgcaatctgaaacttctcttctgttttctttggctgtatcagccgaaccaggagaggcctgggctgcgactaaggagaaagaaatcgggggtttctgagagcagatggtgcctttgtgggtgcagggcttttgtggaaattgtcagcctctacgggcagagtccggcatcccctccccagactgcctgctgtcaaaccacggagcagctggagcctgccctgtccacggcccgtttccacccgggcatgttcgtctctcctgacttcggcagaggcccctggtggccttcagtttcagtttctcatccaggaaggtaaccttgggcattggcagtgggtttccctatggcttggatccagattagaattgatctttgttttcactttccatagttaataacatgcaaaataatgagaagaatttattttaaggtgacagctatactggtccaacatcgcctgcttattgtcagggtacagaagtttaatactttcttaatccagtttttcaaacttctccctgtagaccgtaaggatgaattccacaataggatcctttttaaaatcgattttaaattgttgcctagtcctgccaaggttattatgtgcatctgttatttttccaatacatgtaaacagttgcagcatgatgctttgtttaatgtcctgttcttaagctcgttagagccagttttgaaacgtttggtcttaccgtgaacggaggctggcttggcttagccacgctgatgagtaagtgagggatgtctccatcttgagatcaccaggcaagagagttgcctgcaccaggtaagaggccaaagcccctggggtaacagtccccaccgctacccgaggtaaaacaataaaagctatgtggttgagctcaggcctctcgtgcctggtgtcagagaaggcagagcccacagtaggtgcacggtgcaaggccctgggagggcactggccagggaaggtggtatagatggccctcagattgcggggccccgagcagctccccactctgcccgtccaccttccctggctccagcctcattctctctttagtttaactatgcaaagagaggaggttgagagtgttctggcagctggagctcttttccttgtccttcctgccctccgatggggccacctgtgtcggggcagcagtgtccatgtttatggagatcagaggtgtccccactgtgtggctggactgtactctgctgcccgggtagccaggagtctctccctctctcccctgccgcctgcctggtctcatgggcctccttcacacacccctccctgtggatcgcctgcctgggcccagagcaggggaactggagtttgtgagtgagcagagcaggttatgtgcagacagggaaacgagaactttggacctggctttctgagtccaggtgagagctgtgtggccccccgatgccactctgcccgccggagggatgtgcctgctgagccttttccttccacgccgcctctcactgccaggccagcggcttccgctgagactcgctggagaggcggctcccgtgtccgtccaccgagcactcagatggatgctgatcaccagggccgagggggctcccagaaggaccccaggccctggggagggtggctgtgggaggccaagtccactgcccggaagtcttgtcagccctaagccagggaagcctggagcgtggcctggcgggtctgggtggacaccgtccccactccggactcccagcacaggggaggatacctgagcctgtatggccctgtagccctgggcagagctgggcctgtcgtgtgttcctgcctggcaggtgcaggtgctggccatctgcaggtggaaggaggtgggaatcttggattttttgtttttttttgtttttttttttttgaggtgaagtctcgctctgacacccaggctggcgtgcagtggtgtgatctcggctcactgcaaactccgcttcctgggttcaagtggttctcctgccccagcctcccaagtagctgggattacaggcatgcgccaccacgctcagctgatttttgtatttttagtagagatggggtttcaccatgttggccaagctggtctcaaactcctgacctcaagtgatctgcccgcctcggcctcccagagtgctgggattacaggcatgagccagtgcacccggcggaatcttggaatttttatagacagcacctcagtttctgactccagccgcacacctcctgcctctgccagcaggggttgccgccagaccagagccagggccaggtccctgcgtccatcccccccggtaggatggacgtgagccatccttctaggggacttttttcagtgtgcgactcgtctctgttaggtggtaggagccagtttgtgtggcctgtgccacgctccacagtgcgtggctgggctctgtgtgtggcctgtgtcccctgtccctgcaggacccagcaggcatcgtggcgtgacagctgtgtccaagccactgcccgggcatcccatcacccaccagggtgcacggtctctcctgctgggggctttctgtcgcatgtgtgtctcctgtcgactctgcagtttgttctcagagcagaatgtttcctgttctcagtgcacaaagacactggttttcaatcggcgtctaaaaccacgttcctgcctttcattgcaacacggtgtgttcatttgtttaaaacagtttaatgagtaagtttagatgactggtcaatatcttaaaaatgtatattagtaagaagttcttcctggaatttttctttcgattctggcagaataaacaggtgtttttagttttcccactgtctgagccaagcaggaccctgtcccagagcaagagatgtccccttccatctctgacccttgcctgggacaagctttgatggggggccccagcttcaaggctgtggtgggaacagcacccccaaatgccagcctctcctttcttcccatccaccagtatactgcggggccatttctggtctttgtccaacaggaaacccatttctggtgggatatgccttccagtgccacagggccactcaccccatgcatctctgtcctgcccgtcagtgctgggacggacagcaagggcaagcccagtgtctggcggataggtgggtgggaacagagaggggagaatgccgtcctaagcttctgcttggggatcccccacacgacctgggtactgcctgggaaacctgtcctaagtaaaactatggacctcgcctcgcccaccggcctgcgaagccagcatctccgtgaaggtggatggaagcgcctttgtcctcattttgagctgcaagctgggtcagcggctctgaagccctcgagtgactttctaacccaagacccagcccctggcaggaggagggtgggtgcagggctggtgggacaaaaagaggcctcagcaggcctggaagacccttccagtacatcccacagcgtgtcgagcagctgggagaacctgtgtcaagctcgagccgtcataggtccccatgaggtgtctgaagccccttcttggtgatgggaggcagaggtgctgacgttctggagcatggacgtgagtcctcagctggctccgcgtgggcccttggagggtgccaggtgtgtggtgaccttctggatgcctttaacttcatggctgcgtcattcctgatttagaactttaaccggagcttcatctagtgattgcaaaactggaccaatgggaggacggcggcgcagcccgctccctccgtggaatggagctcagctcttcggaggcatcaaagcacctgtcgcctccgtggtccccctgctgagggagtgcggcctctgcaaggttcgggggtggcttcgtttgcctggagtggccggccctgcttgtgccatgtggatgtttgtgagcctcggtcctacagcactgtgtaggctgcatctgtttcgtgctggtcctgttgacttgtatgatatccacaaataaatattttcatggcggtcgtgttga

SEQ ID NO: 172618 - DNA, 7194 bp, Homo sapiens
  Payload ID: 13940
  Gene Symbol: PDXK
  Gene Name: pyridoxal (pyridoxine, vitamin B6) kinase
  ENST ID: ENST00000467908
  CDS Start-End: 132-950
ggggggctcgcggggggctcgcgggggggctcgcggggggctcgcggggggctcgaggcgtcccatgtgggcagccgttgggacctgccaagcactgcgcctagtgatctccttcgggtttgagccagtccatggggaggagccgtccaccaggctatgcccactggaagggccaagtgctgaattcagatgagctccaggagttgtacgaaggcctgaggctgaacaacatgaataaatatgactacgtgctcacaggttatacgagggacaagtcgttcctggccatggtggtggacattgtgcaggagctgaagcagcagaaccccaggctggtgtacgtgtgtgatccagtcttgggtgacaagtgggacggcgaaggctcgatgtacgtcccggaggacctccttcccgtctacaaagaaaaagtggtgccgcttgcagacattatcacgcccaaccagtttgaggccgagttactgagtggccggaagatccacagccaggaggaagccttgcgggtgatggacatgctgcactctatgggccccgacaccgtggtcatcaccagctccgacctgccctccccgcagggcagcaactacctgattgtgctggggagtcagaggaggaggaatcccgctggctccgtggtgatggaacgcatccggatggacattcgcaaagtggacgccgtctttgtgggcactggggacctgtttgctgccatgctcctggcgtggacacacaagcaccccaataacctcaaggtggcctgtgagaagaccgtgtctaccttgcaccacgttctgcagaggaccatccagtgtgcaaaagcccaggccggggaaggagtgaggcccagccccatgcagctggagctgcggatggtgcagagcaaaagggacatcgaggacccagagatcgtcgtccaggccacggtgctgtgagggccccgccgcttgcccgtgacacgcagcgcgttggtgtctccgtgtttgtccctgtgaaaacatgtaacgtctgccttagagccatgaccgaaacttgatatttttttctttcatgagtgtccggcatctgctggtcttcattgtgaaacgtgccagtcgtgctttgtgaaaaataacaaagtggtcacagaaatttgtgatctgaaaacccggctcccttccccacaaggctcctgggcctccgggaagacgggcccctgtttgccatctcgggggtgttccctgtgggagggtgagtgggtgaggccgagcctgctgcgtgtggagcctcgagtgggccctggctgccactaccgtacagaggccgtgtcgcgctgggctgggcctgggtggcctctgtctttgcatctctgagaaggagtcgggtggtaacggttggggtcaggaagaattctgccaagtatctttactgtcattctgaccatagcctctttgttcccgcattcgaacttttggttcttactttgctgctcgtttagtccctggggatttcagatcttaggctgttgtttcaccgtatgggagggttgatgtgagcttgcttggagacacacggtgcagcatcagggaccttcccaggccccagcaaattcaagtcggtctgcagacctctcagctacccgcgggacctcttgtaacccatcggcatcttccaggaatccgccgagtgacttgaggaagatgctaacgcagtaaggtctgtgctgggccaagagcagctttgaagctccagagaaccaccccgtcaggttccttgtggaagctcccctcatccgtggtgcagcaggctgagcactgcgcgtttgccacgtgctgcccgtgacagcacattgagccacagcatttgtagacaggacagaggggtgcctgccccctgcccctgctggcacatttaacccttgtcccctgacctcagttctgtgccccaccaaatgcccaggggcaagaggccaccctggaagctgccaatcttccaaggtgggtgtggggcacggtgggggcgggcagctcccaggcccttgggcaggctggggtgacggcagaggccacagcaccagctctgacaagtcctatcatcctctgctcagcagtgacctccctggccccactttgcccagagtttggggtccccccaggtatagctataggcggcagtgcctgtccctggcctgccttgatttcagccacacccctgcagccctgcatcccagctctggggtgtgcagaggtttgtgtctccagggaacccacggctggagagaaatagggagatgcaggaagtgggggcccatggggcccccaagaagcggactctccaaggggtacccccaccccgctaccttccccacggacgggcccctcctggagcccataccctcctgtgaggccattccagtgtcttctagaaagactcgcttgccaggagtgcgttctttgttgaaaaatgccctgaagcgaaaagatgcaggtttatatggaacccccaccccctcccccactctcccactctgttcgttctgaatgtcttcacgagcgtgcatcagggcgcctggctcccccacctcagccagtgagtcagacacgggtttcgcagccatgtttcctggctccgaggacacgggtggcaggcccgttgcagcccagagccactggtccctacagggcgccgccacaccagcaggaaggaggatggctgtgtccggagcctggcggggaggcggcctccccagtatgtgagtgcagggatctgccagaaccacctggccctctgtagggcgtttaactggaaataccctcactgccaagtggagactggggcgtgtgccacattgccagccaccaggaaagcttttctttttcttttttttttttttttaaacaccaagagcacgtatagcatgggggaaagaacctaaatgtctctctgtcctgtgagctggtgaaaaacccagcatgagaacgcagtgtcaggtgtgggactccttctgcccctgcagtgggtgttacgggcggtgtgccctggcgagcaagctttgattcttggttctttgagctcgtttcagaggctgagtccccacatcagctttagttcttggacttccctgtattaagcaagaattaggagaatggctgtccctgcaggcgcctcccgtaaatcctgagctctctggcgcaatctgaaacttctcttctgttttctttggctgtatcagccgaaccaggagaggcctgggctgcgactaaggagaaagaaatcgggggtttctgagagcagatggtgcctttgtgggtgcagggcttttgtggaaattgtcagcctctacgggcagagtccggcatcccctccccagactgcctgctgtcaaaccacggagcagctggagcctgccctgtccacggcccgtttccacccgggcatgttcgtctctcctgacttcggcagaggcccctggtggccttcagtttcagtttctcatccaggaaggtaaccttgggcattggcagtgggtttccctatggcttggatccagattagaattgatctttgttttcactttccatagttaataacatgcaaaataatgagaagaatttattttaaggtgacagctatactggtccaacatcgcctgcttattgtcagggtacagaagtttaatactttcttaatccagtttttcaaacttctccctgtagaccgtaaggatgaattccacaataggatcctttttaaaatcgattttaaattgttgcctagtcctgccaaggttattatgtgcatctgttatttttccaatacatgtaaacagttgcagcatgatgctttgtttaatgtcctgttcttaagctcgttagagccagttttgaaacgtttggtcttaccgtgaacggaggctggcttggcttagccacgctgatgagtaagtgagggatgtctccatcttgagatcaccaggcaagagagttgcctgcaccaggtaagaggccaaagcccctggggtaacagtccccaccgctacccgaggtaaaacaataaaagctatgtggttgagctcaggcctctcgtgcctggtgtcagagaaggcagagcccacagtaggtgcacggtgcaaggccctgggagggcactggccagggaaggtggtatagatggccctcagattgcggggccccgagcagctccccactctgcccgtccaccttccctggctccagcctcattctctctttagtttaactatgcaaagagaggaggttgagagtgttctggcagctggagctcttttccttgtccttcctgccctccgatggggccacctgtgtcggggcagcagtgtccatgtttatggagatcagaggtgtccccactgtgtggctggactgtactctgctgcccgggtagccaggagtctctccctctctcccctgccgcctgcctggtctcatgggcctccttcacacacccctccctgtggatcgcctgcctgggcccagagcaggggaactggagtttgtgagtgagcagagcaggttatgtgcagacagggaaacgagaactttggacctggctttctgagtccaggtgagagctgtgtggccccccgatgccactctgcccgccggagggatgtgcctgctgagccttttccttccacgccgcctctcactgccaggccagcggcttccgctgagactcgctggagaggcggctcccgtgtccgtccaccgagcactcagatggatgctgatcaccagggccgagggggctcccagaaggaccccaggccctggggagggtggctgtgggaggccaagtccactgcccggaagtcttgtcagccctaagccagggaagcctggagcgtggcctggcgggtctgggtggacaccgtccccactccggactcccagcacaggggaggatacctgagcctgtatggccctgtagccctgggcagagctgggcctgtcgtgtgttcctgcctggcaggtgcaggtgctggccatctgcaggtggaaggaggtgggaatcttggattttttgtttttttttgtttttttttttttgaggtgaagtctcgctctgacacccaggctggcgtgcagtggtgtgatctcggctcactgcaaactccgcttcctgggttcaagtggttctcctgccccagcctcccaagtagctgggattacaggcatgcgccaccacgctcagctgatttttgtatttttagtagagatggggtttcaccatgttggccaagctggtctcaaactcctgacctcaagtgatctgcccgcctcggcctcccagagtgctgggattacaggcatgagccagtgcacccggcggaatcttggaatttttatagacagcacctcagtttctgactccagccgcacacctcctgcctctgccagcaggggttgccgccagaccagagccagggccaggtccctgcgtccatcccccccggtaggatggacgtgagccatccttctaggggacttttttcagtgtgcgactcgtctctgttaggtggtaggagccagtttgtgtggcctgtgccacgctccacagtgcgtggctgggctctgtgtgtggcctgtgtcccctgtccctgcaggacccagcaggcatcgtggcgtgacagctgtgtccaagccactgcccgggcatcccatcacccaccagggtgcacggtctctcctgctgggggctttctgtcgcatgtgtgtctcctgtcgactctgcagtttgttctcagagcagaatgtttcctgttctcagtgcacaaagacactggttttcaatcggcgtctaaaaccacgttcctgcctttcattgcaacacggtgtgttcatttgtttaaaacagtttaatgagtaagtttagatgactggtcaatatcttaaaaatgtatattagtaagaagttcttcctggaatttttctttcgattctggcagaataaacaggtgtttttagttttcccactgtctgagccaagcaggaccctgtcccagagcaagagatgtccccttccatctctgacccttgcctgggacaagctttgatggggggccccagcttcaaggctgtggtgggaacagcacccccaaatgccagcctctcctttcttcccatccaccagtatactgcggggccatttctggtctttgtccaacaggaaacccatttctggtgggatatgccttccagtgccacagggccactcaccccatgcatctctgtcctgcccgtcagtgctgggacggacagcaagggcaagcccagtgtctggcggataggtgggtgggaacagagaggggagaatgccgtcctaagcttctgcttggggatcccccacacgacctgggtactgcctgggaaacctgtcctaagtaaaactatggacctcgcctcgcccaccggcctgcgaagccagcatctccgtgaaggtggatggaagcgcctttgtcctcattttgagctgcaagctgggtcagcggctctgaagccctcgagtgactttctaacccaagacccagcccctggcaggaggagggtgggtgcagggctggtgggacaaaaagaggcctcagcaggcctggaagacccttccagtacatcccacagcgtgtcgagcagctgggagaacctgtgtcaagctcgagccgtcataggtccccatgaggtgtctgaagccccttcttggtgatgggaggcagaggtgctgacgttctggagcatggacgtgagtcctcagctggctccgcgtgggcccttggagggtgccaggtgtgtggtgaccttctggatgcctttaacttcatggctgcgtcattcctgatttagaactttaaccggagcttcatctagtgattgcaaaactggaccaatgggaggacggcggcgcagcccgctccctccgtggaatggagctcagctcttcggaggcatcaaagcacctgtcgcctccgtggtccccctgctgagggagtgcggcctctgcaaggttcgggggtggcttcgtttgcctggagtggccggccctgcttgtgccatgtggatgtttgtgagcctcggtcctacagcactgtgtaggctgcatctgtttcgtgctggtcctgttgacttgtatgatatccacaaataaatattttcatggcggtcgtgttga

SEQ ID NO: 172619 - DNA, 1967 bp, Homo sapiens
  Payload ID: 13940
  Gene Symbol: PDXK
  Gene Name: pyridoxal (pyridoxine, vitamin B6) kinase
  ENST ID: ENST00000621478
  CDS Start-End: 257-745
cttgcaggttttgggatttgagattgacgcggtgaactctgtccagttttcaaaccacacagagacaaggtcggtctctgtcgcccaggctggcgtgaagtggcgcaaccagctcactgcagccttgacctcctgggctgaagcaatctttctgcctccacctcccgagtggctgggactatagttgtgcaccagcacgcccacctcctgcccagggttgttactggggtggtcacgtgggcagcttctgcctgggatgggccacaaagccagactcccggcagggacacgggtgttccacacaagctgcgttgttggttccctgacgcccttcaggctggggggtgggaaagccgatcccccaagtgcctgcagagcccacctggcgcaggcctcgccgcctcgaggctgctgctcgcacttctgccccttcccccggccaggcccccgttccttgaggccgtaccacaaggtgcgttcatttttccacaccgtgagctgggcttggcagagcctccaccttgtggccagtattcccagtggcccctttgagaggatttcctggagctccctgtctgagcttcccggactgagggcactgggaaggagcctgcggagctggaggtcagcgggtggacgggttgcgctgtcctggctttcggagtgtagagccagaggggatgggacaggtgccctgctgctgggcttggtggtccctgctgcagggaaggggcagctggtgtgaacacaaggagctgcggggctggagaaggccagggccaggagcctgccgacggacaccagcgaggggccaggccgggccaggagcctgccgacggacaccagcgaggggccaggccgggccagactccctggccggctgggatctgacaggagtgccaggctccttgggccgcccgaggaaccgcttgtttgcctgtgctttttcatctgtaaatggaatgagttggacacaagatccaagcgccctcccctgttggagaaggttcttgtgggctctgggcccatcccacatcccacagtgggcaggaggccaccaagaggtgcaagaccatgccctctgtttcgataggaagctgggcctcagaggggcctggggcctgtgtctgagacccggccaagtgctggacgtctccccttcctcatggctgttatggctgaattacgtccccccaaattctcatgttgcagccttaaccccagcacctcagtgtgggactgggtttggagatggagcccctacagaggtcagcaggttaaaagaggccatcagggctctgggtgggccctgatccaagctgcttggtgtccttgtaagaagaagagatgaggacacagacacacacagagggacagccccatgaggaaacagggaggcaatgccgtctgcaagcccagggcagaggcctcaggaaccagccctggtgacacctggaccttggacccccgtgcccaggacagtaggagaattggagccgcctggctgcagtccttcccgatggcaccctgtattagtccgttctcacactgctaattgttgggaaaagggcttgtggaatgcctgtataaactggccatgaaaatatgggacaataagttgtggaaagccacaagaggcctctgaggaggaaagcctcctaattgccatcatgttcgcatgctcagggcgagacctgctgtcttatctgtaaacaccgtgttcaaggagaaagacattccttcgaagcactggactgtggacagacacacgagctcctggttaagcccgctcccaccagctcctgtccgataagttaaagatacgctgtttgagcacaaaggagattcattgaaaccgctattgctgtagattacgcctgtgacgcactgcctccctttcactgtttcgccctgaatatctgcttctcagatctaagtgactgtactcaataaatagcgtggagacc

SEQ ID NO: 172620 - DNA, 2010 bp, Homo sapiens
  Payload ID: 13941
  Gene Symbol: PDXP
  Gene Name: pyridoxal (pyridoxine, vitamin B6) phosphatase
  Uniprot ID: Q96GD0
  ENST ID: ENST00000215904
  CDS Start-End: 57-947
gcgcgccgtgcccgcggagagagcgcggcgcgggaggccggcggccggccggctgcatggcgcgctgcgagaggctgcgcggagcggccctgcgcgacgtgctgggccgggcgcagggggtcctgttcgactgtgacggggtgctgtggaacggcgagcgcgccgtgccgggcgccccggagctgctggagcggctggcgcgggccggcaaggcggctctgtttgtgagcaacaacagccggcgcgcgcggcccgagctggccctgcgcttcgcgcgcctcggcttcggggggctgcgcgccgagcagctcttcagctccgcgctgtgcgccgcgcgcctgctgcgccagcgcctgcccgggcctccggacgcgccgggcgccgtgttcgtgctgggcggcgaggggctgcgcgccgagctgcgcgccgcggggctgcgcctggccggggacccgagcgcgggggacggcgcggccccgcgcgtgcgcgccgtgcttgtgggctacgacgagcacttctccttcgccaagctgagggaggcgtgcgcgcacctgcgcgaccccgagtgcctactcgtggccaccgaccgtgacccatggcacccgctgagcgacggcagccggacccctggcaccgggagcctggccgctgcagtggagacagcctcgggacgccaggccctggtggtgggcaagcccagcccctacatgttcgagtgcatcacggagaacttcagcatcgaccccgcacgcacgcttatggtgggtgaccgcctggagaccgacatcctctttggccaccgctgcggcatgaccactgtgctcacgctcacaggagtctcccgcctagaagaggcccaggcctacctagcggccggccagcacgacctcgtgccccattactatgtggagagcatcgcagacttgacagaggggttggaggactgagcccactgcacctgcagccacaggcccacccctccccactccctgatcccgtaggtggaggcgatgggtcacgagccatgttaagcacaaccggctccttggtccagttctgcaccggggtggggctgggacccggggaaggtttgagggcccttgcaaccccctcccagcagtggctgggcactctttgctgccccagaagctggtcccctatggattcatcttggcctgacccagccaggtggccttatttcttccctgtcacctcccctccttgaaatctgggccctggtgcctgctgaagattccctctatccctgagtacttagtcttctcccccttccctggggcttctagagctctctctgcccctcaggtcctggcccttgggtccttgtcaaccagaggtctagggaaccacaacccttattgtcctgggtggaccaatccaaaggctaagtgatagtgactcatcaatgttgggtcctgtggggtaccagtttaggttcctaagtaatagtgaccctttcacgtcctggagcccgagtggaccaatcggaagcctaagtgacgatgaccctcgcatgtcctaggtccctgggtggacccatcaggaccccaagtgatagtgacccagtggtcttttagatcctcagtagaacagtccagaagcctgagagacagtggccccttgataatctgggtctcacgggaccagctaggggtccaggtttcagtcagtaaataagagtggtccacgtcctaaagacacctctcctttacaaagacttgtgatgctctggggcttctgtggccaagccccaccctttcctggtcatggtacccgtacagcgttgatggccacagctcgaaggggggctttcgtgtccccctgtgcggtcagtgttttcagtaccacctctctcccgtgcccacttggctatttacttatttatttattgtgtgccagtgatggtgggtgggggctgggccttccccgccacctccacccctgttgtgacctgtccttccgtacttaataaagtgcgcgtgggagtgttca

SEQ ID NO: 172621 - DNA, 1571 bp, Homo sapiens
  Payload ID: 13941
  Gene Symbol: PDXP
  Gene Name: pyridoxal (pyridoxine, vitamin B6) phosphatase
  ENST ID: ENST00000403251
  CDS Start-End: 271-510
atcactttcccgggggacgcggactgggtcagaggtgcgaacatttctgtgccccgctgtgttccaaaggggctgtgccagtttctaacgccagccgcgtgaattcctgcagcagtaaccacaactgctatttgttaagtgctgttccatttacaaagcacttgcccctgtgttgcccagcgcccgtttggaggcaccgggagcctggccgctgcagtggagacagcctcgggacgccaggccctggtggtgggcaagcccagcccctacatgttcgagtgcatcacggagaacttcagcatcgaccccgcacgcacgcttatggtgggtgaccgcctggagaccgacatcctctttggccaccgctgcggcatgaccactgtgctcacgctcacaggagtctcccgcctagaagaggcccaggcctacctagcggccggccagcacgacctcgtgccccattactatgtggagagcatcgcagacttgacagaggggttggaggactgagcccactgcacctgcagccacaggcccacccctccccactccctgatcccgtaggtggaggcgatgggtcacgagccatgttaagcacaaccggctccttggtccagttctgcaccggggtggggctgggacccggggaaggtttgagggcccttgcaaccccctcccagcagtggctgggcactctttgctgccccagaagctggtcccctatggattcatcttggcctgacccagccaggtggccttatttcttccctgtcacctcccctccttgaaatctgggccctggtgcctgctgaagattccctctatccctgagtacttagtcttctcccccttccctggggcttctagagctctctctgcccctcaggtcctggcccttgggtccttgtcaaccagaggtctagggaaccacaacccttattgtcctgggtggaccaatccaaaggctaagtgatagtgactcatcaatgttgggtcctgtggggtaccagtttaggttcctaagtaatagtgaccctttcacgtcctggagcccgagtggaccaatcggaagcctaagtgacgatgaccctcgcatgtcctaggtccctgggtggacccatcaggaccccaagtgatagtgacccagtggtcttttagatcctcagtagaacagtccagaagcctgagagacagtggccccttgataatctgggtctcacgggaccagctaggggtccaggtttcagtcagtaaataagagtggtccacgtcctaaagacacctctcctttacaaagacttgtgatgctctggggcttctgtggccaagccccaccctttcctggtcatggtacccgtacagcgttgatggccacagctcgaaggggggctttcgtgtccccctgtgcggtcagtgttttcagtaccacctctctcccgtgcccacttggctatttacttatttatttattgtgtgccagtgatggtgggtgggggctgggccttccccgccacctccacccctgttgtgacctgtccttccgtacttaataaagtgcgcgtgggagtgtt

SEQ ID NO: 172622 - DNA, 1113 bp, Homo sapiens
  Payload ID: 13942
  Gene Symbol: PDXDC1
  Gene Name: pyridoxal-dependent decarboxylase domain containing 1
  ENST ID: ENST00000325823
  CDS Start-End: 1-1113
atggacgcgtccctggagaagatagcagaccccacgttagctgaaatgggaaaaaacttgaaggaggcagtgaagatgctggaggacagtcagagaagaacagaagaggaaaatggaaagaagctcatatccggagatattccaggcccactccagggcagtgggcaagatatggtgagcatcctccagttagttcagaatctcatgcatggagatgaagatgaggagccccagagccccagaatccaaaatattggagaacaaggtcatatggctttgttgggacatagtctgggagcttatatttcaactctggacaaagagaagctgagaaaacttacaactaggatactttcagataccaccttatggctatgcagaattttcagatatgaaaatgggtgtgcttatttccacgaagaggaaagagaaggacttgcaaagatatgtaggcttgccattcattctcgatatgaagacttcgtagtggatggcttcaatgtgttatataacaagaagcctgtcatatatcttagtgctgctgctagacctggcctgggccaatacctttgtaatcagctcggcttgcccttcccctgcttgtgccgtgtaccctgtaacactgtgtttggatcccagcatcagatggatgttgccttcctggagaaactgattaaagatgatatagagcgaggaagactgcccctgttgcttgtcgcaaatgcaggaacggcagcagtaggacacacagacaagattgggagattgaaagaactctgtgagcagtatggcatatggcttcatgtggagggtgtgaatctggcaacattggctctgggttatgtctcctcatcagtgctggctgcagccaaatgtgatagcatgacgatgactcctggcccgtggctgggtttgccagctgttcctgcggtgacactgtataaacacgatgaccctgccttgactttagttgctggtcttacatcaaataagcccacagacaaactccgtgccctgcctctgtggttatctttacaatacttgggacttgatgggtttgtggagaggatcaagcatgcctgtcaactgagtcaacggttgcagaaagtttga

SEQ ID NO: 172623 - DNA, 4521 bp, Homo sapiens
  Payload ID: 13942
  Gene Symbol: PDXDC1
  Gene Name: pyridoxal-dependent decarboxylase domain containing 1
  Uniprot ID: Q6P996
  ENST ID: ENST00000396410
  CDS Start-End: 98-2464
cgggggacgtcagcgctgccagcgtggaaggagctgcggggcgcgggaggaggaagtagagcccgggaccgccaggccaccaccggccgcctcagccatggacgcgtccctggagaagatagcagaccccacgttagctgaaatgggaaaaaacttgaaggaggcagtgaagatgctggaggacagtcagagaagaacagaagaggaaaatggaaagaagctcatatccggagatattccaggcccactccagggcagtgggcaagatatggtgagcatcctccagttagttcagaatctcatgcatggagatgaagatgaggagccccagagccccagaatccaaaatattggagaacaaggtcatatggctttgttgggacatagtctgggagcttatatttcaactctggacaaagagaagctgagaaaacttacaactaggatactttcagataccaccttatggctatgcagaattttcagatatgaaaatgggtgtgcttatttccacgaagaggaaagagaaggacttgcaaagatatgtaggcttgccattcattctcgatatgaagacttcgtagtggatggcttcaatgtgttatataacaagaagcctgtcatatatcttagtgctgctgctagacctggcctgggccaatacctttgtaatcagctcggcttgcccttcccctgcttgtgccgtgtaccctgtaacactgtgtttggatcccagcatcagatggatgttgccttcctggagaaactgattaaagatgatatagagcgaggaagactgcccctgttgcttgtcgcaaatgcaggaacggcagcagtaggacacacagacaagattgggagattgaaagaactctgtgagcagtatggcatatggcttcatgtggagggtgtgaatctggcaacattggctctgggttatgtctcctcatcagtgctggctgcagccaaatgtgatagcatgacgatgactcctggcccgtggctgggtttgccagctgttcctgcggtgacactgtataaacacgatgaccctgccttgactttagttgctggtcttacatcaaataagcccacagacaaactccgtgccctgcctctgtggttatctttacaatacttgggacttgatgggtttgtggagaggatcaagcatgcctgtcaactgagtcaacggttgcaggaaagtttgaagaaagtgaattacatcaaaatcttggtggaagatgagctcagctccccagtggtggtgttcagatttttccaggaattaccaggctcagatccggtgtttaaagccgtcccagtgcccaacatgacaccttcaggagtcggccgggagaggcactcgtgtgacgcgctgaatcgctggctgggagaacagctgaagcagctggtgcctgcaagcggcctcacagtcatggatctggaagctgagggcacgtgtttgcggttcagccctttgatgaccgcagcagttttaggaactcggggagaggatgtggatcagctcgtagcctgcatagaaagcaaactgccagtgctgtgctgtacgctccagttgcgtgaagagttcaagcaggaagtggaagcaacagcaggtctcctatatgttgatgaccctaactggtctggaataggggttgtcaggtatgaacatgctaatgatgataagagcagtttgaaatcagatcccgaaggggaaaacatccatgctggactcctgaagaagttaaatgaactggaatctgacctaacctttaaaataggccctgagtataagagcatgaagagctgcctttatgtcggcatggcgagcgacaacgtcgatgctgctgagctcgtggagaccattgcggccacagcccgggagatagaggagaactcgaggcttctggaaaacatgacagaagtggttcggaaaggcattcaggaagctcaagtggagctgcagaaggcaagtgaagaacggcttctggaagagggggtgttgcggcagatccctgtagtgggctccgtgctgaattggttttctccggtccaggctttacagaagggaagaacttttaacttgacagcaggctctctggagtccacagaacccatatatgtctacaaagcacaaggtgcaggagtcacgctgcctccaacgccctcgggcagtcgcaccaagcagaggcttccaggccagaagccttttaaaaggtccctgcgaggttcagatgctttgagtgagaccagctcagtcagtcacattgaagacttagaaaaggtggagcgcctatccagtgggccggagcagatcaccctcgaggccagcagcactgagggacacccaggggctcccagccctcagcacaccgaccagaccgaggccttccagaaaggggtcccacacccagaagatgaccactcacaggtagaaggaccggagagcttaagatgagactcattgtgtggtttgagactgtactgagtattgtttcagggaagatgaagttctattggaaatgtgaactgtgccacatactaatataaattactgttgtttgtgcttcactgggattttggcacaaatatgtgcctgaaaggtaggctttctaggaggggagtcagcttgtctaacttcatgtacatgtagaaccacgtttgctgtcctactacgacttttccctaagttaccataaacacattttattcacaaaaaacacttcgaatttcaagtgtctaccagtagcacccttgctctttctaaacataagcctaagtatatgaggttgcccgtggcaactttttggtaaaacagcttttcattagcactctccaggttctctgcaacacttcacagaggcgagactggctgtatcctttgctgtcggtctttagtacgatcaagttgcaatatacagtgggactgctagacttgaaggagagcagtgattgtgggattgtaaataagagcatcagaagccctccccagctactgctcttcgtggagacttagtaaggactgtgtctacttgagctgtggcaaggctgctgtctgggactgtcctctgccacaaggccatttctcccattatataccgtttgtaaagagaaactgtaaagtctcctcctgaccatatatttttaaatactggcaaagcttttaaaattggcacacaagtacagactgtgctcatttctgtttagtatctgaaaacctgatagatgctacccttaagagcttgctcttccgtgtgctacgtagcacccacctggttaaaatctgaaaacaagtacccctttgacctgtctcccactgaagcttctactgccctggcagctcgcctgggcccaactcagaaacaggagccagcagagcactctctcacgctgatccagccgggcaccctgcttaagtcagtagaagctcgctggcactgcccgttcctacttttccgaagtactgcgtcactttgtcgtaagtaatggcccctgtgccttcttaatccagcagtcaagcttttgggagacctgaaaatgggaaaattcacactgggtttctggactgtagtattggaagccttagttatagtatattaagcctataattatactctgatttgatgggatttttgacatttacacttgtcaaaatgcagggggttttttttggtgcagatgattaaacagtcttccctatttggtgcaatgaagtatagcagataaaatgggggaggggtaaattatcaccttcaagaaaattacatgtttttatatatatttggaattgttaaattggttttgctgaaacatttcacccttgagatattatttgaatgttggtttcaataaaggttcttgaaattgttaccagtgaattcagtttataaatcttattacaaaagacttacccacgtacctgaaatagctgccgatagaccagtgagaggtaggttctcctctgcccgttattaccgaccaaaaaaaaaactggacatcaattttttagtaaaccaaaaaataagtctcaacaaatgcctttgccaaaataaggttttattttgaaagtcatttgatgaaagtcatttgaaagacactgaggagggaaggaggcctaagacccaacagatgtaggatccagatctggattcgtgccagccccaccaatggtctgtcaggccaagaaggtgctttctttggtaattcatgttttttaacttcctggagaagagatcttttcccacaagccatcttcattttttttgtagagtagggctttatttccagaaaacagtgtgtgagctggagatgggtgtttttttaaaaacatcaaggtagatctaatatgttcaacaaagtggggtggctcagccagaggcgaagtggaaagattctgaaaacacaagatggtgggcattagagaagccaaccttactgtcccctgctgtgataaagatgtcaaagtatctttgttcttggacacaaatatatataataaaatacgttaagaaatga

SEQ ID NO: 172624 - DNA, 4171 bp, Homo sapiens
  Payload ID: 13942
  Gene Symbol: PDXDC1
  Gene Name: pyridoxal-dependent decarboxylase domain containing 1
  Uniprot ID: Q6P996
  ENST ID: ENST00000450288
  CDS Start-End: 30-2123
cccagatagcagaccccacgttagctgaaatgggaaaaaacttgaaggaggcagtgaagatgctggaggacagtcagagaagaacagaagaggaaaatggaaagaagctcatatccggagatattccaggcccactccagggcagatatgaaaatgggtgtgcttatttccacgaagaggaaagagaaggacttgcaaagatatgtaggcttgccattcattctcgatatgaagacttcgtagtggatggcttcaatgtgttatataacaagaagcctgtcatatatcttagtgctgctgctagacctggcctgggccaatacctttgtaatcagctcggcttgcccttcccctgcttgtgccgtgtaccctgtaacactgtgtttggatcccagcatcagatggatgttgccttcctggagaaactgattaaagatgatatagagcgaggaagactgcccctgttgcttgtcgcaaatgcaggaacggcagcagtaggacacacagacaagattgggagattgaaagaactctgtgagcagtatggcatatggcttcatgtggagggtgtgaatctggcaacattggctctgggttatgtctcctcatcagtgctggctgcagccaaatgtgatagcatgacgatgactcctggcccgtggctgggtttgccagctgttcctgcggtgacactgtataaacacgatgaccctgccttgactttagttgctggtcttacatcaaataagcccacagacaaactccgtgccctgcctctgtggttatctttacaatacttgggacttgatgggtttgtggagaggatcaagcatgcctgtcaactgagtcaacggttgcaggaaagtttgaagaaagtgaattacatcaaaatcttggtggaagatgagctcagctccccagtggtggtgttcagatttttccaggaattaccaggctcagatccggtgtttaaagccgtcccagtgcccaacatgacaccttcaggagtcggccgggagaggcactcgtgtgacgcgctgaatcgctggctgggagaacagctgaagcagctggtgcctgcaagcggcctcacagtcatggatctggaagctgagggcacgtgtttgcggttcagccctttgatgaccgcagcagttttaggaactcggggagaggatgtggatcagctcgtagcctgcatagaaagcaaactgccagtgctgtgctgtacgctccagttgcgtgaagagttcaagcaggaagtggaagcaacagcaggtctcctatatgttgatgaccctaactggtctggaataggggttgtcaggtatgaacatgctaatgatgataagagcagtttgaaatcagatcccgaaggggaaaacatccatgctggactcctgaagaagttaaatgaactggaatctgacctaacctttaaaataggccctgagtataagagcatgaagagctgcctttatgtcggcatggcgagcgacaacgtcgatgctgctgagctcgtggagaccattgcggccacagcccgggagatagaggagaactcgaggcttctggaaaacatgacagaagtggttcggaaaggcattcaggaagctcaagtggagctgcagaaggcaagtgaagaacggcttctggaagagggggtgttgcggcagatccctgtagtgggctccgtgctgaattggttttctccggtccaggctttacagaagggaagaacttttaacttgacagcaggctctctggagtccacagaacccatatatgtctacaaagcacaaggtgcaggagtcacgctgcctccaacgccctcgggcagtcgcaccaagcagaggcttccaggccagaagccttttaaaaggtccctgcgaggttcagatgctttgagtgagaccagctcagtcagtcacattgaagacttagaaaaggtggagcgcctatccagtgggccggagcagatcaccctcgaggccagcagcactgagggacacccaggggctcccagccctcagcacaccgaccagaccgaggccttccagaaaggggtcccacacccagaagatgaccactcacaggtagaaggaccggagagcttaagatgagactcattgtgtggtttgagactgtactgagtattgtttcagggaagatgaagttctattggaaatgtgaactgtgccacatactaatataaattactgttgtttgtgcttcactgggattttggcacaaatatgtgcctgaaaggtaggctttctaggaggggagtcagcttgtctaacttcatgtacatgtagaaccacgtttgctgtcctactacgacttttccctaagttaccataaacacattttattcacaaaaaacacttcgaatttcaagtgtctaccagtagcacccttgctctttctaaacataagcctaagtatatgaggttgcccgtggcaactttttggtaaaacagcttttcattagcactctccaggttctctgcaacacttcacagaggcgagactggctgtatcctttgctgtcggtctttagtacgatcaagttgcaatatacagtgggactgctagacttgaaggagagcagtgattgtgggattgtaaataagagcatcagaagccctccccagctactgctcttcgtggagacttagtaaggactgtgtctacttgagctgtggcaaggctgctgtctgggactgtcctctgccacaaggccatttctcccattatataccgtttgtaaagagaaactgtaaagtctcctcctgaccatatatttttaaatactggcaaagcttttaaaattggcacacaagtacagactgtgctcatttctgtttagtatctgaaaacctgatagatgctacccttaagagcttgctcttccgtgtgctacgtagcacccacctggttaaaatctgaaaacaagtacccctttgacctgtctcccactgaagcttctactgccctggcagctcgcctgggcccaactcagaaacaggagccagcagagcactctctcacgctgatccagccgggcaccctgcttaagtcagtagaagctcgctggcactgcccgttcctacttttccgaagtactgcgtcactttgtcgtaagtaatggcccctgtgccttcttaatccagcagtcaagcttttgggagacctgaaaatgggaaaattcacactgggtttctggactgtagtattggaagccttagttatagtatattaagcctataattatactctgatttgatgggatttttgacatttacacttgtcaaaatgcagggggttttttttggtgcagatgattaaacagtcttccctatttggtgcaatgaagtatagcagataaaatgggggaggggtaaattatcaccttcaagaaaattacatgtttttatatatatttggaattgttaaattggttttgctgaaacatttcacccttgagatattatttgaatgttggtttcaataaaggttcttgaaattgttaccagtgaattcagtttataaatcttattacaaaagacttacccacgtacctgaaatagctgccgatagaccagtgagaggtaggttctcctctgcccgttattaccgaccaaaaaaaaaactggacatcaattttttagtaaaccaaaaaataagtctcaacaaatgcctttgccaaaataaggttttattttgaaagtcatttgatgaaagtcatttgaaagacactgaggagggaaggaggcctaagacccaacagatgtaggatccagatctggattcgtgccagccccaccaatggtctgtcaggccaagaaggtgctttctttggtaattcatgttttttaacttcctggagaagagatcttttcccacaagccatcttcattttttttgtagagtagggctttatttccagaaaacagtgtgtgagctggagatgggtgtttttttaaaaacatcaaggtagatctaatatgttcaacaaagtggggtggctcagccagaggcgaagtggaaagattctgaaaacacaagatggtgggcattagagaagccaaccttactgtcccctgctgtgataaagatgtcaaagtatctttgttcttggacacaaatatatataataaaatacgtt

SEQ ID NO: 172625 - DNA, 2183 bp, Homo sapiens
  Payload ID: 13942
  Gene Symbol: PDXDC1
  Gene Name: pyridoxal-dependent decarboxylase domain containing 1
  Uniprot ID: Q6P996
  ENST ID: ENST00000455313
  CDS Start-End: 121-1410
ctccgccccgccggccgcgggcgcgggggacgtcagcgctgccagcgtggaaggagctgcggggcgcgggaggaggaagtagagcccgggaccgccaggccaccaccggccgcctcagccatggacgcgtccctggagaagatagcagaccccacgttagctgaaatgggaaaaaacttgaaggaggcagtgaagatgctggaggacagtcagagaagaacagaagaggaaaatggaaagaagctcatatccggagatattccaggcccactccagggcagtgggcaagatatggtgagcatcctccagttagttcagaatctcatgcatggagatgaagatgaggagccccagagccccagaatccaaaatattggagaacaaggtcatatggctttgttgggacatagtctgggagcttatatttcaactctggacaaagagaagctgagaaaacttacaactaggatactttcagataccaccttatggctatgcagaattttcagatatgaaaatgggtgtgcttatttccacgaagaggaaagagaaggacttgcaaagatatgtaggcttgccattcattctcgatatgaagacttcgtagtggatggcttcaatgtgttatataacaagaagcctgtcatatatcttagtgctgctgctagacctggcctgggccaatacctttgtaatcaggatgttgccttcctggagaaactgattaaagatgatatagagcgaggaagactgcccctgttgcttgtcgcaaatgcaggaacggcagcagtaggacacacagacaagattgggagattgaaagaactctgtgagcagtatggcatatggcttcatgtggagggtgtgaatctggcaacattggctctgggttatgtctcctcatcagtgctggctgcagccaaatgtgatagcatgacgatgactcctggcccgtggctgggtttgccagctgttcctgcggtgacactgtataaacacgatgaccctgccttgactttagttgctggtcttacatcaaataagcccacagacaaactccgtgccctgcctctgtggttatctttacaatacttgggacttgatgggtttgtggagaggatcaagcatgcctgtcaactgagtcaacggttgcaggaaagtttgaagaaagtgaattacatcaaaatcttggtggaagatgagctcagctccccagtggtggtgttcagatttttccaggaattaccaggctcagatccggtgtttaaagccgtcccagtgcccaacatgacaccttcaggagtcggccgggagaggcactcgtgtgacgcgctgaatcgctgggtgagaatggcagtcacccccctttcctttcaggtccccgtccatcaccatccgacctgctggtgagggtgacgcgtgctcgtgtatgggaactgaggcccacaggaggagccgccctgccagtgctgggcctgctctggagttctgttccccattgcgttaccacctcacgagctgggtcacctctggcaagtccttctggcattgctccctcactttccttgctgctgtataaggctgtgagacaacaggcaaaaggtgggctgcagggcagctgcggtgggttctggtgagcctgggcagcacagccgggagccccaggcagagtctgccgagcatctgcagctggcagtgtggagccaggcctgcactttgatagcgttttgggcactgaatagcagctctaggatttgagtctgaagggtcttgtgaacagtgtgggatggcggcagcagcagttctagccaatgctggacacgcccagcctagcagggttggcagataagtcctggtacatccatgctggggctcagcacagctgtgagagaccacagagctgagtgtctcaagcagaaaggaactggtcataaacgaaatgaatcaatgcaggttactaagcagtgtcaagtagcatgttttatgacaacaactacaactccctgcccgccactaggagaaaagacgctgggggcagaccacatgtcagcagtgggtgtcgcttagtaatatattgtgggtcattgttattttcttctttttgtttacttgtatttcctaaatttttctacaatgaacttgtattaataagaaaaaaccataaaatttactgtttttaaaaa

SEQ ID NO: 172626 - DNA, 2048 bp, Homo sapiens
  Payload ID: 13942
  Gene Symbol: PDXDC1
  Gene Name: pyridoxal-dependent decarboxylase domain containing 1
  ENST ID: ENST00000535621
  CDS Start-End: 189-1685
ccccgccccgccgcctctcaaccatcaggttcggcagcccgcggcgccgcctggcagctcctcctcttctccgccccgccggccgcgggcgcgggggacgtcagcgctgccagcgtggaaggagctgcggggcgcgggaggaggaagtagagcccgggaccgccaggccaccaccggccgcctcagccatggacgcgtccctggagaagatagcagaccccacgttagctgaaatgggaaaaaacttgaaggaggcagtgaagatgctggaggacagtcagagaagaacagaagaggaaaatggaaagaagctcatatccggagatattccaggcccactccagggcagtgggcaagatatggtgagcatcctccagttagttcagaatctcatgcatggagatgaagatgaggagccccagagccccagaatccaaaatattggagaacaaggtcatatggctttgttgggacatagtctgggagcttatatttcaactctggacaaagagaagctgagaaaacttacaactaggatactttcagataccaccttatggctatgcagaattttcagatatgaaaatgggtgtgcttatttccacgaagaggaaagagaaggacttgcaaagatatgtaggcttgccattcattctcgatatgaagacttcgtagtggatggcttcaatgtgttatataacaagaagcctgtcatatatcttagtgctgctgctagacctggcctgggccaatacctttgtaatcagctcggcttgcccttcccctgcttgtgccgtgtaccctgtaacactgtgtttggatcccagcatcagatggatgttgccttcctggagaaactgattaaagatgatatagagcgaggaagactgcccctgttgcttgtcgcaaatgcaggaacggcagcagtaggacacacagacaagattgggagattgaaagaactctgtgagcagtatggcatatggcttcatgtggagggtgtgaatctggcaacattggctctgggttatgtctcctcatcagtgctggctgcagccaaatgtgatagcatgacgatgactcctggcccgtggctgggtttgccagctgttcctgcggtgacactgtataaacacgatgaccctgccttgactttagttgctggtcttacatcaaataagcccacagacaaactccgtgccctgcctctgtggttatctttacaatacttgggacttgatgggtttgtggagaggatcaagcatgcctgtcaactgagtcaacggttgcaggaaagtttgaagaaagtgaattacatcaaaatcttggtggaagatgagctcagctccccagtggtggtgttcagatttttccaggaattaccaggctcagatccggtgtttaaagccgtcccagtgcccaacatgacaccttcaggagtcggccgggagaggcactcgtgtgacgcgctgaatcgctggctgggagaacagctgaagcagctggtgcctgcaagcggcctcacagtcatggatctggaagctgagggcacgtgtttgcggttcagccctttgatgaccgcagcagggtggtcccactgtgggaccacaaccaggtatgactgtgtgagaagcaggctcactaccaggctaccagggagcacaggggagcaggcgccaccttgaggcataaacccagagaaacaagacctccaagacggccaggcactggggcacacgccggtaacacagcaccgtgggagctgagacggaaggatcgcctgagcccaggattttgaaaccaccctgggcaacacagtgagaccccgtatctacaaaaaaatacacattagccaggcatggcggcatgcgcctggggtcccaagtactcgggaggtagaggagagaaaaatcacttgagcccagagaggtcaaggctacagggagctgagatcgcatcactgtactccagctggggtgaaacggcgagactctacctcaaaaataaataaatacatacataattaataaataaaacatcaaagacca

SEQ ID NO: 172627 - DNA, 720 bp, Homo sapiens
  Payload ID: 13942
  Gene Symbol: PDXDC1
  Gene Name: pyridoxal-dependent decarboxylase domain containing 1
  ENST ID: ENST00000565362
  CDS Start-End: 49-294
gaggaagtagagcccgggaccgccaggccaccaccggccgcctcagccatggacgcgtccctggagaagatagcagaccccacgttagctgaaatgggaaaaaacttgaaggaggcagtgaagatgctggaggacagtcagagaagaacagaagaggaaaatggaaagaagctcatatccggagatattccaggcccactccagggcagtgggcaagatatggtgagcatcctccagttagttcagaatctcatgcatggagatgaagatgaggagccccagagccccaggtaatgaacctggcagcttctcttttcaagtaatccaaaatattggagaacaaggtcatatggctttgttgggacatagtctgggagcttatatttcaactctggacaaagagaagctgagaaaacttacaactaggatactttcagataccaccttatggctatgcagaattttcagatatgaaaatgggtgtgcttatttccacgaagaggaaagagaaggacttgcaaagatatgtaggcttgccattcattctcgatatgaagacttcgtagtggatggcttcaatgtgttatataacaagaagcctgtcatatatcttagtgctgctgctagacctggcctgggccaatacctttgtaatcagctcggcttgcccttcccctgcttgtgccgtgtaccctgtaacactgtgtttggatcccagca

SEQ ID NO: 172628 - DNA, 2963 bp, Homo sapiens
  Payload ID: 13942
  Gene Symbol: PDXDC1
  Gene Name: pyridoxal-dependent decarboxylase domain containing 1
  ENST ID: ENST00000563679
  CDS Start-End: 140-2560
agcttagatcagtgccttctctgaacagcgttcactaagcagcccccaaccccaaaacccccaagtccccgggcgccgaggacgctgcgagtcctgcgcatgcgcaaggttgcccactcgctcaccgcctccttggcgaatggcctgttccattctcgagggatgccggcgggaggtgaggcgggagacttggaagcctgggcccggaagtgagatagcagaccccacgttagctgaaatgggaaaaaacttgaaggaggcagtgaagatgctggaggacagtcagagaagaacagaagaggaaaatggaaagaagctcatatccggagatattccaggcccactccagggcagtgggcaagatatggtgagcatcctccagttagttcagaatctcatgcatggagatgaagatgaggagccccagagccccagaatccaaaatattggagaacaaggtcatatggctttgttgggacatagtctgggagcttatatttcaactctggacaaagagaagctgagaaaacttacaactaggatactttcagataccaccttatggctatgcagaattttcagatatgaaaatgggtgtgcttatttccacgaagaggaaagagaaggacttgcaaagatatgtaggcttgccattcattctcgatatgaagacttcgtagtggatggcttcaatgtgttatataacaagaagcctgtcatatatcttagtgctgctgctagacctggcctgggccaatacctttgtaatcagctcggcttgcccttcccctgcttgtgccgtgtaccctgtaacactgtgtttggatcccagcatcagatggatgttgccttcctggagaaactgattaaagatgatatagagcgaggaagactgcccctgttgcttgtcgcaaatgcaggaacggcagcagtaggacacacagacaagattgggagattgaaagaactctgtgagcagtatggcatatggcttcatgtggagggtgtgaatctggcaacattggctctgggttatgtctcctcatcagtgctggctgcagccaaatgtgatagcatgacgatgactcctggcccgtggctgggtttgccagctgttcctgcggtgacactgtataaacacgatgaccctgccttgactttagttgctggtcttacatcaaataagcccacagacaaactccgtgccctgcctctgtggttatctttacaatacttgggacttgatgggtttgtggagaggatcaagcatgcctgtcaactgagtcaacggttgcaggaaagtttgaagaaagtgaattacatcaaaatcttggtggaagatgagctcagctccccagtggtggtgttcagatttttccaggaattaccaggctcagatccggtgtttaaagccgtcccagtgcccaacatgacaccttcaggagtcggccgggagaggcactcgtgtgacgcgctgaatcgctggctgggagaacagctgaagcagctggtgcctgcaagcggcctcacagtcatggatctggaagctgagggcacgtgtttgcggttcagccctttgatgaccgcagcagttttaggaactcggggagaggatgtggatcagctcgtagcctgcatagaaagcaaactgccagtgctgtgctgtacgctccagttgcgtgaagagttcaagcaggaagtggaagcaacagcaggtctcctatatgttgatgaccctaactggtctggaataggggttgtcaggtatgaacatgctaatgatgataagagcagtttgaaatcagatcccgaaggggaaaacatccatgctggactcctgaagaagttaaatgaactggaatctgacctaacctttaaaataggccctgagtataagagcatgaagagctgcctttatgtcggcatggcgagcgacaacgtcgatgctgctgagctcgtggagaccattgcggccacagcccgggagatagaggagaactcgaggcttctggaaaacatgacagaagtggttcggaaaggcattcaggaagctcaagtggagctgcagaaggcaagtgaagaacggcttctggaagagggggtgttgcggcagatccctgtagtgggctccgtgctgaattggttttctccggtccaggctttacagaagggaagaacttttaacttgacagcaggctctctggagtccacagaacccatatatgtctacaaagcacaaggtgcaggagtcacgctgcctccaacgccctcgggcagtcgcaccaagcagaggcttccaggccagaagccttttaaaaggtccctgcgaggttcagatgctttgagtgagaccagctcagtcagtcacattgaagacttagaaaaggtggagcgcctatccagtgggccggagcagatcaccctcgaggccagcagcactgagggacacccaggggctcccagccctcagcacaccgaccagaccgaggccttccagaaaggggtcccacacccagaagatgaccactcacaggtagaaggaccggagagcttaagatgagactcattgtgtggtttgagactgtactgagtattgtttcagggaagatgaagttctattggaaatgtgaactgtgccacatactaatataaattactgttgtttgtgcttcactgggattttggcacaaatatgtgcctgaaaggtaggctttctaggaggggagtcagcttgtctaacttcatgtacatgtagaaccacgtttgctgtcctactacgacttttccctaagttaccataaacacattttattcacaaaaaacacttcgaatttcaagtgtctaccagtagcacccttgctctttctaaacataagcctaagtatatgaggttgcccgtggcaactttttggtaaaacagcttttcattagcactctccaggttctctgcaacacttcacaga

SEQ ID NO: 172629 - DNA, 980 bp, Homo sapiens
  Payload ID: 13942
  Gene Symbol: PDXDC1
  Gene Name: pyridoxal-dependent decarboxylase domain containing 1
  ENST ID: ENST00000567306
  CDS Start-End: 167-980
ggacagccccccacgctggagaattctctggcccaaaatgtcagcagtgttgaggctgagaaatcctggtcaagatcatgtttataacaccagcagttgagtacaaaacgatgcaaagtggtgttatcaatttcctaagaagatagcagaccccacgttagctgaaatgggaaaaaacttgaaggaggcagtgaagatgctggaggacagtcagagaagaacagaagaggaaaatggaaagaagctcatatccggagatattccaggcccactccagggcagtgggcaagatatggtgagcatcctccagttagttcagaatctcatgcatggagatgaagatgaggagccccagagccccagaatccaaaatattggagaacaaggtcatatggctttgttgggacatagtctgggagcttatatttcaactctggacaaagagaagctgagaaaacttacaactaggatactttcagataccaccttatggctatgcagaattttcagatatgaaaatgggtgtgcttatttccacgaagaggaaagagaaggacttgcaaagatatgtaggcttgccattcattctcgatatgaagacttcgtagtggatggcttcaatgtgttatataacaagaagcctgtcatatatcttagtgctgctgctagacctggcctgggccaatacctttgtaatcaggatgttgccttcctggagaaactgattaaagatgatatagagcgaggaagactgcccctgttgcttgtcgcaaatgcaggaacggcagcagtaggacacacagacaagattgggagattgaaagaactctgtgagcagtatggcatatggcttcatgtggagggtgtgaatctggcaacattggctctgggttatgtctcctcatcagtgctggctgcagccaaatgtgatagcatgacgatgactcctggcccgtggctgggtttgccagctgttcctg

SEQ ID NO: 172630 - DNA, 3775 bp, Homo sapiens
  Payload ID: 13942
  Gene Symbol: PDXDC1
  Gene Name: pyridoxal-dependent decarboxylase domain containing 1
  Uniprot ID: Q6P996
  ENST ID: ENST00000569715
  CDS Start-End: 78-2363
agcgtggaaggagctgcggggcgcgggaggaggaagtagagcccgggaccgccaggccaccaccggccgcctcagccatggacgcgtccctggagaagatagcagaccccacgttagctgaaatgggaaaaaacttgaaggaggcagtgaagatgctggaggacagtcagagaagaacagaagaggaaaatggaaagaagctcatatccggagatattccaggcccactccagggcagaatccaaaatattggagaacaaggtcatatggctttgttgggacatagtctgggagcttatatttcaactctggacaaagagaagctgagaaaacttacaactaggatactttcagataccaccttatggctatgcagaattttcagatatgaaaatgggtgtgcttatttccacgaagaggaaagagaaggacttgcaaagatatgtaggcttgccattcattctcgatatgaagacttcgtagtggatggcttcaatgtgttatataacaagaagcctgtcatatatcttagtgctgctgctagacctggcctgggccaatacctttgtaatcagctcggcttgcccttcccctgcttgtgccgtgtaccctgtaacactgtgtttggatcccagcatcagatggatgttgccttcctggagaaactgattaaagatgatatagagcgaggaagactgcccctgttgcttgtcgcaaatgcaggaacggcagcagtaggacacacagacaagattgggagattgaaagaactctgtgagcagtatggcatatggcttcatgtggagggtgtgaatctggcaacattggctctgggttatgtctcctcatcagtgctggctgcagccaaatgtgatagcatgacgatgactcctggcccgtggctgggtttgccagctgttcctgcggtgacactgtataaacacgatgaccctgccttgactttagttgctggtcttacatcaaataagcccacagacaaactccgtgccctgcctctgtggttatctttacaatacttgggacttgatgggtttgtggagaggatcaagcatgcctgtcaactgagtcaacggttgcaggaaagtttgaagaaagtgaattacatcaaaatcttggtggaagatgagctcagctccccagtggtggtgttcagatttttccaggaattaccaggctcagatccggtgtttaaagccgtcccagtgcccaacatgacaccttcaggagtcggccgggagaggcactcgtgtgacgcgctgaatcgctggctgggagaacagctgaagcagctggtgcctgcaagcggcctcacagtcatggatctggaagctgagggcacgtgtttgcggttcagccctttgatgaccgcagcagttttaggaactcggggagaggatgtggatcagctcgtagcctgcatagaaagcaaactgccagtgctgtgctgtacgctccagttgcgtgaagagttcaagcaggaagtggaagcaacagcaggtctcctatatgttgatgaccctaactggtctggaataggggttgtcaggtatgaacatgctaatgatgataagagcagtttgaaatcagatcccgaaggggaaaacatccatgctggactcctgaagaagttaaatgaactggaatctgacctaacctttaaaataggccctgagtataagagcatgaagagctgcctttatgtcggcatggcgagcgacaacgtcgatgctgctgagctcgtggagaccattgcggccacagcccgggagatagaggagaactcgaggcttctggaaaacatgacagaagtggttcggaaaggcattcaggaagctcaagtggagctgcagaaggcaagtgaagaacggcttctggaagagggggtgttgcggcagatccctgtagtgggctccgtgctgaattggttttctccggtccaggctttacagaagggaagaacttttaacttgacagcaggctctctggagtccacagaacccatatatgtctacaaagcacaaggtgcaggagtcacgctgcctccaacgccctcgggcagtcgcaccaagcagaggcttccaggccagaagccttttaaaaggtccctgcgaggttcagatgctttgagtgagaccagctcagtcagtcacattgaagacttagaaaaggtggagcgcctatccagtgggccggagcagatcaccctcgaggccagcagcactgagggacacccaggggctcccagccctcagcacaccgaccagaccgaggccttccagaaaggggtcccacacccagaagatgaccactcacaggtagaaggaccggagagcttaagatgagactcattgtgtggtttgagactgtactgagtattgtttcagggaagatgaagttctattggaaatgtgaactgtgccacatactaatataaattactgttgtttgtgcttcactgggattttggcacaaatatgtgcctgaaaggtaggctttctaggaggggagtcagcttgtctaacttcatgtacatgtagaaccacgtttgctgtcctactacgacttttccctaagttaccataaacacattttattcacaaaaaacacttcgaatttcaagtgtctaccagtagcacccttgctctttctaaacataagcctaagtatatgaggttgcccgtggcaactttttggtaaaacagcttttcattagcactctccaggttctctgcaacacttcacagaggcgagactggctgtatcctttgctgtcggtctttagtacgatcaagttgcaatatacagtgggactgctagacttgaaggagagcagtgattgtgggattgtaaataagagcatcagaagccctccccagctactgctcttcgtggagacttagtaaggactgtgtctacttgagctgtggcaaggctgctgtctgggactgtcctctgccacaaggccatttctcccattatataccgtttgtaaagagaaactgtaaagtctcctcctgaccatatatttttaaatactggcaaagcttttaaaattggcacacaagtacagactgtgctcatttctgtttagtatctgaaaacctgatagatgctacccttaagagcttgctcttccgtgtgctacgtagcacccacctggttaaaatctgaaaacaagtacccctttgacctgtctcccactgaagcttctactgccctggcagctcgcctgggcccaactcagaaacaggagccagcagagcactctctcacgctgatccagccgggcaccctgcttaagtcagtagaagctcgctggcactgcccgttcctacttttccgaagtactgcgtcactttgtcgtaagtaatggcccctgtgccttcttaatccagcagtcaagcttttgggagacctgaaaatgggaaaattcacactgggtttctggactgtagtattggaagccttagttatagtatattaagcctataattatactctgatttgatgggatttttgacatttacacttgtcaaaatgcagggggttttttttggtgcagatgattaaacagtcttccctatttggtgcaatgaagtatagcagataaaatgggggaggggtaaattatcaccttcaagaaaattacatgtttttatatatatttggaattgttaaattggttttgctgaaacatttcacccttgagatattatttgaatgttggtttcaataaaggttcttgaaattgtta

SEQ ID NO: 172631 - DNA, 884 bp, Homo sapiens
  Payload ID: 13942
  Gene Symbol: PDXDC1
  Gene Name: pyridoxal-dependent decarboxylase domain containing 1
  ENST ID: ENST00000562119
  CDS Start-End: 112-306
gccggccgcgggcgcgggggacgtcagcgctgccagcgtggaaggagctgcggggcgcgggaggaggaagtagagcccgggaccgccaggccaccaccggccgcctcagccatggacgcgtccctggagaagatagcagaccccacgttagctgaaatgggaaaaaacttgaaggaggcagtgaagatgctggaggacagtcagagaagaacagaagaggaaaatggaaagaagctcatatccggagatattccaggcccactccagggcagtgggcaagatatggccctgagtataagagcatgaagagctgcctttatgtcggcatggcgagcgacaacgtcgatgctgctgagctcgtggagaccattgcggccacagcccgggagatagaggagaactcgaggcttctggaaaacatgacagaagtggttcggaaaggcattcaggaagctcaagtggagctgcagaaggcaagtgaagaacggcttctggaagagggggtgttgcggcagatccctgtagtgggctccgtgctgaattggttttctccggtccaggctttacagaagggaagaacttttaacttgacagcaggctctctggagtccacagaacccatatatgtctacaaagcacaaggtgcaggagtcacgctgcctccaacgccctcgggcagtcgcaccaagcagaggcttccaggccagaagccttttaaaaggtccctgcgaggttcagatgctttgagtgagaccagctcagtcagtcacattgaagacttagaaaaggtggagcgcctatccagtgggccggagcagatcaccctcgaggccagcagcactgagggacacccaggggctcccagccctcagcacaccgaccag

SEQ ID NO: 172632 - DNA, 554 bp, Homo sapiens
  Payload ID: 13942
  Gene Symbol: PDXDC1
  Gene Name: pyridoxal-dependent decarboxylase domain containing 1
  ENST ID: ENST00000563667
  CDS Start-End: 1-554
gttccattctcgagggatgccggcgggaggtgaggcgggagacttggaagcctgggcccggaagtgaggctgctggaaagagtttggtgaacaatccaccgggcatcctccccccttcacctgcgcacgttagggagggccggcgtggcgcccagatagcagaccccacgttagctgaaatgggaaaaaacttgaaggaggcagtgaagatgctggaggacagtcagagaagaacagaagaggaaaatggaaagaagctcatatccggagatattccaggcccactccagggcagtgggcaagatatggtgagcatcctccagttagttcagaatctcatgcatggagatgaagatgaggagccccagagccccagaatccaaaatattggagaacaaggtcatatggctttgttgggacatagtctgggagcttatatttcaactctggacaaagagaagctgagaaaacttacaactaggatactttcagataccaccttatggctatgcagaattttcagatatgaaaatgggtgtgcttatttccacgaa

SEQ ID NO: 172633 - DNA, 283 bp, Homo sapiens
  Payload ID: 13942
  Gene Symbol: PDXDC1
  Gene Name: pyridoxal-dependent decarboxylase domain containing 1
  ENST ID: ENST00000566426
  CDS Start-End: 211-283
aaccatcaggttcggcagcccgcggcgccgcctggcagctcctcctcttctccgccccgccggccgcgggcgcgggggacgtcagcgctgccagcgtggaaggagctgcggggcgcgggaggaggaagtagagcccgggaccgccaggccaccaccggccgcctcagccatggacgcgtccctggagaagcagaccccacgttagctgaaatgggaaaaaacttgaaggaggcagtgaagatgctggaggacagtcagagaagaacagaagaggaaaatggaa

SEQ ID NO: 172634 - DNA, 556 bp, Homo sapiens
  Payload ID: 13942
  Gene Symbol: PDXDC1
  Gene Name: pyridoxal-dependent decarboxylase domain containing 1
  ENST ID: ENST00000563522
  CDS Start-End: 196-556
aggtgcgtcactagtatttccagcctttcactccatgaatagtactttgtgattattatacttctaccttgatgattgcaacaggctgctggaaagagtttggtgaacaatccaccgggcatcctccccccttcacctgcgcacgttagggagggccggcgtggcgcccagatagcagaccccacgttagctgaaatgggaaaaaacttgaaggaggcagtgaagatgctggaggacagtcagagaagaacagaagaggaaaatggaaagaagctcatatccggagatattccaggcccactccagggcagtgggcaagatatggtgagcatcctccagttagttcagaatctcatgcatggagatgaagatgaggagccccagagccccagaatccaaaatattggagaacaaggtcatatggctttgttgggacatagtctgggagcttatatttcaactctggacaaagagaagctgagaaaacttacaactaggatactttcagataccaccttatggctatgcagaattttcagatatgaaaatgggtgtg

SEQ ID NO: 172635 - DNA, 1113 bp, Homo sapiens; identical to SEQ ID NO: 172622
  Payload ID: 13942
  Gene Symbol: PDXDC1
  Gene Name: pyridoxal-dependent decarboxylase domain containing 1
  ENST ID: ENST00000610518
  CDS Start-End: 1-1113

SEQ ID NO: 172636 - DNA, 3777 bp, Homo sapiens
  Payload ID: 13942
  Gene Symbol: PDXDC1
  Gene Name: pyridoxal-dependent decarboxylase domain containing 1
  Uniprot ID: Q6P996
  ENST ID: ENST00000619589
  CDS Start-End: 78-2363
agcgtggaaggagctgcggggcgcgggaggaggaagtagagcccgggaccgccaggccaccaccggccgcctcagccatggacgcgtccctggagaagatagcagaccccacgttagctgaaatgggaaaaaacttgaaggaggcagtgaagatgctggaggacagtcagagaagaacagaagaggaaaatggaaagaagctcatatccggagatattccaggcccactccagggcagaatccaaaatattggagaacaaggtcatatggctttgttgggacatagtctgggagcttatatttcaactctggacaaagagaagctgagaaaacttacaactaggatactttcagataccaccttatggctatgcagaattttcagatatgaaaatgggtgtgcttatttccacgaagaggaaagagaaggacttgcaaagatatgtaggcttgccattcattctcgatatgaagacttcgtagtggatggcttcaatgtgttatataacaagaagcctgtcatatatcttagtgctgctgctagacctggcctgggccaatacctttgtaatcagctcggcttgcccttcccctgcttgtgccgtgtaccctgtaacactgtgtttggatcccagcatcagatggatgttgccttcctggagaaactgattaaagatgatatagagcgaggaagactgcccctgttgcttgtcgcaaatgcaggaacggcagcagtaggacacacagacaagattgggagattgaaagaactctgtgagcagtatggcatatggcttcatgtggagggtgtgaatctggcaacattggctctgggttatgtctcctcatcagtgctggctgcagccaaatgtgatagcatgacgatgactcctggcccgtggctgggtttgccagctgttcctgcggtgacactgtataaacacgatgaccctgccttgactttagttgctggtcttacatcaaataagcccacagacaaactccgtgccctgcctctgtggttatctttacaatacttgggacttgatgggtttgtggagaggatcaagcatgcctgtcaactgagtcaacggttgcaggaaagtttgaagaaagtgaattacatcaaaatcttggtggaagatgagctcagctccccagtggtggtgttcagatttttccaggaattaccaggctcagatccggtgtttaaagccgtcccagtgcccaacatgacaccttcaggagtcggccgggagaggcactcgtgtgacgcgctgaatcgctggctgggagaacagctgaagcagctggtgcctgcaagcggcctcacagtcatggatctggaagctgagggcacgtgtttgcggttcagccctttgatgaccgcagcagttttaggaactcggggagaggatgtggatcagctcgtagcctgcatagaaagcaaactgccagtgctgtgctgtacgctccagttgcgtgaagagttcaagcaggaagtggaagcaacagcaggtctcctatatgttgatgaccctaactggtctggaataggggttgtcaggtatgaacatgctaatgatgataagagcagtttgaaatcagatcccgaaggggaaaacatccatgctggactcctgaagaagttaaatgaactggaatctgacctaacctttaaaataggccctgagtataagagcatgaagagctgcctttatgtcggcatggcgagcgacaacgtcgatgctgctgagctcgtggagaccattgcggccacagcccgggagatagaggagaactcgaggcttctggaaaacatgacagaagtggttcggaaaggcattcaggaagctcaagtggagctgcagaaggcaagtgaagaacggcttctggaagagggggtgttgcggcagatccctgtagtgggctccgtgctgaattggttttctccggtccaggctttacagaagggaagaacttttaacttgacagcaggctctctggagtccacagaacccatatatgtctacaaagcacaaggtgcaggagtcacgctgcctccaacgccctcgggcagtcgcaccaagcagaggcttccaggccagaagccttttaaaaggtccctgcgaggttcagatgctttgagtgagaccagctcagtcagtcatattgaagacttagaaaaggtggagcgcctatccagtgggccggagcagatcaccctcgaggccagcagcactgagggacacccaggggctcccagccctcagcacaccgaccagaccgaggccttccagaaaggggtcccacacccagaagatgaccactcacaggtagaaggaccggagagcttaagatgagactcattgtgtggtttgagactgtactgagtattgtttcagggaagatgaagttctattggaaatgtgaactgtgccacatactaatataaattactgttgtttgtgcttcactgggattttggcacaaatatgtgcctgaaaggtaggctttctaggaggggagtcagcttgtctaacttcatgtacatgtagaaccacatgtttgctgtcctactacgacttttccctaagttaccataaacacattttattcacaaaaaacacttcgaatttcaagtgtctaccagtagcacccttgctctttctaaacataagcctaagtatatgaggttgcccgtggcaactttttggtaaaacagcttttcattagcactctccaggttctctgcaacacttcacagaggcgagactggctgtatcctttgctgtcggtctttagtacgatcaagttgcaatatacagtgggactgctagacttgaaggagagcagtgattgtgggattgtaaataagagcatcagaagccctccccagctactgctcttcgtggagacttagtaaggactgtgtctacttgagctgtggcaaggctgctgtctgggactgtcctctgccacaaggccatttctcccattatataccgtttgtaaagagaaactgtaaagtctcctcctgaccatatatttttaaatactggcaaagcttttaaaattggcacacaagtacagactgtgctcatttctgtttagtatctgaaaacctgatagatgctacccttaagagcttgctcttccgtgtgctacgtagcacccacctggttaaaatctgaaaacaagtacccctttgacctgtctcccactgaagcttctactgccctggcagctcgcctgggcccaactcagaaacaggagccagcagagcactctctcacgctgatccagccgggcaccctgcttaagtcagtagaagctcgctggcactgcccgttcctacttttccgaagtactgcgtcactttgtcgtaagtaatggcccctgtgccttcttaatccagcagtcaagcttttgggagacctgaaaatgggaaaattcacactgggtttctggactgtagtattggaagccttagttatagtatattaagcctataattatactctgatttgatgggatttttgacatttacacttgtcaaaatgcagggggttttttttggtgcagatgattaaacagtcttccctatttggtgcaatgaagtatagcagataaaatgggggaggggtaaattatcaccttcaagaaaattacatgtttttatatatatttggaattgttaaattggttttgctgaaacatttcacccttgagatattatttgaatgttggtttcaataaaggttcttgaaattgtta

SEQ ID NO: 172637 - DNA, 2183 bp, Homo sapiens
  Payload ID: 13942
  Gene Symbol: PDXDC1
  Gene Name: pyridoxal-dependent decarboxylase domain containing 1
  Uniprot ID: Q6P996
  ENST ID: ENST00000614573
  CDS Start-End: 121-1410
ctccgccccgccggccgcgggcgcgggggacgtcagcgctgccagcgtggaaggagctgcggggcgcgggaggaggaagtagagcccgggaccgccaggccaccaccggccgcctcagccatggacgcgtccctggagaagatagcagaccccacgttagctgaaatgggaaaaaacttgaaggaggcagtgaagatgctggaggacagtcagagaagaacagaagaggaaaatggaaagaagctcatatccggagatattccaggcccactccagggcagtgggcaagatatggtgagcatcctccagttagttcagaatctcatgcatggagatgaagatgaggagccccagagccccagaatccaaaatattggagaacaaggtcatatggctttgttgggacatagtctgggagcttatatttcaactctggacaaagagaagctgagaaaacttacaactaggatactttcagataccaccttatggctatgcagaattttcagatatgaaaatgggtgtgcttatttccacgaagaggaaagagaaggacttgcaaagatatgtaggcttgccattcattctcgatatgaagacttcgtagtggatggcttcaatgtgttatataacaagaagcctgtcatatatcttagtgctgctgctagacctggcctgggccaatacctttgtaatcaggatgttgccttcctggagaaactgattaaagatgatatagagcgaggaagactgcccctgttgcttgtcgcaaatgcaggaacggcagcagtaggacacacagacaagattgggagattgaaagaactctgtgagcagtatggcatatggcttcatgtggagggtgtgaatctggcaacattggctctgggttatgtctcctcatcagtgctggctgcagccaaatgtgatagcatgacgatgactcctggcccgtggctgggtttgccagctgttcctgcggtgacactgtataaacacgatgaccctgccttgactttagttgctggtcttacatcaaataagcccacagacaaactccgtgccctgcctctgtggttatctttacaatacttgggacttgatgggtttgtggagaggatcaagcatgcctgtcaactgagtcaacggttgcaggaaagtttgaagaaagtgaattacatcaaaatcttggtggaagatgagctcagctccccagtggtggtgttcagatttttccaggaattaccaggctcagatccggtgtttaaagccgtcccagtgcccaacatgacaccttcaggagtcggccgggagaggcactcgtgtgacgcgctgaatcgctgggtgagaatggcagtcacccccctttcctttcaggtccccgtccatcaccatccgacctgctggtgagggtgacgcgtgctcgtgtatgggaactgaggcccacaggaggagccgccctgccagtgctgggcctgctctggagttctgttccccattgcgttaccacctcacgagctgggtcacctctggcaagtccttctggcattgctccctcactttccttgctgctgtataaggctgtgagacaacaggcaaaaggtgggctgcagggcagctgcggtgggttctggtgagcctgggcagcacagccgggagccccaggcagagtctgccgagcatctgcagctggcagtgtggagccaggcctgcactttgatagcgttttgggcactgaatagcagctctaggatttgagtctgaagggtcttgtgaacagtgtgggatggcggcagcagcggttctagccaatgctggacacgcccagcctagcagggttggcagataagtcctggtacatccatgctggggctcagcacagctgtgagagaccacagagctgagtgtctcaagcagaaaggaactggtcataaacgaaatgaatcaatgcaggttactaagcagtgtcaagtagcatgttttatgacaacaactacaactccctgcccgccactaggagaaaagacgctgggggcagaccacatgtcagcagtgggtgtcgcttagtaatatattgtgggtcattgttattttcttctttttgtttacttgtatttcctaaatttttctacaatgaacttgtattaataagaaaaaaccataaaatttactgtttttaaaaa

SEQ ID NO: 172638 - DNA, 4173 bp, Homo sapiens
  Payload ID: 13942
  Gene Symbol: PDXDC1
  Gene Name: pyridoxal-dependent decarboxylase domain containing 1
  Uniprot ID: Q6P996
  ENST ID: ENST00000614833
  CDS Start-End: 30-2123
cccagatagcagaccccacgttagctgaaatgggaaaaaacttgaaggaggcagtgaagatgctggaggacagtcagagaagaacagaagaggaaaatggaaagaagctcatatccggagatattccaggcccactccagggcagatatgaaaatgggtgtgcttatttccacgaagaggaaagagaaggacttgcaaagatatgtaggcttgccattcattctcgatatgaagacttcgtagtggatggcttcaatgtgttatataacaagaagcctgtcatatatcttagtgctgctgctagacctggcctgggccaatacctttgtaatcagctcggcttgcccttcccctgcttgtgccgtgtaccctgtaacactgtgtttggatcccagcatcagatggatgttgccttcctggagaaactgattaaagatgatatagagcgaggaagactgcccctgttgcttgtcgcaaatgcaggaacggcagcagtaggacacacagacaagattgggagattgaaagaactctgtgagcagtatggcatatggcttcatgtggagggtgtgaatctggcaacattggctctgggttatgtctcctcatcagtgctggctgcagccaaatgtgatagcatgacgatgactcctggcccgtggctgggtttgccagctgttcctgcggtgacactgtataaacacgatgaccctgccttgactttagttgctggtcttacatcaaataagcccacagacaaactccgtgccctgcctctgtggttatctttacaatacttgggacttgatgggtttgtggagaggatcaagcatgcctgtcaactgagtcaacggttgcaggaaagtttgaagaaagtgaattacatcaaaatcttggtggaagatgagctcagctccccagtggtggtgttcagatttttccaggaattaccaggctcagatccggtgtttaaagccgtcccagtgcccaacatgacaccttcaggagtcggccgggagaggcactcgtgtgacgcgctgaatcgctggctgggagaacagctgaagcagctggtgcctgcaagcggcctcacagtcatggatctggaagctgagggcacgtgtttgcggttcagccctttgatgaccgcagcagttttaggaactcggggagaggatgtggatcagctcgtagcctgcatagaaagcaaactgccagtgctgtgctgtacgctccagttgcgtgaagagttcaagcaggaagtggaagcaacagcaggtctcctatatgttgatgaccctaactggtctggaataggggttgtcaggtatgaacatgctaatgatgataagagcagtttgaaatcagatcccgaaggggaaaacatccatgctggactcctgaagaagttaaatgaactggaatctgacctaacctttaaaataggccctgagtataagagcatgaagagctgcctttatgtcggcatggcgagcgacaacgtcgatgctgctgagctcgtggagaccattgcggccacagcccgggagatagaggagaactcgaggcttctggaaaacatgacagaagtggttcggaaaggcattcaggaagctcaagtggagctgcagaaggcaagtgaagaacggcttctggaagagggggtgttgcggcagatccctgtagtgggctccgtgctgaattggttttctccggtccaggctttacagaagggaagaacttttaacttgacagcaggctctctggagtccacagaacccatatatgtctacaaagcacaaggtgcaggagtcacgctgcctccaacgccctcgggcagtcgcaccaagcagaggcttccaggccagaagccttttaaaaggtccctgcgaggttcagatgctttgagtgagaccagctcagtcagtcatattgaagacttagaaaaggtggagcgcctatccagtgggccggagcagatcaccctcgaggccagcagcactgagggacacccaggggctcccagccctcagcacaccgaccagaccgaggccttccagaaaggggtcccacacccagaagatgaccactcacaggtagaaggaccggagagcttaagatgagactcattgtgtggtttgagactgtactgagtattgtttcagggaagatgaagttctattggaaatgtgaactgtgccacatactaatataaattactgttgtttgtgcttcactgggattttggcacaaatatgtgcctgaaaggtaggctttctaggaggggagtcagcttgtctaacttcatgtacatgtagaaccacatgtttgctgtcctactacgacttttccctaagttaccataaacacattttattcacaaaaaacacttcgaatttcaagtgtctaccagtagcacccttgctctttctaaacataagcctaagtatatgaggttgcccgtggcaactttttggtaaaacagcttttcattagcactctccaggttctctgcaacacttcacagaggcgagactggctgtatcctttgctgtcggtctttagtacgatcaagttgcaatatacagtgggactgctagacttgaaggagagcagtgattgtgggattgtaaataagagcatcagaagccctccccagctactgctcttcgtggagacttagtaaggactgtgtctacttgagctgtggcaaggctgctgtctgggactgtcctctgccacaaggccatttctcccattatataccgtttgtaaagagaaactgtaaagtctcctcctgaccatatatttttaaatactggcaaagcttttaaaattggcacacaagtacagactgtgctcatttctgtttagtatctgaaaacctgatagatgctacccttaagagcttgctcttccgtgtgctacgtagcacccacctggttaaaatctgaaaacaagtacccctttgacctgtctcccactgaagcttctactgccctggcagctcgcctgggcccaactcagaaacaggagccagcagagcactctctcacgctgatccagccgggcaccctgcttaagtcagtagaagctcgctggcactgcccgttcctacttttccgaagtactgcgtcactttgtcgtaagtaatggcccctgtgccttcttaatccagcagtcaagcttttgggagacctgaaaatgggaaaattcacactgggtttctggactgtagtattggaagccttagttatagtatattaagcctataattatactctgatttgatgggatttttgacatttacacttgtcaaaatgcagggggttttttttggtgcagatgattaaacagtcttccctatttggtgcaatgaagtatagcagataaaatgggggaggggtaaattatcaccttcaagaaaattacatgtttttatatatatttggaattgttaaattggttttgctgaaacatttcacccttgagatattatttgaatgttggtttcaataaaggttcttgaaattgttaccagtgaattcagtttataaatcttattacaaaagacttacccacgtacctgaaatagctgccgatagaccagtgagaggtaggttctcctctgcccgttattaccgaccaaaaaaaaaactggacatcaattttttagtaaaccaaaaaataagtctcaacaaatgcctttgccaaaataaggttttattttgaaagtcatttgatgaaagtcatttgaaagacactgaggagggaaggaggcctaagacccaacagatgtaggatccagatctggattcgtgccagccccaccaatggtctgtcaggccaagaaggtgctttctttggtaattcatgttttttaacttcctggagaagagatcttttcccacaagccatcttcattttttttgtagagtagggctttatttccagaaaacagtgtgtgagctggagatgggtgtttttttaaaaacatcaaggtagatctaatatgttcaacaaagtggggtggctcagccagaggcgaagtggaaagattctgaaaacacaagatggtgggcattagagaagccaaccttactgtcccctgctgtgataaagatgtcaaagtatctttgttcttggacacaaatatatataataaaatacgtt

SEQ ID NO: 172639 - DNA, 2183 bp, Homo sapiens; identical to SEQ ID NO: 172625
  Payload ID: 13942
  Gene Symbol: PDXDC1
  Gene Name: pyridoxal-dependent decarboxylase domain containing 1
  Uniprot ID: Q6P996
  ENST ID: ENST00000613798
  CDS Start-End: 121-1410

SEQ ID NO: 172640 - DNA, 2047 bp, Homo sapiens
  Payload ID: 13942
  Gene Symbol: PDXDC1
  Gene Name: pyridoxal-dependent decarboxylase domain containing 1
  ENST ID: ENST00000610865
  CDS Start-End: 189-1685
ccccgccccgccgcctctcaaccatcaggttcggcagcccgcggcgccgcctggcagctcctcctcttctccgccccgccggccgcgggcgcgggggacgtcagcgctgccagcgtggaaggagctgcggggcgcgggaggaggaagtagagcccgggaccgccaggccaccaccggccgcctcagccatggacgcgtccctggagaagatagcagaccccacgttagctgaaatgggaaaaaacttgaaggaggcagtgaagatgctggaggacagtcagagaagaacagaagaggaaaatggaaagaagctcatatccggagatattccaggcccactccagggcagtgggcaagatatggtgagcatcctccagttagttcagaatctcatgcatggagatgaagatgaggagccccagagccccagaatccaaaatattggagaacaaggtcatatggctttgttgggacatagtctgggagcttatatttcaactctggacaaagagaagctgagaaaacttacaactaggatactttcagataccaccttatggctatgcagaattttcagatatgaaaatgggtgtgcttatttccacgaagaggaaagagaaggacttgcaaagatatgtaggcttgccattcattctcgatatgaagacttcgtagtggatggcttcaatgtgttatataacaagaagcctgtcatatatcttagtgctgctgctagacctggcctgggccaatacctttgtaatcagctcggcttgcccttcccctgcttgtgccgtgtaccctgtaacactgtgtttggatcccagcatcagatggatgttgccttcctggagaaactgattaaagatgatatagagcgaggaagactgcccctgttgcttgtcgcaaatgcaggaacggcagcagtaggacacacagacaagattgggagattgaaagaactctgtgagcagtatggcatatggcttcatgtggagggtgtgaatctggcaacattggctctgggttatgtctcctcatcagtgctggctgcagccaaatgtgatagcatgacgatgactcctggcccgtggctgggtttgccagctgttcctgcggtgacactgtataaacacgatgaccctgccttgactttagttgctggtcttacatcaaataagcccacagacaaactccgtgccctgcctctgtggttatctttacaatacttgggacttgatgggtttgtggagaggatcaagcatgcctgtcaactgagtcaacggttgcaggaaagtttgaagaaagtgaattacatcaaaatcttggtggaagatgagctcagctccccagtggtggtgttcagatttttccaggaattaccaggctcagatccggtgtttaaagccgtcccagtgcccaacatgacaccttcaggagtcggccgggagaggcactcgtgtgacgcgctgaatcgctggctgggagaacagctgaagcagctggtgcctgcaagcggcctcacagtcatggatctggaagctgagggcacgtgtttgcggttcagccctttgatgaccgcagcagggtggtcccactgtgggaccacaaccaggtatgactgtgtgagaagcaggctcactaccaggctaccagggagcacaggggagcaggcgccaccttgaggcataaacccagagaaacaagacctccaagacggccaggcactggggcacacgccggtaacacagcaccgtgggagctgagacggaaggatcgcctgagcccaggattttgaaaccaccctgggcaacacagtgagaccccgtatctacaaaaaaatacacattagccaggcatggcggcatgcgcctggggtcccaagtactcgggaggtagaggagagaaaaatcacttgagcccagagaggtcaaggctacagggagctgagatcgcatcactgtactccagctggggtgaaacggcgagactctacctcaaaaataaataaatacatacataattaataaataaaacatcaaagacc

SEQ ID NO: 172641 - DNA, 1819 bp, Homo sapiens
  Payload ID: 13942
  Gene Symbol: PDXDC1
  Gene Name: pyridoxal-dependent decarboxylase domain containing 1
  ENST ID: ENST00000621760
  CDS Start-End: 865-1479
gaggaagtagagcccgggaccgccaggccaccaccggccgcctcagccatggacgcgtccctggagaagatagcagaccccacgttagctgaaatgggaaaaaacttgaaggaggcagtgaagatgctggaggacagtcagagaagaacagaagaggaaaatggaaagaagctcatatccggagatattccaggcccactccagggcagtgggcaagatatggtgagcatcctccagttagttcagaatctcatgcatggagatgaagatgaggagccccagagccccaggtaatgaacctggcagcttctcttttcaagtaatccaaaatattggagaacaaggtcatatggctttgttgggacatagtctgggagcttatatttcaactctggacaaagagaagctgagaaaacttacaactaggatactttcagataccaccttatggctatgcagaattttcagatatgaaaatgggtgtgcttatttccacgaagaggaaagagaaggacttgcaaagatatgtaggcttgccattcattctcgatatgaagacttcgtagtggatggcttcaatgtgttatataacaagaagcctgtcatatatcttagtgctgctgctagacctggcctgggccaatacctttgtaatcagctcggcttgcccttcccctgcttgtgccgtgtaccctgtaacactgtgtttggatcccagcagtaggacacacagacaagattgggagattgaaagaactctgtgagcagtatggcatatggcttcatgtggagggtgtgaatctggcaacattggctctgggttatgtctcctcatcagtgctggctgcagccaaatgtgatagcatgacgatgactcctggcccgtggctgggtttgccagctgttcctgcggtgacactgtataaacacgatgaccctgccttgactttagttgctggtcttacatcaaataagcccacagacaaactccgtgccctgcctctgtggttatctttacaatacttgggacttgatgggtttgtggagaggatcaagcatgcctgtcaactgagtcaacggttgcaggaaagtttgaagaaagtgaattacatcaaaatcttggtggaagatgagctcagctccccagtggtggtgttcagatttttccaggaattaccaggctcagatccggtgtttaaagccgtcccagtgcccaacatgacaccttcaggagtcggccgggagaggcactcgtgtgacgcgctgaatcgctggctgggagaacagctgaagcagctggtgcctgcaagcggcctcacagtcatggatctggaagctgagggcacgtgtttgcggttcagccctttgatgaccgcagcagggtggtcccactgtgggaccacaaccaggtatgactgtgtgagaagcaggctcactaccaggctaccagggagcacaggggagcaggcgccaccttgaggcataaacccagagaaacaagacctccaagacggccaggcactggggcacacgccggtaacacagcaccgtgggagctgagacggaaggatcgcctgagcccaggattttgaaaccaccctgggcaacacagtgagaccccgtatctacaaaaaaatacacattagccaggcatggcggcatgcgcctggggtcccaagtactcgggaggtagaggagagaaaaatcacttgagcccagagaggtcaaggctacagggagctgagatcgcatcactgtactccagctggggtgaaacggcgagactctacctcaaaaataaataaatacatacataatt

SEQ ID NO: 172642 - DNA, 1113 bp, Homo sapiens; identical to SEQ ID NO: 172622
  Payload ID: 13942
  Gene Symbol: PDXDC1
  Gene Name: pyridoxal-dependent decarboxylase domain containing 1
  ENST ID: ENST00000611292
  CDS Start-End: 1-1113

SEQ ID NO: 172643 - DNA, 2048 bp, Homo sapiens; identical to SEQ ID NO: 172626
  Payload ID: 13942
  Gene Symbol: PDXDC1
  Gene Name: pyridoxal-dependent decarboxylase domain containing 1
  ENST ID: ENST00000614060
  CDS Start-End: 189-1685

SEQ ID NO: 172644 - DNA, 1819 bp, Homo sapiens; identical to SEQ ID NO: 172641
  Payload ID: 13942
  Gene Symbol: PDXDC1
  Gene Name: pyridoxal-dependent decarboxylase domain containing 1
  ENST ID: ENST00000615160
  CDS Start-End: 865-1479

SEQ ID NO: 172645 - DNA, 4523 bp, Homo sapiens
  Payload ID: 13942
  Gene Symbol: PDXDC1
  Gene Name: pyridoxal-dependent decarboxylase domain containing 1
  Uniprot ID: Q6P996
  ENST ID: ENST00000618389
  CDS Start-End: 98-2464
cgggggacgtcagcgctgccagcgtggaaggagctgcggggcgcgggaggaggaagtagagcccgggaccgccaggccaccaccggccgcctcagccatggacgcgtccctggagaagatagcagaccccacgttagctgaaatgggaaaaaacttgaaggaggcagtgaagatgctggaggacagtcagagaagaacagaagaggaaaatggaaagaagctcatatccggagatattccaggcccactccagggcagtgggcaagatatggtgagcatcctccagttagttcagaatctcatgcatggagatgaagatgaggagccccagagccccagaatccaaaatattggagaacaaggtcatatggctttgttgggacatagtctgggagcttatatttcaactctggacaaagagaagctgagaaaacttacaactaggatactttcagataccaccttatggctatgcagaattttcagatatgaaaatgggtgtgcttatttccacgaagaggaaagagaaggacttgcaaagatatgtaggcttgccattcattctcgatatgaagacttcgtagtggatggcttcaatgtgttatataacaagaagcctgtcatatatcttagtgctgctgctagacctggcctgggccaatacctttgtaatcagctcggcttgcccttcccctgcttgtgccgtgtaccctgtaacactgtgtttggatcccagcatcagatggatgttgccttcctggagaaactgattaaagatgatatagagcgaggaagactgcccctgttgcttgtcgcaaatgcaggaacggcagcagtaggacacacagacaagattgggagattgaaagaactctgtgagcagtatggcatatggcttcatgtggagggtgtgaatctggcaacattggctctgggttatgtctcctcatcagtgctggctgcagccaaatgtgatagcatgacgatgactcctggcccgtggctgggtttgccagctgttcctgcggtgacactgtataaacacgatgaccctgccttgactttagttgctggtcttacatcaaataagcccacagacaaactccgtgccctgcctctgtggttatctttacaatacttgggacttgatgggtttgtggagaggatcaagcatgcctgtcaactgagtcaacggttgcaggaaagtttgaagaaagtgaattacatcaaaatcttggtggaagatgagctcagctccccagtggtggtgttcagatttttccaggaattaccaggctcagatccggtgtttaaagccgtcccagtgcccaacatgacaccttcaggagtcggccgggagaggcactcgtgtgacgcgctgaatcgctggctgggagaacagctgaagcagctggtgcctgcaagcggcctcacagtcatggatctggaagctgagggcacgtgtttgcggttcagccctttgatgaccgcagcagttttaggaactcggggagaggatgtggatcagctcgtagcctgcatagaaagcaaactgccagtgctgtgctgtacgctccagttgcgtgaagagttcaagcaggaagtggaagcaacagcaggtctcctatatgttgatgaccctaactggtctggaataggggttgtcaggtatgaacatgctaatgatgataagagcagtttgaaatcagatcccgaaggggaaaacatccatgctggactcctgaagaagttaaatgaactggaatctgacctaacctttaaaataggccctgagtataagagcatgaagagctgcctttatgtcggcatggcgagcgacaacgtcgatgctgctgagctcgtggagaccattgcggccacagcccgggagatagaggagaactcgaggcttctggaaaacatgacagaagtggttcggaaaggcattcaggaagctcaagtggagctgcagaaggcaagtgaagaacggcttctggaagagggggtgttgcggcagatccctgtagtgggctccgtgctgaattggttttctccggtccaggctttacagaagggaagaacttttaacttgacagcaggctctctggagtccacagaacccatatatgtctacaaagcacaaggtgcaggagtcacgctgcctccaacgccctcgggcagtcgcaccaagcagaggcttccaggccagaagccttttaaaaggtccctgcgaggttcagatgctttgagtgagaccagctcagtcagtcatattgaagacttagaaaaggtggagcgcctatccagtgggccggagcagatcaccctcgaggccagcagcactgagggacacccaggggctcccagccctcagcacaccgaccagaccgaggccttccagaaaggggtcccacacccagaagatgaccactcacaggtagaaggaccggagagcttaagatgagactcattgtgtggtttgagactgtactgagtattgtttcagggaagatgaagttctattggaaatgtgaactgtgccacatactaatataaattactgttgtttgtgcttcactgggattttggcacaaatatgtgcctgaaaggtaggctttctaggaggggagtcagcttgtctaacttcatgtacatgtagaaccacatgtttgctgtcctactacgacttttccctaagttaccataaacacattttattcacaaaaaacacttcgaatttcaagtgtctaccagtagcacccttgctctttctaaacataagcctaagtatatgaggttgcccgtggcaactttttggtaaaacagcttttcattagcactctccaggttctctgcaacacttcacagaggcgagactggctgtatcctttgctgtcggtctttagtacgatcaagttgcaatatacagtgggactgctagacttgaaggagagcagtgattgtgggattgtaaataagagcatcagaagccctccccagctactgctcttcgtggagacttagtaaggactgtgtctacttgagctgtggcaaggctgctgtctgggactgtcctctgccacaaggccatttctcccattatataccgtttgtaaagagaaactgtaaagtctcctcctgaccatatatttttaaatactggcaaagcttttaaaattggcacacaagtacagactgtgctcatttctgtttagtatctgaaaacctgatagatgctacccttaagagcttgctcttccgtgtgctacgtagcacccacctggttaaaatctgaaaacaagtacccctttgacctgtctcccactgaagcttctactgccctggcagctcgcctgggcccaactcagaaacaggagccagcagagcactctctcacgctgatccagccgggcaccctgcttaagtcagtagaagctcgctggcactgcccgttcctacttttccgaagtactgcgtcactttgtcgtaagtaatggcccctgtgccttcttaatccagcagtcaagcttttgggagacctgaaaatgggaaaattcacactgggtttctggactgtagtattggaagccttagttatagtatattaagcctataattatactctgatttgatgggatttttgacatttacacttgtcaaaatgcagggggttttttttggtgcagatgattaaacagtcttccctatttggtgcaatgaagtatagcagataaaatgggggaggggtaaattatcaccttcaagaaaattacatgtttttatatatatttggaattgttaaattggttttgctgaaacatttcacccttgagatattatttgaatgttggtttcaataaaggttcttgaaattgttaccagtgaattcagtttataaatcttattacaaaagacttacccacgtacctgaaatagctgccgatagaccagtgagaggtaggttctcctctgcccgttattaccgaccaaaaaaaaaactggacatcaattttttagtaaaccaaaaaataagtctcaacaaatgcctttgccaaaataaggttttattttgaaagtcatttgatgaaagtcatttgaaagacactgaggagggaaggaggcctaagacccaacagatgtaggatccagatctggattcgtgccagccccaccaatggtctgtcaggccaagaaggtgctttctttggtaattcatgttttttaacttcctggagaagagatcttttcccacaagccatcttcattttttttgtagagtagggctttatttccagaaaacagtgtgtgagctggagatgggtgtttttttaaaaacatcaaggtagatctaatatgttcaacaaagtggggtggctcagccagaggcgaagtggaaagattctgaaaacacaagatggtgggcattagagaagccaaccttactgtcccctgctgtgataaagatgtcaaagtatctttgttcttggacacaaatatatataataaaatacgttaagaaatga

SEQ ID NO: 172646 - DNA, 2965 bp, Homo sapiens
  Payload ID: 13942
  Gene Symbol: PDXDC1
  Gene Name: pyridoxal-dependent decarboxylase domain containing 1
  ENST ID: ENST00000617553
  CDS Start-End: 140-2560
agcttagatcagtgccttctctgaacagcgttcactaagcagcccccaaccccaaaacccccaagtccccgggcgccgaggacgctgcgagtcctgcgcatgcgcaaggttgcccactcgctcaccgcctccttggcgaatggcctgttccattctcgagggatgccggcgggaggtgaggcgggagacttggaagcctgggcccggaagtgagatagcagaccccacgttagctgaaatgggaaaaaacttgaaggaggcagtgaagatgctggaggacagtcagagaagaacagaagaggaaaatggaaagaagctcatatccggagatattccaggcccactccagggcagtgggcaagatatggtgagcatcctccagttagttcagaatctcatgcatggagatgaagatgaggagccccagagccccagaatccaaaatattggagaacaaggtcatatggctttgttgggacatagtctgggagcttatatttcaactctggacaaagagaagctgagaaaacttacaactaggatactttcagataccaccttatggctatgcagaattttcagatatgaaaatgggtgtgcttatttccacgaagaggaaagagaaggacttgcaaagatatgtaggcttgccattcattctcgatatgaagacttcgtagtggatggcttcaatgtgttatataacaagaagcctgtcatatatcttagtgctgctgctagacctggcctgggccaatacctttgtaatcagctcggcttgcccttcccctgcttgtgccgtgtaccctgtaacactgtgtttggatcccagcatcagatggatgttgccttcctggagaaactgattaaagatgatatagagcgaggaagactgcccctgttgcttgtcgcaaatgcaggaacggcagcagtaggacacacagacaagattgggagattgaaagaactctgtgagcagtatggcatatggcttcatgtggagggtgtgaatctggcaacattggctctgggttatgtctcctcatcagtgctggctgcagccaaatgtgatagcatgacgatgactcctggcccgtggctgggtttgccagctgttcctgcggtgacactgtataaacacgatgaccctgccttgactttagttgctggtcttacatcaaataagcccacagacaaactccgtgccctgcctctgtggttatctttacaatacttgggacttgatgggtttgtggagaggatcaagcatgcctgtcaactgagtcaacggttgcaggaaagtttgaagaaagtgaattacatcaaaatcttggtggaagatgagctcagctccccagtggtggtgttcagatttttccaggaattaccaggctcagatccggtgtttaaagccgtcccagtgcccaacatgacaccttcaggagtcggccgggagaggcactcgtgtgacgcgctgaatcgctggctgggagaacagctgaagcagctggtgcctgcaagcggcctcacagtcatggatctggaagctgagggcacgtgtttgcggttcagccctttgatgaccgcagcagttttaggaactcggggagaggatgtggatcagctcgtagcctgcatagaaagcaaactgccagtgctgtgctgtacgctccagttgcgtgaagagttcaagcaggaagtggaagcaacagcaggtctcctatatgttgatgaccctaactggtctggaataggggttgtcaggtatgaacatgctaatgatgataagagcagtttgaaatcagatcccgaaggggaaaacatccatgctggactcctgaagaagttaaatgaactggaatctgacctaacctttaaaataggccctgagtataagagcatgaagagctgcctttatgtcggcatggcgagcgacaacgtcgatgctgctgagctcgtggagaccattgcggccacagcccgggagatagaggagaactcgaggcttctggaaaacatgacagaagtggttcggaaaggcattcaggaagctcaagtggagctgcagaaggcaagtgaagaacggcttctggaagagggggtgttgcggcagatccctgtagtgggctccgtgctgaattggttttctccggtccaggctttacagaagggaagaacttttaacttgacagcaggctctctggagtccacagaacccatatatgtctacaaagcacaaggtgcaggagtcacgctgcctccaacgccctcgggcagtcgcaccaagcagaggcttccaggccagaagccttttaaaaggtccctgcgaggttcagatgctttgagtgagaccagctcagtcagtcatattgaagacttagaaaaggtggagcgcctatccagtgggccggagcagatcaccctcgaggccagcagcactgagggacacccaggggctcccagccctcagcacaccgaccagaccgaggccttccagaaaggggtcccacacccagaagatgaccactcacaggtagaaggaccggagagcttaagatgagactcattgtgtggtttgagactgtactgagtattgtttcagggaagatgaagttctattggaaatgtgaactgtgccacatactaatataaattactgttgtttgtgcttcactgggattttggcacaaatatgtgcctgaaaggtaggctttctaggaggggagtcagcttgtctaacttcatgtacatgtagaaccacatgtttgctgtcctactacgacttttccctaagttaccataaacacattttattcacaaaaaacacttcgaatttcaagtgtctaccagtagcacccttgctctttctaaacataagcctaagtatatgaggttgcccgtggcaactttttggtaaaacagcttttcattagcactctccaggttctctgcaacacttcacaga

SEQ ID NO: 172647 - DNA, 2683 bp, Homo sapiens
  Payload ID: 13942
  Gene Symbol: PDXDC1
  Gene Name: pyridoxal-dependent decarboxylase domain containing 1
  Uniprot ID: Q6P996
  ENST ID: ENST00000627450
  CDS Start-End: 72-2354
gaaggagctgcggggcgcgggaggaggaagtagagcccgggaccgccaggccaccaccggccgcctcagccatggacgcgtccctggagaagatagcagaccccacgttagctgaaatgggaaaaaacttgaaggaggcagtgaagatgctggaggacagtcagagaacagaagaggaaaatggaaagaagctcatatccggagatattccaggcccactccagggcagaatccaaaatattggagaacaaggtcatatggctttgttgggacatagtctgggagcttatatttcaactctggacaaagagaagctgagaaaacttacaactaggatactttcagataccaccttatggctatgcagaattttcagatatgaaaatgggtgtgcttatttccacgaagaggaaagagaaggacttgcaaagatatgtaggcttgccattcattctcgatatgaagacttcgtagtggatggcttcaatgtgttatataacaagaagcctgtcatatatcttagtgctgctgctagacctggcctgggccaatacctttgtaatcagctcggcttgcccttcccctgcttgtgccgtgtaccctgtaacactgtgtttggatcccagcatcagatggatgttgccttcctggagaaactgattaaagatgatatagagcgaggaagactgcccctgttgcttgtcgcaaatgcaggaacggcagcagtaggacacacagacaagattgggagattgaaagaactctgtgagcagtatggcatatggcttcatgtggagggtgtgaatctggcaacattggctctgggttatgtctcctcatcagtgctggctgcagccaaatgtgatagcatgacgatgactcctggcccgtggctgggtttgccagctgttcctgcggtgacactgtataaacacgatgaccctgccttgactttagttgctggtcttacatcaaataagcccacagacaaactccgtgccctgcctctgtggttatctttacaatacttgggacttgatgggtttgtggagaggatcaagcatgcctgtcaactgagtcaacggttgcaggaaagtttgaagaaagtgaattacatcaaaatcttggtggaagatgagctcagctccccagtggtggtgttcagatttttccaggaattaccaggctcagatccggtgtttaaagccgtcccagtgcccaacatgacaccttcaggagtcggccgggagaggcactcgtgtgacgcgctgaatcgctggctgggagaacagctgaagcagctggtgcctgcaagcggcctcacagtcatggatctggaagctgagggcacgtgtttgcggttcagccctttgatgaccgcagcagttttaggaactcggggagaggatgtggatcagctcgtagcctgcatagaaagcaaactgccagtgctgtgctgtacgctccagttgcgtgaagagttcaagcaggaagtggaagcaacagcaggtctcctatatgttgatgaccctaactggtctggaataggggttgtcaggtatgaacatgctaatgatgataagagcagtttgaaatcagatcccgaaggggaaaacatccatgctggactcctgaagaagttaaatgaactggaatctgacctaacctttaaaataggccctgagtataagagcatgaagagctgcctttatgtcggcatggcgagcgacaacgtcgatgctgctgagctcgtggagaccattgcggccacagcccgggagatagaggagaactcgaggcttctggaaaacatgacagaagtggttcggaaaggcattcaggaagctcaagtggagctgcagaaggcaagtgaagaacggcttctggaagagggggtgttgcggcagatccctgtagtgggctccgtgctgaattggttttctccggtccaggctttacagaagggaagaacttttaacttgacagcaggctctctggagtccacagaacccatatatgtctacaaagcacaaggtgcaggagtcacgctgcctccaacgccctcgggcagtcgcaccaagcagaggcttccaggccagaagccttttaaaaggtccctgcgaggttcagatgctttgagtgagaccagctcagtcagtcacattgaagacttagaaaaggtggagcgcctatccagtgggccggagcagatcaccctcgaggccagcagcactgagggacacccaggggctcccagccctcagcacaccgaccagaccgaggccttccagaaaggggtcccacacccagaagatgaccactcacaggtagaaggaccggagagcttaagatgagactcattgtgtggtttgagactgtactgagtattgtttcagggaagatgaagttctattggaaatgtgaactgtgccacatactaatataaattactgttgtttgtgcttcactgggattttggcacaaatatgtgcctgaaaggtaggctttctaggaggggagtcagcttgtctaacttcatgtacatgtagaaccacgtttgctgtcctactacgacttttccctaagttaccataaacacattttattcacaaaaaacacttcgaatttcaagtgtctaccagtagcacccttgctctttctaaacataagcctaagtatatga

SEQ ID NO: 172648 - DNA, 884 bp, Homo sapiens
  Payload ID: 13942
  Gene Symbol: PDXDC1
  Gene Name: pyridoxal-dependent decarboxylase domain containing 1
  ENST ID: ENST00000633039
  CDS Start-End: 112-306
gccggccgcgggcgcgggggacgtcagcgctgccagcgtggaaggagctgcggggcgcgggaggaggaagtagagcccgggaccgccaggccaccaccggccgcctcagccatggacgcgtccctggagaagatagcagaccccacgttagctgaaatgggaaaaaacttgaaggaggcagtgaagatgctggaggacagtcagagaagaacagaagaggaaaatggaaagaagctcatatccggagatattccaggcccactccagggcagtgggcaagatatggccctgagtataagagcatgaagagctgcctttatgtcggcatggcgagcgacaacgtcgatgctgctgagctcgtggagaccattgcggccacagcccgggagatagaggagaactcgaggcttctggaaaacatgacagaagtggttcggaaaggcattcaggaagctcaagtggagctgcagaaggcaagtgaagaacggcttctggaagagggggtgttgcggcagatccctgtagtgggctccgtgctgaattggttttctccggtccaggctttacagaagggaagaacttttaacttgacagcaggctctctggagtccacagaacccatatatgtctacaaagcacaaggtgcaggagtcacgctgcctccaacgccctcgggcagtcgcaccaagcagaggcttccaggccagaagccttttaaaaggtccctgcgaggttcagatgctttgagtgagaccagctcagtcagtcatattgaagacttagaaaaggtggagcgcctatccagtgggccggagcagatcaccctcgaggccagcagcactgagggacacccaggggctcccagccctcagcacaccgaccag

SEQ ID NO: 172649 - DNA, 554 bp, Homo sapiens; identical to SEQ ID NO: 172632
  Payload ID: 13942
  Gene Symbol: PDXDC1
  Gene Name: pyridoxal-dependent decarboxylase domain containing 1
  ENST ID: ENST00000633216
  CDS Start-End: 1-554

SEQ ID NO: 172650 - DNA, 474 bp, Homo sapiens
  Payload ID: 13942
  Gene Symbol: PDXDC1
  Gene Name: pyridoxal-dependent decarboxylase domain containing 1
  ENST ID: ENST00000632387
  CDS Start-End: 180-474
gccgcctctcaaccatcaggttcggcagcccgcggcgccgcctggcagctcctcctcttctccgccccgccggccgcgggcgcgggggacgtcagcgctgccagcgtggaaggagctgcggggcgcgggaggaggaagtagagcccgggaccgccaggccaccaccggccgcctcagccatggacgcgtccctggagaagatagcagaccccacgttagctgaaatgggaaaaaacttgaaggaggcagtgaagatgctggaggacagtcagagaagaacagaagaggaaaatggaaagaagctcatatccggagatattccaggcccactccagggcagaatccaaaatattggagaacaaggtcatatggctttgttgggacatagtctgggagcttatatttcaactctggacaaagagaagctgagaaaacttacaactaggatactttcagataccaccttatggctat

SEQ ID NO: 172651 - DNA, 2685 bp, Homo sapiens
  Payload ID: 13942
  Gene Symbol: PDXDC1
  Gene Name: pyridoxal-dependent decarboxylase domain containing 1
  Uniprot ID: Q6P996
  ENST ID: ENST00000631842
  CDS Start-End: 72-2354
gaaggagctgcggggcgcgggaggaggaagtagagcccgggaccgccaggccaccaccggccgcctcagccatggacgcgtccctggagaagatagcagaccccacgttagctgaaatgggaaaaaacttgaaggaggcagtgaagatgctggaggacagtcagagaacagaagaggaaaatggaaagaagctcatatccggagatattccaggcccactccagggcagaatccaaaatattggagaacaaggtcatatggctttgttgggacatagtctgggagcttatatttcaactctggacaaagagaagctgagaaaacttacaactaggatactttcagataccaccttatggctatgcagaattttcagatatgaaaatgggtgtgcttatttccacgaagaggaaagagaaggacttgcaaagatatgtaggcttgccattcattctcgatatgaagacttcgtagtggatggcttcaatgtgttatataacaagaagcctgtcatatatcttagtgctgctgctagacctggcctgggccaatacctttgtaatcagctcggcttgcccttcccctgcttgtgccgtgtaccctgtaacactgtgtttggatcccagcatcagatggatgttgccttcctggagaaactgattaaagatgatatagagcgaggaagactgcccctgttgcttgtcgcaaatgcaggaacggcagcagtaggacacacagacaagattgggagattgaaagaactctgtgagcagtatggcatatggcttcatgtggagggtgtgaatctggcaacattggctctgggttatgtctcctcatcagtgctggctgcagccaaatgtgatagcatgacgatgactcctggcccgtggctgggtttgccagctgttcctgcggtgacactgtataaacacgatgaccctgccttgactttagttgctggtcttacatcaaataagcccacagacaaactccgtgccctgcctctgtggttatctttacaatacttgggacttgatgggtttgtggagaggatcaagcatgcctgtcaactgagtcaacggttgcaggaaagtttgaagaaagtgaattacatcaaaatcttggtggaagatgagctcagctccccagtggtggtgttcagatttttccaggaattaccaggctcagatccggtgtttaaagccgtcccagtgcccaacatgacaccttcaggagtcggccgggagaggcactcgtgtgacgcgctgaatcgctggctgggagaacagctgaagcagctggtgcctgcaagcggcctcacagtcatggatctggaagctgagggcacgtgtttgcggttcagccctttgatgaccgcagcagttttaggaactcggggagaggatgtggatcagctcgtagcctgcatagaaagcaaactgccagtgctgtgctgtacgctccagttgcgtgaagagttcaagcaggaagtggaagcaacagcaggtctcctatatgttgatgaccctaactggtctggaataggggttgtcaggtatgaacatgctaatgatgataagagcagtttgaaatcagatcccgaaggggaaaacatccatgctggactcctgaagaagttaaatgaactggaatctgacctaacctttaaaataggccctgagtataagagcatgaagagctgcctttatgtcggcatggcgagcgacaacgtcgatgctgctgagctcgtggagaccattgcggccacagcccgggagatagaggagaactcgaggcttctggaaaacatgacagaagtggttcggaaaggcattcaggaagctcaagtggagctgcagaaggcaagtgaagaacggcttctggaagagggggtgttgcggcagatccctgtagtgggctccgtgctgaattggttttctccggtccaggctttacagaagggaagaacttttaacttgacagcaggctctctggagtccacagaacccatatatgtctacaaagcacaaggtgcaggagtcacgctgcctccaacgccctcgggcagtcgcaccaagcagaggcttccaggccagaagccttttaaaaggtccctgcgaggttcagatgctttgagtgagaccagctcagtcagtcatattgaagacttagaaaaggtggagcgcctatccagtgggccggagcagatcaccctcgaggccagcagcactgagggacacccaggggctcccagccctcagcacaccgaccagaccgaggccttccagaaaggggtcccacacccagaagatgaccactcacaggtagaaggaccggagagcttaagatgagactcattgtgtggtttgagactgtactgagtattgtttcagggaagatgaagttctattggaaatgtgaactgtgccacatactaatataaattactgttgtttgtgcttcactgggattttggcacaaatatgtgcctgaaaggtaggctttctaggaggggagtcagcttgtctaacttcatgtacatgtagaaccacatgtttgctgtcctactacgacttttccctaagttaccataaacacattttattcacaaaaaacacttcgaatttcaagtgtctaccagtagcacccttgctctttctaaacataagcctaagtatatga

SEQ ID NO: 172652 - DNA, 2397 bp, Homo sapiens
  Payload ID: 13943
  Gene Symbol: PNPO
  Gene Name: pyridoxamine 5'-phosphate oxidase
  Uniprot ID: Q9NVS9
  ENST ID: ENST00000225573
  CDS Start-End: 106-891
aaatccttccttccccggggtagaagtccagggtgagaaattggttccgaactcaaaggaacccagtgccgggccacagccgggtcacgtggccggcggccccccatgacgtgctggctgcggggcgtcacggcgacgttcgggcgacctgccgagtggccaggctacctcagtcacctgtgtggtcgcagtgctgccatggacctgggacccatgcgcaagagttaccgcggggaccgagaggcatttgaggagactcatctgacctcccttgacccagtgaaacagtttgctgcctggtttgaggaggctgttcagtgtcctgacataggggaagccaatgccatgtgtctggctacctgcaccagagatggaaaaccctctgctcgcatgttgctgctgaagggcttcgggaaagatggcttccgcttcttcactaacttcgagagtcgaaaaggaaaagagctggactctaatccctttgcttcccttgtcttctactgggagccacttaaccgtcaggtgcgtgtggaaggccctgtgaagaaactgcctgaggaggaggctgagtgctacttccactcccgccccaagagcagccagattggggctgtggtcagccaccagagttctgtgatccctgatcgggagtatctgagaaagaaaaatgaggaactggaacagctctaccaggatcaagaggtgcccaagccaaaatcctggggtggctatgtcctgtaccctcaggtgatggagttctggcaaggtcaaaccaaccgcctgcatgaccggatagtctttcggcggggcctacccacaggagattcccctttggggcccatgacccaccgcggggaggaagactggctctatgagagacttgcaccttaactctgggacctgctggcccagagtggagctagggctaggtgtcaagagagggtgtgggattgggacccaggcccttctttctaaactcaacccatttccctccctaccccttatcttcaggactcttcagagctaatcctctaagttctctgtactcagttggttctcagttagctggtcaagtggagtgtaatggtggcgtagagaatcacaaatggaaaataattccataattatttttttgaccttgcctatgattgattaggatagctccctctaggggtagcagccggtgtgactccctttctggtgacagacagggccccagcagccctgtctgttaccatgtgagtcatactggccaaagcttagtcctagcatatgcacctgagccaacctggccaatcagattgttttgtcaataatttgaaatttgaactggagagatccagaaccttgggagtcattaaagccaagtcattcatagcagccaggaaacaataggaaccaaaagcctctgcctgctgctattgcaattcccaggatctctccttccctggatccctccctcccaggtctgggctgtgcagttcctccccctgccttaaaacaccccactatctctgtaaagtctctctctctcttttttttttttttacttaatctagctagaatctatttctgttgattacaacttaactaactcatttacggataggacttttttttttctttttttcttttttcttttcttttttttttttgagatggagtctcactctgtcacccaggctggagtgcagtggtgtgatcttggctcactgcaacctctgcctcccaggttcaagcaattctcctgcctcagcctcccaagtagctgggactacaggcacacgccaccacacccaactaatttttgtatttttagtagagatggggtttcaccatgttggccaggattgtctccatctcttgaccttgtgatccacccacctcagcctcccaaagtgctgggattacaggcatgagccaccacacccagcgagacggggtttcattatgttggccaggctggtctccaactcctgacctaaagtgatctgcccgccttggcctcccaaagtgctgggattacagacatgagccaccacgcttggccgggatagtatatttttatagcacttcccctactgattgctgccttctctgtggctacaagggacccacagaattacagggaagttacagggaagcaggtttcatctcaatattgggagagatttcaaacaatcacacctgcctgagaaggagtgggctgtcactaggaatttttattcccagtccgtcaggaattttgtagaagggcttcatgtgctggtaccaataggacaggaagattttaatcagctttactatctatgtttttttatggaaactgtgtgtatgtatacatacattttccaaaaagaaaaattaaatgattatagagattatgtttttcagact

SEQ ID NO: 172653 - DNA, 1210 bp, Homo sapiens
  Payload ID: 13943
  Gene Symbol: PNPO
  Gene Name: pyridoxamine 5'-phosphate oxidase
  Uniprot ID: Q9NVS9
  ENST ID: ENST00000434554
  CDS Start-End: 106-762
aaatccttccttccccggggtagaagtccagggtgagaaattggttccgaactcaaaggaacccagtgccgggccacagccgggtcacgtggccggcggccccccatgacgtgctggctgcggggcgtcacggcgacgttcgggcgacctgccgagtggccaggctacctcagtcacctgtgtggtcgcagtgctgccatggacctgggacccatgcgcaagagttaccgcggggaccgagaggcatttgaggagactcatctgacctcccttgacccagtgaaacagtttgctgcctggtttgaggaggctgttcagtgtcctgacataggggaagccaatgccatgtgtctggctacctgcaccagagatggaaaaccctctgctcgcatgttgctgctgaagggcttcgggaaagatggcttccgcttcttcactaacttcgagagtcgaaaaggaaaagagctggactctaatccctttgcttcccttgtcttctactgggagccacttaaccgtcagtatctgagaaagaaaaatgaggaactggaacagctctaccaggatcaagaggtgcccaagccaaaatcctggggtggctatgtcctgtaccctcaggtgatggagttctggcaaggtcaaaccaaccgcctgcatgaccggatagtctttcggcggggcctacccacaggagattcccctttggggcccatgacccaccgcggggaggaagactggctctatgagagacttgcaccttaactctgggacctgctggcccagagtggagctagggctaggtgtcaagagagggtgtgggattgggacccaggcccttctttctaaactcaacccatttccctccctaccccttatcttcaggactcttcagagctaatcctctaagttctctgtactcagttggttctcagttagctggtcaagtggagtgtaatggtggcgtagagaatcacaaatggaaaataattccataattatttttttgaccttgcctatgattgattaggatagctccctctaggggtagcagccggtgtgactccctttctggtgacagacagggccccagcagccctgtctgttaccatgtgagtcatactggccaaagcttagtcctagcatatgcacctgagccaacctggccaatcagattgttttgtcaataatttgaaatttgaactggagagat

SEQ ID NO: 172654 - DNA, 503 bp, Homo sapiens
  Payload ID: 13943
  Gene Symbol: PNPO
  Gene Name: pyridoxamine 5'-phosphate oxidase
  ENST ID: ENST00000585320
  CDS Start-End: 59-268
cgaactcaaaggaacccagtgccgggccacagccgggtcacgtggccggcggccccccatgacgtgctggctgcggggcgtcacggcgacgttcgggcgacctgccgagtggccaggctacctcagtcacctgtgtggtcgcagtgctgccatggacctgggacccatgcgcaagagttaccgcggggaccgagagagatggaaaaccctctgctcgcatgttgctgctgaagggcttcgggaaagatggcttccgcttcttcactaacttcgagagtcgaaaaggaaaagagctgtatctgagaaagaaaaatgaggaactggaacagctctaccaggatcaagaggtgcccaagccaaaatcctggggtggctatgtcctgtaccctcaggtgatggagttctggcaaggtcaaaccaaccgcctgcatgaccggatagtctttcggcggggcctacccacaggagattcccctttggggcccatgacccaccgcggggag

SEQ ID NO: 172655 - DNA, 887 bp, Homo sapiens
  Payload ID: 13943
  Gene Symbol: PNPO
  Gene Name: pyridoxamine 5'-phosphate oxidase
  ENST ID: ENST00000583245
  CDS Start-End: 106-324
aaatccttccttccccggggtagaagtccagggtgagaaattggttccgaactcaaaggaacccagtgccgggccacagccgggtcacgtggccggcggccccccatgacgtgctggctgcggggcgtcacggcgacgttcgggcgacctgccgagtggccaggctacctcagtcacctgtgtggtcgcagtgctgccatggacctgggacccatgcgcaagagttaccgcggggaccgagaggtgccgccgctagggccaggcctcctgcaggggcgggggaaaaggggtccccggagtcatctacagcggggaggggagtagtaggagcccctcggggcttctggggccacccggtggggcaaggaggtttgaggatcaccccccgtgggaaaagggggcttcaaagacatcccaccaggggaggagttccggggaaacgcaaatgaagatgggttcaaaaggcagcctttcgtaatgggcatttgaggagactcatctgacctcccttgacccagtgaaacagtttgctgcctggtttgaggaggctgttcagtgtcctgacataggggaagccaatgccatgtgtctggctacctgcaccagagatggaaaaccctctgctcgcatgttgctgctgaagggcttcgggaaagatggcttccgcttcttcactaacttcgagagtcgaaaaggaaaagagctggactctaatccctttgcttcccttgtcttctactgggagccacttaaccgtcaggtgcgtgtggaaggccctgtgaagaaactgcctgaggaggaggctgagtgctacttccactcccgccccaagagcagccagattggggctgtggtcagccaccagagttctgtgatccctgatcggg

SEQ ID NO: 172656 - DNA, 560 bp, Homo sapiens
  Payload ID: 13943
  Gene Symbol: PNPO
  Gene Name: pyridoxamine 5'-phosphate oxidase
  ENST ID: ENST00000583599
  CDS Start-End: 200-560
ctccgatcctggaaactcattggctccgaggacttaggacctgttagcttggttgggcgactggcaaatccttccttccccggggtagaagtccagggcatttgaggagactcatctgacctcccttgacccagtgaaacagtttgctgcctggtttgaggaggctgttcagtgtcctgacataggggaagccaatgccatgtgtctggctacctgcaccagagatggaaaaccctctgctcgcatgttgctgctgaagggcttcgggaaagatggcttccgcttcttcactaacttcgagagtcgaaaaggaaaagagctggactctaatccctttgcttcccttgtcttctactgggagccacttaaccgtcaggtgcgtgtggaaggccctgtgaagaaactgcctgaggaggaggctgagtgctacttccactcccgccccaagagcagccagattggggctgtggtcagccaccagagttctgtgatccctgatcgggagtatctgagaaagaaaaatgaggaactggaacagctctaccaggatcaagaggtgc

SEQ ID NO: 172657 - DNA, 537 bp, Homo sapiens
  Payload ID: 13943
  Gene Symbol: PNPO
  Gene Name: pyridoxamine 5'-phosphate oxidase
  ENST ID: ENST00000584061
  CDS Start-End: 106-246
aaatccttccttccccggggtagaagtccagggtgagaaattggttccgaactcaaaggaacccagtgccgggccacagccgggtcacgtggccggcggccccccatgacgtgctggctgcggggcgtcacggcgacgttcgggcgacctgccgagtggccaggctacctcagtcacctgtgtggtcgcagtgctgccatggacctgggacccatgcgcaagagttaccgcggggaccgagagtgaaacagtttgctgcctggtttgaggaggctgttcagtgtcctgacataggggaagccaatgccatgtgtctggctacctgcaccagagatggaaaaccctctgctcgcatgttgctgctgaagggcttcgggaaagatggcttccgcttcttcactaacttcgagagtcgaaaaggaaaagagctggactctaatccctttgcttcccttgtcttctactgggagccacttaaccgtcaggtgcgtgtggaaggccctgtgaagaaactgcctgaggaggaggctgagtgct

SEQ ID NO: 172658 - DNA, 1152 bp, Homo sapiens
  Payload ID: 13943
  Gene Symbol: PNPO
  Gene Name: pyridoxamine 5'-phosphate oxidase
  ENST ID: ENST00000582171
  CDS Start-End: 52-261
aaaggaacccagtgccgggccacagccgggtcacgtggccggcggccccccatgacgtgctggctgcggggcgtcacggcgacgttcgggcgacctgccgagtggccaggctacctcagtcacctgtgtggtcgcagtgctgccatggacctgggacccatgcgcaagagttaccgcggggaccgagagagatggaaaaccctctgctcgcatgttgctgctgaagggcttcgggaaagatggcttccgcttcttcactaacttcgagagtcgaaaaggaaaagagctggactctaatccctttgcttcccttgtcttctactgggagccacttaaccgtcaggtgcgtgtggaaggccctgtgaagaaactgcctgaggaggaggctgagtgctacttccactcccgccccaagagcagccagattggggctgtggtcagccaccagagttctgtgatccctgatcgggagtatctgagaaagaaaaatgaggaactggaacagctctaccaggatcaagaggtgcccaagccaaaatcctggggtggctatgtcctgtaccctcaggtgatggagttctggcaaggtcaaaccaaccgcctgcatgaccggatagtctttcggcggggcctacccacaggagattcccctttggggcccatgacccaccgcggggaggaagactggctctatgagagacttgcaccttaactctgggacctgctggcccagagtggagctagggctaggtgtcaagagagggtgtgggattgggacccaggcccttctttctaaactcaacccatttccctccctaccccttatcttcaggactcttcagagctaatcctctaagttctctgtactcagttggttctcagttagctggtcaagtggagtgtaatggtggcgtagagaatcacaaatggaaaataattccataattatttttttgaccttgcctatgattgattaggatagctccctctaggggtagcagccggtgtgactccctttctggtgacagacagggccccagcagccctgtctgttaccatgtgagtcatactggccaaagcttagtcctagcatatgcacctgagccaacctggccaatcagattgttttgtcaataatttgaaatttgaact

SEQ ID NO: 172659 - DNA, 1595 bp, Homo sapiens
  Payload ID: 13944
  Gene Symbol: P2RY4
  Gene Name: pyrimidinergic receptor P2Y, G-protein coupled, 4
  Uniprot ID: P51582
  ENST ID: ENST00000374519
  CDS Start-End: 141-1238
cagatgcgcttctgtcagctctccctagtgcttcaaccactgctctccctgctctactttttttgctccagctcagggatgggggtgggcagggaaatcctgccaccctcacttctccccttcccatctccaggggggccatggccagtacagagtcctccctgttgagatccctaggcctcagcccaggtcctggcagcagtgaggtggagctggactgttggtttgatgaggatttcaagttcatcctgctgcctgtgagctatgcagttgtctttgtgctgggcttgggccttaacgccccaaccctatggctcttcatcttccgcctccgaccctgggatgcaacggccacctacatgttccacctggcattgtcagacaccttgtatgtgctgtcgctgcccaccctcatctactattatgcagcccacaaccactggccctttggcactgagatctgcaagttcgtccgctttcttttctattggaacctctactgcagtgtccttttcctcacctgcatcagcgtgcaccgctacctgggcatctgccacccacttcgggcactacgctggggccgccctcgcctcgcaggccttctctgcctggcagtttggttggtcgtagccggctgcctcgtgcccaacctgttctttgtcacaaccagcaacaaagggaccaccgtcctgtgccatgacaccactcggcctgaagagtttgaccactatgtgcacttcagctcggcggtcatggggctgctctttggcgtgccctgcctggtcactcttgtttgctatggactcatggctcgtcgcctgtatcagcccttgccaggctctgcacagtcgtcttctcgcctccgctctctccgcaccatagctgtggtgctgactgtctttgctgtctgcttcgtgcctttccacatcacccgcaccatttactacctggccaggctgttggaagctgactgccgagtactgaacattgtcaacgtggtctataaagtgactcggcccctggccagtgccaacagctgcctggatcctgtgctctacttgctcactggggacaaatatcgacgtcagctccgtcagctctgtggtggtggcaagccccagccccgcacggctgcctcttccctggcactagtgtccctgcctgaggatagcagctgcaggtgggcggccaccccccaggacagtagctgctctactcctagggcagatagattgtaacacgggaagccgggaagtgagagaaaaggggatgagtgcagggcagaggtgagggaacccaatagtgatacctggtaaggtgcttcttcctcttttccaggctctggagagaagccctcaccctgagggttgcagggaggcagggatatcatgggtgacctcatctctcataaccccttcagttgccgactctttttagccaatgccaatcttctactcctttctcgttgtttctgttccttcctggggccattggtcctacaatcttcctgaaaatcttccccagtcctctttccctgtcccatttcccccacagcctcctatagcatgtgtttctctacccagaccagagcattc

SEQ ID NO: 172660 - DNA, 1700 bp, Homo sapiens
  Payload ID: 13945
  Gene Symbol: P2RY6
  Gene Name: pyrimidinergic receptor P2Y, G-protein coupled, 6
  Uniprot ID: Q15077
  ENST ID: ENST00000349767
  CDS Start-End: 414-1400
tctgggttccagggacgctggggccggagctgctgccgccgtctacacggtcccctcatttgacgggttcgcctcctagcagcgcctgggcgagtgacatctgggccggaccagctggtgctgcgcggcgcaggtctctcggtttcctcatctgctgcctctccagacttctgccagaacattgcacgcgacagtttcaggcacagaactgactggcagcaggggctgctccacgagtgggaatttgctccagcacttcacggactgcaagcgaggcacttgctaactcttggataacaagacctctgccagaagaaccatggctttggaaggcggagttcaggctgaggagatgggtgcggtcctcagtgagcccctgcctccctgaacataggaaacccacctgggcagccatggaatgggacaatggcacaggccaggctctgggcttgccacccaccacctgtgtctaccgcgagaacttcaagcaactgctgctgccacctgtgtattcggcggtgctggcggctggcctgccgctgaacatctgtgtcattacccagatctgcacgtcccgccgggccctgacccgcacggccgtgtacaccctaaaccttgctctggctgacctgctatatgcctgctccctgcccctgctcatctacaactatgcccaaggtgatcactggccctttggcgacttcgcctgccgcctggtccgcttcctcttctatgccaacctgcacggcagcatcctcttcctcacctgcatcagcttccagcgctacctgggcatctgccacccgctggccccctggcacaaacgtgggggccgccgggctgcctggctagtgtgtgtagccgtgtggctggccgtgacaacccagtgcctgcccacagccatcttcgctgccacaggcatccagcgtaaccgcactgtctgctatgacctcagcccgcctgccctggccacccactatatgccctatggcatggctctcactgtcatcggcttcctgctgccctttgctgccctgctggcctgctactgtctcctggcctgccgcctgtgccgccaggatggcccggcagagcctgtggcccaggagcggcgtggcaaggcggcccgcatggccgtggtggtggctgctgcctttgccatcagcttcctgccttttcacatcaccaagacagcctacctggcagtgcgctcgacgccgggcgtcccctgcactgtattggaggcctttgcagcggcctacaaaggcacgcggccgtttgccagtgccaacagcgtgctggaccccatcctcttctacttcacccagaagaagttccgccggcgaccacatgagctcctacagaaactcacagccaaatggcagaggcagggtcgctgagtcctccaggtcctgggcagccttcatatttgccattgtgtccggggcaccaggagccccaccaaccccaaaccatgcggagaattagagttcagctcagctgggcatggagttaagatccctcacaggacccagaagctcaccaaaaactatttcttcagccccttctctggcccagaccctgtgggcatggagatggacagacctgggcctggctcttgagaggtcccagtcagccatggagagctggggaaaccacattaaggtgctcacaaaaatacagtgtgacgtgtactgtca

SEQ ID NO: 172661 - DNA, 2398 bp, Homo sapiens
  Payload ID: 13945
  Gene Symbol: P2RY6
  Gene Name: pyrimidinergic receptor P2Y, G-protein coupled, 6
  Uniprot ID: Q15077
  ENST ID: ENST00000393590
  CDS Start-End: 300-1286
gtcagcattggtgtaaaggactggagcttcagggttctcgggattcgagtcctggccctgctgcttgccagctctgtgctgtggcaagttacttcctctccccaggtctctcggtttcctcatctgctgcctctccagacttctgccagaacattgcacgcgacagtttcaggcacagaactgactggcagcaggggctgctccacgagtgggaatttgctccagcacttcacggactgcaagcgaggcacttgctaactcttggcctccctgaacataggaaacccacctgggcagccatggaatgggacaatggcacaggccaggctctgggcttgccacccaccacctgtgtctaccgcgagaacttcaagcaactgctgctgccacctgtgtattcggcggtgctggcggctggcctgccgctgaacatctgtgtcattacccagatctgcacgtcccgccgggccctgacccgcacggccgtgtacaccctaaaccttgctctggctgacctgctatatgcctgctccctgcccctgctcatctacaactatgcccaaggtgatcactggccctttggcgacttcgcctgccgcctggtccgcttcctcttctatgccaacctgcacggcagcatcctcttcctcacctgcatcagcttccagcgctacctgggcatctgccacccgctggccccctggcacaaacgtgggggccgccgggctgcctggctagtgtgtgtagccgtgtggctggccgtgacaacccagtgcctgcccacagccatcttcgctgccacaggcatccagcgtaaccgcactgtctgctatgacctcagcccgcctgccctggccacccactatatgccctatggcatggctctcactgtcatcggcttcctgctgccctttgctgccctgctggcctgctactgtctcctggcctgccgcctgtgccgccaggatggcccggcagagcctgtggcccaggagcggcgtggcaaggcggcccgcatggccgtggtggtggctgctgcctttgccatcagcttcctgccttttcacatcaccaagacagcctacctggcagtgcgctcgacgccgggcgtcccctgcactgtattggaggcctttgcagcggcctacaaaggcacgcggccgtttgccagtgccaacagcgtgctggaccccatcctcttctacttcacccagaagaagttccgccggcgaccacatgagctcctacagaaactcacagccaaatggcagaggcagggtcgctgagtcctccaggtcctgggcagccttcatatttgccattgtgtccggggcaccaggagccccaccaaccccaaaccatgcggagaattagagttcagctcagctgggcatggagttaagatccctcacaggacccagaagctcaccaaaaactatttcttcagccccttctctggcccagaccctgtgggcatggagatggacagacctgggcctggctcttgagaggtcccagtcagccatggagagctggggaaaccacattaaggtgctcacaaaaatacagtgtgacgtgtactgtcatcaaggggtatgctccatgctttgagtcaccaatgaagcgggtgagggaagatgagagggggaggtgagagcttctgggaaggggcatttgagctgggttttgagggatgattatgagctctctggagaggagtgatattccatttatttagaaagcctttactgacaccttgtgctcaggcctgtgttggttctggggccctagaagaaccagtcctagccctggtccatacgggctcccaactgctggaagtacagactggcacagcaacatcagggttgtgacagagggaagcatggctggggggagggggtacacagacagtgcccatgacccagtccaaggagtcaggaaagagctctctgaggagggagcatctgagccagatgttgagggctgagtgggaacttggcaagcagaagtggggagcactttaatgcaacccaggtatgctccatgcatatccagctgggccagcctcgtgctgggctctgccctgggcagacaggcagagggccagagcagaggacacatggccttgcgtgtgtgaaagctgagaaaatgggagctgtgcttcagctaccctccagacaagggcaagagttagccagatgctccaggcagtgggaagccaatggagggattaagcggcggaagcttcttagaagaggcagggggcgaagtgcagtggctcatgcctgtaatctcagcaatttgggaggccaaggaaggaggaatgcttgagcccaagagttttagaccagcctgggcaacacagtaagaccctgtttctacaaaaaaatataaaaaa

SEQ ID NO: 172662 - DNA, 1829 bp, Homo sapiens
  Payload ID: 13945
  Gene Symbol: P2RY6
  Gene Name: pyrimidinergic receptor P2Y, G-protein coupled, 6
  Uniprot ID: Q15077
  ENST ID: ENST00000393591
  CDS Start-End: 543-1529
aaggacagaggaggggcccttcctgtcagctggctgggagcagaggtggctttgtcttttcggaagaactggttctgtggaatttgtgcttatttcccatcaaggatcaaggacctgctctggggctacctcagggccccacaggatgaggggctggttttcagatgagttttctgcttgcctgtcatctggatagtgtctaaaaatttgcaaactgccttcttgtcagtgtcttgctcattcttcatgacactcctgatatgtctctcggtttcctcatctgctgcctctccagacttctgccagaacattgcacgcgacagtttcaggcacagaactgactggcagcaggggctgctccacgagtgggaatttgctccagcacttcacggactgcaagcgaggcacttgctaactcttggataacaagacctctgccagaagaaccatggctttggaaggcggagttcaggctgaggagatgggtgcggtcctcagtgagcccctgcctccctgaacataggaaacccacctgggcagccatggaatgggacaatggcacaggccaggctctgggcttgccacccaccacctgtgtctaccgcgagaacttcaagcaactgctgctgccacctgtgtattcggcggtgctggcggctggcctgccgctgaacatctgtgtcattacccagatctgcacgtcccgccgggccctgacccgcacggccgtgtacaccctaaaccttgctctggctgacctgctatatgcctgctccctgcccctgctcatctacaactatgcccaaggtgatcactggccctttggcgacttcgcctgccgcctggtccgcttcctcttctatgccaacctgcacggcagcatcctcttcctcacctgcatcagcttccagcgctacctgggcatctgccacccgctggccccctggcacaaacgtgggggccgccgggctgcctggctagtgtgtgtagccgtgtggctggccgtgacaacccagtgcctgcccacagccatcttcgctgccacaggcatccagcgtaaccgcactgtctgctatgacctcagcccgcctgccctggccacccactatatgccctatggcatggctctcactgtcatcggcttcctgctgccctttgctgccctgctggcctgctactgtctcctggcctgccgcctgtgccgccaggatggcccggcagagcctgtggcccaggagcggcgtggcaaggcggcccgcatggccgtggtggtggctgctgcctttgccatcagcttcctgccttttcacatcaccaagacagcctacctggcagtgcgctcgacgccgggcgtcccctgcactgtattggaggcctttgcagcggcctacaaaggcacgcggccgtttgccagtgccaacagcgtgctggaccccatcctcttctacttcacccagaagaagttccgccggcgaccacatgagctcctacagaaactcacagccaaatggcagaggcagggtcgctgagtcctccaggtcctgggcagccttcatatttgccattgtgtccggggcaccaggagccccaccaaccccaaaccatgcggagaattagagttcagctcagctgggcatggagttaagatccctcacaggacccagaagctcaccaaaaactatttcttcagccccttctctggcccagaccctgtgggcatggagatggacagacctgggcctggctcttgagaggtcccagtcagccatggagagctggggaaaccacattaaggtgctcacaaaaatacagtgtgacgtgtactgtca

SEQ ID NO: 172663 - DNA, 1515 bp, Homo sapiens
  Payload ID: 13945
  Gene Symbol: P2RY6
  Gene Name: pyrimidinergic receptor P2Y, G-protein coupled, 6
  Uniprot ID: Q15077
  ENST ID: ENST00000393592
  CDS Start-End: 232-1218
gccggagctgctgccgccgtctacacggtcccctcatttgacgggttcgcctcctagcagcgcctgggcgagtgacatctgggccggaccagctggtgctgcgcggcgcagataacaagacctctgccagaagaaccatggctttggaaggcggagttcaggctgaggagatgggtgcggtcctcagtgagcccctgcctccctgaacataggaaacccacctgggcagccatggaatgggacaatggcacaggccaggctctgggcttgccacccaccacctgtgtctaccgcgagaacttcaagcaactgctgctgccacctgtgtattcggcggtgctggcggctggcctgccgctgaacatctgtgtcattacccagatctgcacgtcccgccgggccctgacccgcacggccgtgtacaccctaaaccttgctctggctgacctgctatatgcctgctccctgcccctgctcatctacaactatgcccaaggtgatcactggccctttggcgacttcgcctgccgcctggtccgcttcctcttctatgccaacctgcacggcagcatcctcttcctcacctgcatcagcttccagcgctacctgggcatctgccacccgctggccccctggcacaaacgtgggggccgccgggctgcctggctagtgtgtgtagccgtgtggctggccgtgacaacccagtgcctgcccacagccatcttcgctgccacaggcatccagcgtaaccgcactgtctgctatgacctcagcccgcctgccctggccacccactatatgccctatggcatggctctcactgtcatcggcttcctgctgccctttgctgccctgctggcctgctactgtctcctggcctgccgcctgtgccgccaggatggcccggcagagcctgtggcccaggagcggcgtggcaaggcggcccgcatggccgtggtggtggctgctgcctttgccatcagcttcctgccttttcacatcaccaagacagcctacctggcagtgcgctcgacgccgggcgtcccctgcactgtattggaggcctttgcagcggcctacaaaggcacgcggccgtttgccagtgccaacagcgtgctggaccccatcctcttctacttcacccagaagaagttccgccggcgaccacatgagctcctacagaaactcacagccaaatggcagaggcagggtcgctgagtcctccaggtcctgggcagccttcatatttgccattgtgtccggggcaccaggagccccaccaaccccaaaccatgcggagaattagagttcagctcagctgggcatggagttaagatccctcacaggacccagaagctcaccaaaaactatttcttcagccccttctctggcccagaccctgtgggcatggagatggacagacctgggcctggctcttgagaggtcccagtcagccatggagagctggggaaaccacattaaggtgctcacaaaaatacagtgtgacgtgtactg

SEQ ID NO: 172664 - DNA, 800 bp, Homo sapiens
  Payload ID: 13945
  Gene Symbol: P2RY6
  Gene Name: pyrimidinergic receptor P2Y, G-protein coupled, 6
  ENST ID: ENST00000535931
  CDS Start-End: 65-800
ccagtggctcctgtgaccacatcgaccaggcctccctgaacataggaaacccacctgggcagccatggaatgggacaatggcacaggccaggctctgggcttgccacccaccacctgtgtctaccgcgagaacttcaagcaactgctgctgccacctgtgtattcggcggtgctggcggctggcctgccgctgaacatctgtgtcattacccagatctgcacgtcccgccgggccctgacccgcacggccgtgtacaccctaaaccttgctctggctgacctgctatatgcctgctccctgcccctgctcatctacaactatgcccaaggtgatcactggccctttggcgacttcgcctgccgcctggtccgcttcctcttctatgccaacctgcacggcagcatcctcttcctcacctgcatcagcttccagcgctacctgggcatctgccacccgctggccccctggcacaaacgtgggggccgccgggctgcctggctagtgtgtgtagccgtgtggctggccgtgacaacccagtgcctgcccacagccatcttcgctgccacaggcatccagcgtaaccgcactgtctgctatgacctcagcccgcctgccctggccacccactatatgccctatggcatggctctcactgtcatcggcttcctgctgccctttgctgccctgctggcctgctactgtctcctggcctgccgcctgtgccgccaggatggcccggcagagcctgtggcccaggagcggcgtggcaaggcggcccgcatggccgtggtggtggctg

SEQ ID NO: 172665 - DNA, 741 bp, Homo sapiens
  Payload ID: 13945
  Gene Symbol: P2RY6
  Gene Name: pyrimidinergic receptor P2Y, G-protein coupled, 6
  ENST ID: ENST00000544437
  CDS Start-End: 357-741
cgggagggcttgggagagtgaaagctcacccggatctgggtggagaaagtatgacaggtcccaggctcaccctctcacacatacaaacacatgcacatacaagagaagctgctccgaaatctcatttttttatcttccaaaattcctgtggattttgcattcttctataatatttctgcatataaaaacactgttctgataaattaccatccaatgagttggctcaagtcttggagataacaagacctctgccagaagaaccatggctttggaaggcggagttcaggctgaggagatgggtgcggtcctcagtgagcccctgcctccctgaacataggaaacccacctgggcagccatggaatgggacaatggcacaggccaggctctgggcttgccacccaccacctgtgtctaccgcgagaacttcaagcaactgctgctgccacctgtgtattcggcggtgctggcggctggcctgccgctgaacatctgtgtcattacccagatctgcacgtcccgccgggccctgacccgcacggccgtgtacaccctaaaccttgctctggctgacctgctatatgcctgctccctgcccctgctcatctacaactatgcccaaggtgatcactggccctttggcgacttcgcctgccgcctggtccgcttcctcttctatgccaacctgcacggcagcatcctcttcctcacctgcatcagcttccagcgctacctgggcatct

SEQ ID NO: 172666 - DNA, 335 bp, Homo sapiens
  Payload ID: 13945
  Gene Symbol: P2RY6
  Gene Name: pyrimidinergic receptor P2Y, G-protein coupled, 6
  ENST ID: ENST00000536225
  CDS Start-End: 168-335
gctccagcacttcacggactgcaagcgaggcacttgctaactcttggataacaagacctctgccagaagaaccatggctttggaaggcggagttcaggctgaggagatgggtgcggtcctcagtgagcccctgcctccctgaacataggaaacccacctgggcagccatggaatgggacaatggcacaggcatccagcgtaaccgcactgtctgctatgacctcagcccgcctgccctggccacccactatatgccctatggcatggctctcactgtcatcggcttcctgctgccctttgctgccctgctggcctgctactgtctcctggcctgc

SEQ ID NO: 172667 - DNA, 2351 bp, Homo sapiens
  Payload ID: 13945
  Gene Symbol: P2RY6
  Gene Name: pyrimidinergic receptor P2Y, G-protein coupled, 6
  Uniprot ID: Q15077
  ENST ID: ENST00000540124
  CDS Start-End: 1066-2052
accggtggtcagagtgaaacagaacagaacgggaggtttcacaatgtccttccatacaatctctggaatctatagataacaacagctgctaggtcaggggtcgaattttaactaccaggcttaggtcaggcaggcccaggcctggtttcgggtctggttccttggtttcgggtctggttccttggtttcaggtctggtttttaggcgccgggctacctgcctttagtttcgcttctctttccttttccgagtataaaacagtatgagagggtctctctcctccctcagtgccatcctcatccctgggtgggagttgtctggatccatagggttggagccacagataacagagccattaatctcggggtctcagcctctcttaacggaccttccaggcactgctgagaaaaccaggttaatggtttcctgcggcagcaatgagcagaagcagggccatctccagactccagagaagccaggagagggctggggtgataatggggaggaggataaaaaacagccacccaatgcgtgccttccctgtgccaggcccttgtcctgaaatgttatctcactccatcctcccaacagtcccttgggctaaattggtgatgctgcttgtttgagtgagcaaacagagggtgaatgaagtgacttgcgggcagctgggtagaggatgagtcagcattggtgtaaaggactggagcttcagggttctcgggattcgagtcctggccctgctgcttgccagctctgtgctgtggcaagttacttcctctccccaggtctctcggtttcctcatctgctgcctctccagacttctgccagaacattgcacgcgacagtttcaggcacagaactgactggcagcaggggctgctccacgagtgggaatttgctccagcacttcacggactgcaagcgaggcacttgctaactcttggataacaagacctctgccagaagaaccatggctttggaaggcggagttcaggctgaggagatgggtgcggtcctcagtgagcccctgcctccctgaacataggaaacccacctgggcagccatggaatgggacaatggcacaggccaggctctgggcttgccacccaccacctgtgtctaccgcgagaacttcaagcaactgctgctgccacctgtgtattcggcggtgctggcggctggcctgccgctgaacatctgtgtcattacccagatctgcacgtcccgccgggccctgacccgcacggccgtgtacaccctaaaccttgctctggctgacctgctatatgcctgctccctgcccctgctcatctacaactatgcccaaggtgatcactggccctttggcgacttcgcctgccgcctggtccgcttcctcttctatgccaacctgcacggcagcatcctcttcctcacctgcatcagcttccagcgctacctgggcatctgccacccgctggccccctggcacaaacgtgggggccgccgggctgcctggctagtgtgtgtagccgtgtggctggccgtgacaacccagtgcctgcccacagccatcttcgctgccacaggcatccagcgtaaccgcactgtctgctatgacctcagcccgcctgccctggccacccactatatgccctatggcatggctctcactgtcatcggcttcctgctgccctttgctgccctgctggcctgctactgtctcctggcctgccgcctgtgccgccaggatggcccggcagagcctgtggcccaggagcggcgtggcaaggcggcccgcatggccgtggtggtggctgctgcctttgccatcagcttcctgccttttcacatcaccaagacagcctacctggcagtgcgctcgacgccgggcgtcccctgcactgtattggaggcctttgcagcggcctacaaaggcacgcggccgtttgccagtgccaacagcgtgctggaccccatcctcttctacttcacccagaagaagttccgccggcgaccacatgagctcctacagaaactcacagccaaatggcagaggcagggtcgctgagtcctccaggtcctgggcagccttcatatttgccattgtgtccggggcaccaggagccccaccaaccccaaaccatgcggagaattagagttcagctcagctgggcatggagttaagatccctcacaggacccagaagctcaccaaaaactatttcttcagccccttctctggcccagaccctgtgggcatggagatggacagacctgggcctggctcttgagaggtcccagtcagccatggagagctggggaaaccacattaaggtgctcacaaaaatacagtgtgacgtgtactgtc

SEQ ID NO: 172668 - DNA, 1425 bp, Homo sapiens
  Payload ID: 13945
  Gene Symbol: P2RY6
  Gene Name: pyrimidinergic receptor P2Y, G-protein coupled, 6
  Uniprot ID: Q15077
  ENST ID: ENST00000538328
  CDS Start-End: 174-1160
gaaacagaggaagctgctcactctgtcagagaagttgcagcctagctgagggcaggagagtggggagcctcaggtctggcttccctttgccccaacacacttgggaccaccagcgtgctgcagggacaggaggctgcctcctccctgaacataggaaacccacctgggcagccatggaatgggacaatggcacaggccaggctctgggcttgccacccaccacctgtgtctaccgcgagaacttcaagcaactgctgctgccacctgtgtattcggcggtgctggcggctggcctgccgctgaacatctgtgtcattacccagatctgcacgtcccgccgggccctgacccgcacggccgtgtacaccctaaaccttgctctggctgacctgctatatgcctgctccctgcccctgctcatctacaactatgcccaaggtgatcactggccctttggcgacttcgcctgccgcctggtccgcttcctcttctatgccaacctgcacggcagcatcctcttcctcacctgcatcagcttccagcgctacctgggcatctgccacccgctggccccctggcacaaacgtgggggccgccgggctgcctggctagtgtgtgtagccgtgtggctggccgtgacaacccagtgcctgcccacagccatcttcgctgccacaggcatccagcgtaaccgcactgtctgctatgacctcagcccgcctgccctggccacccactatatgccctatggcatggctctcactgtcatcggcttcctgctgccctttgctgccctgctggcctgctactgtctcctggcctgccgcctgtgccgccaggatggcccggcagagcctgtggcccaggagcggcgtggcaaggcggcccgcatggccgtggtggtggctgctgcctttgccatcagcttcctgccttttcacatcaccaagacagcctacctggcagtgcgctcgacgccgggcgtcccctgcactgtattggaggcctttgcagcggcctacaaaggcacgcggccgtttgccagtgccaacagcgtgctggaccccatcctcttctacttcacccagaagaagttccgccggcgaccacatgagctcctacagaaactcacagccaaatggcagaggcagggtcgctgagtcctccaggtcctgggcagccttcatatttgccattgtgtccggggcaccaggagccccaccaaccccaaaccatgcggagaattagagttcagctcagctgggcatggagttaagatccctcacaggacccagaagctcaccaaaaactatttcttcagccccttctctggcccagaccctgtgggcatggagatggacagacctgggcctggctcttgagaggtcccagtcagccatggagagctggggaaaccacattaag

SEQ ID NO: 172669 - DNA, 1611 bp, Homo sapiens
  Payload ID: 13945
  Gene Symbol: P2RY6
  Gene Name: pyrimidinergic receptor P2Y, G-protein coupled, 6
  Uniprot ID: Q15077
  ENST ID: ENST00000540342
  CDS Start-End: 340-1326
tgctctggctcctctgggttccagggacgctggggccggagctgctgccgccgtctacacggtcccctcatttgacgggttcgcctcctagcagcgcctgggcgagtgacatctgggccggaccagctggtgctgcgcggcgcaggtctctcggtttcctcatctgctgcctctccagacttctgccagaacattgcacgcgacagtttcaggcacagaactgactggcagcaggggctgctccacgagtgggaatttgctccagcacttcacggactgcaagcgaggcacttgctaactcttggcctccctgaacataggaaacccacctgggcagccatggaatgggacaatggcacaggccaggctctgggcttgccacccaccacctgtgtctaccgcgagaacttcaagcaactgctgctgccacctgtgtattcggcggtgctggcggctggcctgccgctgaacatctgtgtcattacccagatctgcacgtcccgccgggccctgacccgcacggccgtgtacaccctaaaccttgctctggctgacctgctatatgcctgctccctgcccctgctcatctacaactatgcccaaggtgatcactggccctttggcgacttcgcctgccgcctggtccgcttcctcttctatgccaacctgcacggcagcatcctcttcctcacctgcatcagcttccagcgctacctgggcatctgccacccgctggccccctggcacaaacgtgggggccgccgggctgcctggctagtgtgtgtagccgtgtggctggccgtgacaacccagtgcctgcccacagccatcttcgctgccacaggcatccagcgtaaccgcactgtctgctatgacctcagcccgcctgccctggccacccactatatgccctatggcatggctctcactgtcatcggcttcctgctgccctttgctgccctgctggcctgctactgtctcctggcctgccgcctgtgccgccaggatggcccggcagagcctgtggcccaggagcggcgtggcaaggcggcccgcatggccgtggtggtggctgctgcctttgccatcagcttcctgccttttcacatcaccaagacagcctacctggcagtgcgctcgacgccgggcgtcccctgcactgtattggaggcctttgcagcggcctacaaaggcacgcggccgtttgccagtgccaacagcgtgctggaccccatcctcttctacttcacccagaagaagttccgccggcgaccacatgagctcctacagaaactcacagccaaatggcagaggcagggtcgctgagtcctccaggtcctgggcagccttcatatttgccattgtgtccggggcaccaggagccccaccaaccccaaaccatgcggagaattagagttcagctcagctgggcatggagttaagatccctcacaggacccagaagctcaccaaaaactatttcttcagccccttctctggcccagaccctgtgggcatggagatggacagacctgggcctggctcttgagaggtcccagtcagccatggagagctggggaaaccacattaaggtgctcacaaaaatacagtg

SEQ ID NO: 172670 - DNA, 1674 bp, Homo sapiens
  Payload ID: 13945
  Gene Symbol: P2RY6
  Gene Name: pyrimidinergic receptor P2Y, G-protein coupled, 6
  Uniprot ID: Q15077
  ENST ID: ENST00000542092
  CDS Start-End: 388-1374
tggctcctctgggttccagggacgctggggccggagctgctgccgccgtctacacggtcccctcatttgacgggttcgcctcctagcagcgcctgggcgagtgacatctgggccggaccagctggtgctgcgcggcgcagacttctgccagaacattgcacgcgacagtttcaggcacagaactgactggcagcaggggctgctccacgagtgggaatttgctccagcacttcacggactgcaagcgaggcacttgctaactcttggataacaagacctctgccagaagaaccatggctttggaaggcggagttcaggctgaggagatgggtgcggtcctcagtgagcccctgcctccctgaacataggaaacccacctgggcagccatggaatgggacaatggcacaggccaggctctgggcttgccacccaccacctgtgtctaccgcgagaacttcaagcaactgctgctgccacctgtgtattcggcggtgctggcggctggcctgccgctgaacatctgtgtcattacccagatctgcacgtcccgccgggccctgacccgcacggccgtgtacaccctaaaccttgctctggctgacctgctatatgcctgctccctgcccctgctcatctacaactatgcccaaggtgatcactggccctttggcgacttcgcctgccgcctggtccgcttcctcttctatgccaacctgcacggcagcatcctcttcctcacctgcatcagcttccagcgctacctgggcatctgccacccgctggccccctggcacaaacgtgggggccgccgggctgcctggctagtgtgtgtagccgtgtggctggccgtgacaacccagtgcctgcccacagccatcttcgctgccacaggcatccagcgtaaccgcactgtctgctatgacctcagcccgcctgccctggccacccactatatgccctatggcatggctctcactgtcatcggcttcctgctgccctttgctgccctgctggcctgctactgtctcctggcctgccgcctgtgccgccaggatggcccggcagagcctgtggcccaggagcggcgtggcaaggcggcccgcatggccgtggtggtggctgctgcctttgccatcagcttcctgccttttcacatcaccaagacagcctacctggcagtgcgctcgacgccgggcgtcccctgcactgtattggaggcctttgcagcggcctacaaaggcacgcggccgtttgccagtgccaacagcgtgctggaccccatcctcttctacttcacccagaagaagttccgccggcgaccacatgagctcctacagaaactcacagccaaatggcagaggcagggtcgctgagtcctccaggtcctgggcagccttcatatttgccattgtgtccggggcaccaggagccccaccaaccccaaaccatgcggagaattagagttcagctcagctgggcatggagttaagatccctcacaggacccagaagctcaccaaaaactatttcttcagccccttctctggcccagaccctgtgggcatggagatggacagacctgggcctggctcttgagaggtcccagtcagccatggagagctggggaaaccacattaaggtgctcacaaaaatacagtgtgacgtgtactgtca

SEQ ID NO: 172671 - DNA, 2431 bp, Homo sapiens
  Payload ID: 13945
  Gene Symbol: P2RY6
  Gene Name: pyrimidinergic receptor P2Y, G-protein coupled, 6
  Uniprot ID: Q15077
  ENST ID: ENST00000618468
  CDS Start-End: 351-1337
ggcttgggagagtgaaagctcacccggatctgggtggagaaagtatgacaggtcccaggctcaccctctcacacatacaaacacatgcacatacaagagaagctgctccgaaatctcatttttttatcttccaaaattcctgtggattttgcattcttctataatatttctgcatataaaaacactgttctgataaattaccatccaatgagttggctcaagtcttggagataacaagacctctgccagaagaaccatggctttggaaggcggagttcaggctgaggagatgggtgcggtcctcagtgagcccctgcctccctgaacataggaaacccacctgggcagccatggaatgggacaatggcacaggccaggctctgggcttgccacccaccacctgtgtctaccgcgagaacttcaagcaactgctgctgccacctgtgtattcggcggtgctggcggctggcctgccgctgaacatctgtgtcattacccagatctgcacgtcccgccgggccctgacccgcacggccgtgtacaccctaaaccttgctctggctgacctgctatatgcctgctccctgcccctgctcatctacaactatgcccaaggtgatcactggccctttggcgacttcgcctgccgcctggtccgcttcctcttctatgccaacctgcacggcagcatcctcttcctcacctgcatcagcttccagcgctacctgggcatctgccacccgctggccccctggcacaaacgtgggggccgccgggctgcctggctagtgtgtgtagccgtgtggctggccgtgacaacccagtgcctgcccacagccatcttcgctgccacaggcatccagcgtaaccgcactgtctgctatgacctcagcccgcctgccctggccacccactatatgccctatggcatggctctcactgtcatcggcttcctgctgccctttgctgccctgctggcctgctactgtctcctggcctgccgcctgtgccgccaggatggcccggcagagcctgtggcccaggagcggcgtggcaaggcggcccgcatggccgtggtggtggctgctgcctttgccatcagcttcctgccttttcacatcaccaagacagcctacctggcagtgcgctcgacgccgggcgtcccctgcactgtattggaggcctttgcagcggcctacaaaggcacgcggccgtttgccagtgccaacagcgtgctggaccccatcctcttctacttcacccagaagaagttccgccggcgaccacatgagctcctacagaaactcacagccaaatggcagaggcagggtcgctgagtcctccaggtcctgggcagccttcatatttgccattgtgtccggggcaccaggagccccaccaaccccaaaccatgcggagaattagagttcagctcagctgggcatggagttaagatccctcacaggacccagaagctcaccaaaaactatttcttcagccccttctctggcccagaccctgtgggcatggagatggacagacctgggcctggctcttgagaggtcccagtcagccatggagagctggggaaaccacattaaggtgctcacaaaaatacagtgtgacgtgtactgtcatcaaggggtatgctccatgctttgagtcaccaatgaagcgggtgagggaagatgagagggggaggtgagagcttctgggaaggggcatttgagctgggttttgagggatgattatgagctctctggagaggagtgatattccatttatttagaaagcctttactgacaccttgtgctcaggcctgtgttggttctggggccctagaagaaccagtcctagccctggtccatacgggctcccaactgctggaagtacagactggcacagcaacatcagggttgtgacagagggaagcatggctggggggagggggtacacagacagtgcccatgacccagtccaaggagtcaggaaagagctctctgaggagggagcatctgagccagatgttgagggctgagtgggaacttggcaagcagaagtggggagcactttaatgcaacccaggtatgctccatgcatatccagctgggccagcctcgtgctgggctctgccctgggcagacaggcagagggccagagcagaggacacatggccttgcgtgtgtgaaagctgagaaaatgggagctgtgcttcagctaccctccagacaagggcaagagttagccagatgctccaggcagtgggaagccaatggagggattaagcggcggaagcttcttagaagaggcagggggcgaagtgcagtggctcatgcctgtaatctcagcaatttgggaggccaaggaaggaggaatgcttgagcccaagagttttagaccagcctgggcaacacagtaagaccctgtttct

SEQ ID NO: 172672 - DNA, 1662 bp, Homo sapiens
  Payload ID: 13946
  Gene Symbol: PYHIN1
  Gene Name: pyrin and HIN domain family, member 1
  Uniprot ID: Q6K0P9
  ENST ID: ENST00000368135
  CDS Start-End: 230-967
agcactagtcaagtgactctaagaagggccattttcccttgttgtctttgaaaatacttcattttcttagcatttcaggagattataacatcctgtatttcagtttctgagagctttactgactgatttccctattcaaaacaatcctcatttcctacatttctgaagatctcaagatctggactactgttgaagaaattcccagtaaggctcacttatatctttagagatggcaaataactacaagaaaattgttctactgaaaggattagaggtcatcaatgattatcattttagaattgttaagtccttactgagtaacgatttaaaacttaatccaaaaatgaaagaagagtatgacaaaattcagattgctgacttgatggaggaaaagttcccaggtgatgccggtttgggcaaactaatagaattcttcaaagaaataccaacactgggagaccttgctgaaactcttaaaagagaaaagttaaaagttgcaaataaaattgaatccattccagtcaaaggaataatcccatctaaaaagacgaaacagaaagaagtgtatcctgctacacctgcatgcaccccaagcaaccgtctcacagctaaaggagcagaggagactcttggacctcagaaaagaaaaaaaccatctgaagaagagactggaaccaaaaggagtaagatgtccaaagagcagactcggccttcctgctctgcaggagccagcacgtccacagccatgggccgttccccacctccccagacctcatcatcagctccacccaacacttcctcaactgaggcatatttgatgaacttgacattatctctgactgcaggaagttttctgtcctgtgctgtttggggaagagacagagaactgcggaatctggaactttcagcaacagactcactgtctactgcccccatctattatacacccattccctttgctcactaatttgttcaagtttctctgacatacaccatgctcctttttcctttaggattttcacacaccatatttctttcacctttaaactcttacctggccaaccctatccaccctctggatcccaatattgagatcttatcctcagggaatcctcacttagacccctgtaacaggttaaatcttcatggtgttctgtttcctaggaacttctttcttttctactgtttatgacaactgaagttaataagtgtttatctttcccacctactcaaagtagttccaagattagggctagtttgtaattctgtggaccactgtaaacgagggcctagttcagtgtctgcctcatgggaagcttccaataaatacctttgctcaacgaaaaaatgaaaacccagtggctcacgcctgtaatcccagcactttgggaggccgaggcaggtggattgcctgaggtcaggagtttgagactagtctggccaacatggtgaaacactatctctactaaaaatacaaaaaaattagctgggtatggtggcttacgcctataatcccagctactcaggaggctgaggcaggggaattgcttgaaccagggaggtggaggttgcagtgagctgagatcgcaccactgcactccagcctgggtgacagagcgagactccatctcaaaataaaaaagtaaaaaaaaaaaaaaaaaa

SEQ ID NO: 172673 - DNA, 1723 bp, Homo sapiens
  Payload ID: 13946
  Gene Symbol: PYHIN1
  Gene Name: pyrin and HIN domain family, member 1
  Uniprot ID: Q6K0P9
  ENST ID: ENST00000368138
  CDS Start-End: 239-1690
gaggaagccagcactagtcaagtgactctaagaagggccattttcccttgttgtctttgaaaatacttcattttcttagcatttcaggagattataacatcctgtatttcagtttctgagagctttactgactgatttccctattcaaaacaatcctcatttcctacatttctgaagatctcaagatctggactactgttgaagaaattcccagtaaggctcacttatatctttagagatggcaaataactacaagaaaattgttctactgaaaggattagaggtcatcaatgattatcattttagaattgttaagtccttactgagtaacgatttaaaacttaatccaaaaatgaaagaagagtatgacaaaattcagattgctgacttgatggaggaaaagttcccaggtgatgccggtttgggcaaactaatagaattcttcaaagaaataccaacactgggagaccttgctgaaactcttaaaagagaaaagttaaaagtcaaaggaataatcccatctaaaaagacgaaacagaaagaagtgtatcctgctacacctgcatgcaccccaagcaaccgtctcacagctaaaggagcagaggagactcttggacctcagaaaagaaaaaaaccatctgaagaagagactggaaccaaaaggagtaagatgtccaaagagcagactcggccttcctgctctgcaggagccagcacgtccacagccatgggccgttccccacctccccagacctcatcatcagctccacccaacacttcctcaactgagagcctaaaaccattggccaaccgtcacgcaactgccagtaaaaatattttccgagaagacccaataatcgcgatggtactaaatgcaacaaaagtatttaaatatgaatcctcagaaaatgagcaaagaagaatgtttcatgctacagtggctacgcagacacagttctttcatgtgaaggttttaaacatcaacttgaagaggaaattcattaaaaagagaatcatcattatatcaaattattccaaacgtaatagtctcctagaggtgaatgaagcctcttctgtatctgaagctggtcctgaccaaacgtttgaggttccaaaggacatcatcagaagagcaaagaaaattccgaagatcaatattcttcacaaacaaacttcaggatatattgtatatggattatttatgctacatacgaaaattgtaaataggaagacgacaatctatgaaattcaggataaaacaggaagtatggctgtagtaggaaaaggagaatgccacaatatcccctgtgaaaaaggagataagcttcgactcttctgctttcgactgagaaagagggaaaatatgtcaaaactgatgtcagaaatgcatagtttcatccagatacagaaaaatacaaaccagagaagccatgactccaggagcatggcactaccccaggaacagagtcagcatccaaaaccttcagaggccagcacaaccctacctgaaagccatctcaagactcctcagatgccaccaacaaccccatccagcagttccttcaccaagaaggatgaaacccacccaggagcacagtcatcgcctgcaaactttagaatcacctcaccaactgtggcccctcctctttcttctgacacttccaccaaccgccatccagcagttccttaaataaggtcaccaaggacaaggatatcaaataac

SEQ ID NO: 172674 - DNA, 2083 bp, Homo sapiens
  Payload ID: 13946
  Gene Symbol: PYHIN1
  Gene Name: pyrin and HIN domain family, member 1
  Uniprot ID: Q6K0P9
  ENST ID: ENST00000368140
  CDS Start-End: 246-1724
agagtatgaggaagccagcactagtcaagtgactctaagaagggccattttcccttgttgtctttgaaaatacttcattttcttagcatttcaggagattataacatcctgtatttcagtttctgagagctttactgactgatttccctattcaaaacaatcctcatttcctacatttctgaagatctcaagatctggactactgttgaagaaattcccagtaaggctcacttatatctttagagatggcaaataactacaagaaaattgttctactgaaaggattagaggtcatcaatgattatcattttagaattgttaagtccttactgagtaacgatttaaaacttaatccaaaaatgaaagaagagtatgacaaaattcagattgctgacttgatggaggaaaagttcccaggtgatgccggtttgggcaaactaatagaattcttcaaagaaataccaacactgggagaccttgctgaaactcttaaaagagaaaagttaaaagttgcaaataaaattgaatccattccagtcaaaggaataatcccatctaaaaagacgaaacagaaagaagtgtatcctgctacacctgcatgcaccccaagcaaccgtctcacagctaaaggagcagaggagactcttggacctcagaaaagaaaaaaaccatctgaagaagagactggaaccaaaaggagtaagatgtccaaagagcagactcggccttcctgctctgcaggagccagcacgtccacagccatgggccgttccccacctccccagacctcatcatcagctccacccaacacttcctcaactgagagcctaaaaccattggccaaccgtcacgcaactgccagtaaaaatattttccgagaagacccaataatcgcgatggtactaaatgcaacaaaagtatttaaatatgaatcctcagaaaatgagcaaagaagaatgtttcatgctacagtggctacgcagacacagttctttcatgtgaaggttttaaacatcaacttgaagaggaaattcattaaaaagagaatcatcattatatcaaattattccaaacgtaatagtctcctagaggtgaatgaagcctcttctgtatctgaagctggtcctgaccaaacgtttgaggttccaaaggacatcatcagaagagcaaagaaaattccgaagatcaatattcttcacaaacaaacttcaggatatattgtatatggattatttatgctacatacgaaaattgtaaataggaagacgacaatctatgaaattcaggataaaacaggaagtatggctgtagtaggaaaaggagaatgccacaatatcccctgtgaaaaaggagataagcttcgactcttctgctttcgactgagaaagagggaaaatatgtcaaaactgatgtcagaaatgcatagtttcatccagatacagaaaaatacaaaccagagaagccatgactccaggagcatggcactaccccaggaacagagtcagcatccaaaaccttcagaggccagcacaaccctacctgaaagccatctcaagactcctcagatgccaccaacaaccccatccagcagttccttcaccaagaaggatgaaacccacccaggagcacagtcatcgcctgcaaactttagaatcacctcaccaactgtggcccctcctctttcttctgacacttccaccaaccgccatccagcagttccttaaataaggtcaccaaggacaaggatatcaaataactactgttcaatctttactcaagtgtggaaattttgcctgaagtcctccacctaaaaacctgatgccattggtaatgatgtttatgaagataagatcaaagcacagaaaataatatatgtatatatatctggttgaaatactatatatatatatatatatatatatatatatatatatatatatatataccagctattaattctaggaaatggagtattaagggtgcattttatttcattagttttacttttatgcattttcttcatatcatattttgcattcagaattttcataatttgaaaaaaaataaacttttttttcttaaa

SEQ ID NO: 172675 - DNA, 1597 bp, Homo sapiens
  Payload ID: 13946
  Gene Symbol: PYHIN1
  Gene Name: pyrin and HIN domain family, member 1
  Uniprot ID: Q6K0P9
  ENST ID: ENST00000392252
  CDS Start-End: 238-1596
aggaagccagcactagtcaagtgactctaagaagggccattttcccttgttgtctttgaaaatacttcattttcttagcatttcaggagattataacatcctgtatttcagtttctgagagctttactgactgatttccctattcaaaacaatcctcatttcctacatttctgaagatctcaagatctggactactgttgaagaaattcccagtaaggctcacttatatctttagagatggcaaataactacaagaaaattgttctactgaaaggattagaggtcatcaatgattatcattttagaattgttaagtccttactgagtaacgatttaaaacttaatccaaaaatgaaagaagagtatgacaaaattcagattgctgacttgatggaggaaaagttcccaggtgatgccggtttgggcaaactaatagaattcttcaaagaaataccaacactgggagaccttgctgaaactcttaaaagagaaaagttaaaagtcaaaggaataatcccatctaaaaagacgaaacagaaagaagtgtatcctgctacacctgcatgcaccccaagcaaccgtctcacagctaaaggagcagaggagactcttggacctcagaaaagaaaaaaaccatctgaagaagagactggaaccaaaaggagtaagatgtccaaagagcagactcggccttcctgctctgcaggagccagcacgtccacagccatgggccgttccccacctccccagacctcatcatcagctccacccaacacttcctcaactgagagcctaaaaccattggccaaccgtcacgcaactgccagtaaaaatattttccgagaagacccaataatcgcgatggtactaaatgcaacaaaagtatttaaatatgaatcctcagaaaatgagcaaagaagaatgtttcatgctacagtggctacgcagacacagttctttcatgtgaaggttttaaacatcaacttgaagaggaaattcattaaaaagagaatcatcattatatcaaattattccaaacgtaatagtctcctagaggtgaatgaagcctcttctgtatctgaagctggtcctgaccaaacgtttgaggttccaaaggacatcatcagaagagcaaagaaaattccgaagatcaatattcttcacaaacaaacttcaggatatattgtatatggattatttatgctacatacgaaaattgtaaataggaagacgacaatctatgaaattcaggataaaacaggaagtatggctgtagtaggaaaaggagaatgccacaatatcccctgtgaaaaaggagataagcttcgactcttctgctttcgactgagaaagagggaaaatatgtcaaaactgatgtcagaaatgcatagtttcatccagatacagaaaaatacaaaccagagaagccatgactccaggagcatggcactaccccaggaacagagtcagcatccaaaaccttcagaggccagcacaaccctacctgaaagccatctcaagactcctcagatgccaccaacaaccccatccagcagttccttcaccaaggtcaccaaggacaaggatatcaaataac

SEQ ID NO: 172676 - DNA, 1624 bp, Homo sapiens
  Payload ID: 13946
  Gene Symbol: PYHIN1
  Gene Name: pyrin and HIN domain family, member 1
  Uniprot ID: Q6K0P9
  ENST ID: ENST00000392254
  CDS Start-End: 238-1623
aggaagccagcactagtcaagtgactctaagaagggccattttcccttgttgtctttgaaaatacttcattttcttagcatttcaggagattataacatcctgtatttcagtttctgagagctttactgactgatttccctattcaaaacaatcctcatttcctacatttctgaagatctcaagatctggactactgttgaagaaattcccagtaaggctcacttatatctttagagatggcaaataactacaagaaaattgttctactgaaaggattagaggtcatcaatgattatcattttagaattgttaagtccttactgagtaacgatttaaaacttaatccaaaaatgaaagaagagtatgacaaaattcagattgctgacttgatggaggaaaagttcccaggtgatgccggtttgggcaaactaatagaattcttcaaagaaataccaacactgggagaccttgctgaaactcttaaaagagaaaagttaaaagttgcaaataaaattgaatccattccagtcaaaggaataatcccatctaaaaagacgaaacagaaagaagtgtatcctgctacacctgcatgcaccccaagcaaccgtctcacagctaaaggagcagaggagactcttggacctcagaaaagaaaaaaaccatctgaagaagagactggaaccaaaaggagtaagatgtccaaagagcagactcggccttcctgctctgcaggagccagcacgtccacagccatgggccgttccccacctccccagacctcatcatcagctccacccaacacttcctcaactgagagcctaaaaccattggccaaccgtcacgcaactgccagtaaaaatattttccgagaagacccaataatcgcgatggtactaaatgcaacaaaagtatttaaatatgaatcctcagaaaatgagcaaagaagaatgtttcatgctacagtggctacgcagacacagttctttcatgtgaaggttttaaacatcaacttgaagaggaaattcattaaaaagagaatcatcattatatcaaattattccaaacgtaatagtctcctagaggtgaatgaagcctcttctgtatctgaagctggtcctgaccaaacgtttgaggttccaaaggacatcatcagaagagcaaagaaaattccgaagatcaatattcttcacaaacaaacttcaggatatattgtatatggattatttatgctacatacgaaaattgtaaataggaagacgacaatctatgaaattcaggataaaacaggaagtatggctgtagtaggaaaaggagaatgccacaatatcccctgtgaaaaaggagataagcttcgactcttctgctttcgactgagaaagagggaaaatatgtcaaaactgatgtcagaaatgcatagtttcatccagatacagaaaaatacaaaccagagaagccatgactccaggagcatggcactaccccaggaacagagtcagcatccaaaaccttcagaggccagcacaaccctacctgaaagccatctcaagactcctcagatgccaccaacaaccccatccagcagttccttcaccaaggtcaccaaggacaaggatatcaaataac

SEQ ID NO: 172677 - DNA, 771 bp, Homo sapiens
  Payload ID: 13946
  Gene Symbol: PYHIN1
  Gene Name: pyrin and HIN domain family, member 1
  ENST ID: ENST00000458222
  CDS Start-End: 320-771
gacacccactgcccttaacagaaaaaatactgctgagcaaagggtttaacaggactctcggtctaccagaagttcagtgcattttccaggattttcaaggcttcgatgctgtcatgttgtgagcccactatccacttgtgtttttccatgaataatgaaggaaacctgaggaatcatgaatgtaatcattgagtttctgagagctttactgactgatttccctattcaaaacaatcctcatttcctacatttctgaagatctcaagatctggactactgttgaagaaattcccagtaaggctcacttatatctttagagatggcaaataactacaagaaaattgttctactgaaaggattagaggtcatcaatgattatcattttagaattgttaagtccttactgagtaacgatttaaaacttaatccaaaaatgaaagaagagtatgacaaaattcagattgctgacttgatggaggaaaagttcccaggtgatgccggtttgggcaaactaatagaattcttcaaagaaataccaacactgggagaccttgctgaaactcttaaaagagaaaagttaaaagttgcaaataaaattgaatccattccagtcaaaggaataatcccatctaaaaagacgaaacagaaagaagtgtatcctgctacacctgcatgcaccccaagcaaccgtctcacagctaaaggagcagaggagactcttggacctcagaaaagaaaaaaaccatctgaagaagagactggaaccaaaag

SEQ ID NO: 172678 - DNA, 294 bp, Homo sapiens
  Payload ID: 13947
  Gene Symbol: PYDC2
  Gene Name: pyrin domain containing 2
  Uniprot ID: Q56P42
  ENST ID: ENST00000518817
  CDS Start-End: 1-294
atggcatcttctgcagagctggacttcaacctgcaggctcttctggagcagctcagccaggatgagttgagcaagttcaagtctctgatcagaacaatctccctgggaaaggagctacagaccgtcccccagacagaggtagacaaggctaatgggaagcaactggtagaaatcttcaccagccactcctgcagctactgggcagggatggcagccatccaggtctttgaaaagatgaatcaaacgcatctgtctgggagagctgatgaacactgtgtgatgcccccaccttaa

SEQ ID NO: 172679 - DNA, 411 bp, Homo sapiens
  Payload ID: 13948
  Gene Symbol: QRFP
  Gene Name: pyroglutamylated RFamide peptide
  Uniprot ID: P83859
  ENST ID: ENST00000343079
  CDS Start-End: 1-411
atggtaaggccttaccccctgatctacttcctcttcctgccgctgggcgcctgcttccctctactggacagaagagagcccacagacgccatgggtggcctcggagctggagaacgctgggccgacctggccatggggccccgaccccactccgtgtggggttcctctcggtggctgagagcttcacagccacaggccctgcttgtcatagccagggggctgcagacatcgggcagagagcatgctggctgcagattccgcttcgggaggcaggacgaaggcagtgaggccaccggcttcctccctgctgcgggggagaagaccagcggcccgttagggaacctggctgaggagctcaatggctacagcaggaagaaaggcggcttcagcttccgcttcggtcggcggtga

SEQ ID NO: 172680 - DNA, 1658 bp, Homo sapiens
  Payload ID: 13948
  Gene Symbol: QRFP
  Gene Name: pyroglutamylated RFamide peptide
  Uniprot ID: P83859
  ENST ID: ENST00000623824
  CDS Start-End: 522-932
cacaggacaggggcacctcaggccatcggaggcagccctggcctgggggatggaagctggttctggccagcaaagctcagtcatcggcttcaatccgcagaccctccgcccgaacctgggcgctcagccccgaagtggaggatcgagattccagtgccttcctcaggtctctggggaagtgtccacaggctctctattcccatgacttctgatcccccagcagccgggatgcagggggcagcccgcctgccctctcatcagactacatcctgtgtgaggttgtttttatcaacgcggtcagcactgcccctcttcaacaacagcgtccccaatggaatcccagggtcaggaatgcgcagcaggcagtcggcagagcagcaagcgcaccgcgggccatataaagcagggagagcccaggggccatgcctcctggacgaggacccagagcagctctgcccagcccagccccggagcccagcgatccaccagccagccttcctgggagcagtcccagccacacgatggtaaggccttaccccctgatctacttcctcttcctgccgctgggcgcctgcttccctctactggacagaagagagcccacagacgccatgggtggcctcggagctggagaacgctgggccgacctggccatggggccccgaccccactccgtgtggggttcctctcggtggctgagagcttcacagccacaggccctgcttgtcatagccagggggctgcagacatcgggcagagagcatgctggctgcagattccgcttcgggaggcaggacgaaggcagtgaggccaccggcttcctccctgctgcgggggagaagaccagcggcccgttagggaacctggctgaggagctcaatggctacagcaggaagaaaggcggcttcagcttccgcttcggtcggcggtgaagggccaggacgccttggaaggatttgcttcttggactcacccccattgtcttcactcctgccttctcccccagtctcaaagaccacgacacccagatgatgtaggcttggttacgatgaacgatccatggtaggacaggttaggtgtgtgcttacttttgatttccaactttgctgaagcgaaaaactaggcagtgtcaaaaaggaggctgtcttggagcctcggtcgtcccagcctctctcttcccctggggctttgactccgagcagccccctggccccaggggcacggagctgaggctgtggctgggccatgagtgtgaatagcagagcgaggcagcgggctgagtgcttacagttgggtaatcaaagttgtgacagtctctataggcacgactgcggctgacatcagagtgcaaatgagtgcattccactgggtacagaggatggttctgaaagttaaaaatgggaaaaaagaacccgatccccttctccatgccatgagcacaagatccccctggcaagaagcccctgctgtggtttgcctgcccctctgaccgcagcccttctccgcggcccagtgttagcccggccaggagtctcctgggagatgcgttgggaaggaatcccgtttttgctatagcaaggttgcatttcacatgttcaaaatcagaatatgtcgtgtgtatcttttcaaataaaagttgtgacaactgcaaaaccata

SEQ ID NO: 172681 - DNA, 1215 bp, Homo sapiens
  Payload ID: 13949
  Gene Symbol: QRFPR
  Gene Name: pyroglutamylated RFamide peptide receptor
  ENST ID: ENST00000334383
  CDS Start-End: 33-809
gcggtggccccgcgtcccgggagcgcacagcaatgcaggcgcttaacattaccccggagcagttctctcggctgctgcgggaccacaacctgacgcgggagcagttcatcgctctgtaccggctgcgaccgctcgtctacaccccagagctgccgggacgcgccaagctggccctcgtgctcaccggcgtgctcatcttcgccctggcgctctttggcaatgctctggtgttctacgtggtgacccgcagcaaggccatgcgcaccgtcaccaacatctttatctgctccttggcgctcagtgacctgctcatcaccttcttctgcattcccgtcaccatgctccagaacatttccgacaactggctggggggtgctttcatttgcaagatggtgccatttgtccagtctaccgctgttgtgacagaaatcctcactatgacctgcattgctgtggaaaggcaccagggacttgtgcatccttttaaaatgaagtggcaatacaccaaccgaagggctttcacaatgctaggtgtggtctggctggtggcagtcatcgtaggatcacccatgtggcacgtgcaacaacttgagatcaaatatgacttcctatatgaaaaggaacacatctgctgcttagaagagtggaccagccctgtgcaccagaagatctacaccaccttcatccttgtcatcctcttcctcctgcctcttatggaagaagaaacgagctgtcattatgatggtgacagtggtggctctctttgctgtgtgctgggcaccattccatgttgtccatatgatgattgaatacagtaattttgaaaaggaatatgatgatgtcacaatcaagatgatttttgctatcgtgcaaattattggattttccaactccatctgtaatcccattgtctatgcatttatgaatgaaaacttcaaaaaaaatgttttgtctgcagtttgttattgcatagtaaataaaaccttctctccagcacaaaggcatggaaattcaggaattacaatgatgcggaagaaagcaaagttttccctcagagagaatccagtggaggaaaccaaaggagaagcattcagtgatggcaacattgaagtcaaattgtgtgaacagacagaggagaagaaaaagctcaaacgacatcttgctctctttaggtctgaactggctgagaattctcctttagacagtgggcattaa

SEQ ID NO: 172682 - DNA, 1708 bp, Homo sapiens
  Payload ID: 13949
  Gene Symbol: QRFPR
  Gene Name: pyroglutamylated RFamide peptide receptor
  Uniprot ID: Q96P65
  ENST ID: ENST00000394427
  CDS Start-End: 413-1708
accctccaccgctccccaagcgggtccggcgtccgcatcgcatggccagaaggcggggagccagaggcgccaggaccctcgcgtggcgctccagcaccccagaccgtggcggcgcctcgccttagggaagagcaagggaagaactttatttgaaccgcgaacattttttggtcactgagatcgagtctcccagtgctttggcttcccgcctctttatcgtgggtttgatccctgagctgctctcctttcccgaacctcccggggtgcagcctagagccctcccgcgcggctgactccagagtagaggaagggaggcggcctccggctggtcccccgaagccctcgctgccccgcagatgcggatggccagccagtagcgggcggtggccccgcgtcccgggagcgcacagcaatgcaggcgcttaacattaccccggagcagttctctcggctgctgcgggaccacaacctgacgcgggagcagttcatcgctctgtaccggctgcgaccgctcgtctacaccccagagctgccgggacgcgccaagctggccctcgtgctcaccggcgtgctcatcttcgccctggcgctctttggcaatgctctggtgttctacgtggtgacccgcagcaaggccatgcgcaccgtcaccaacatctttatctgctccttggcgctcagtgacctgctcatcaccttcttctgcattcccgtcaccatgctccagaacatttccgacaactggctggggggtgctttcatttgcaagatggtgccatttgtccagtctaccgctgttgtgacagaaatcctcactatgacctgcattgctgtggaaaggcaccagggacttgtgcatccttttaaaatgaagtggcaatacaccaaccgaagggctttcacaatgctaggtgtggtctggctggtggcagtcatcgtaggatcacccatgtggcacgtgcaacaacttgagatcaaatatgacttcctatatgaaaaggaacacatctgctgcttagaagagtggaccagccctgtgcaccagaagatctacaccaccttcatccttgtcatcctcttcctcctgcctcttatggtgatgcttattctgtacagtaaaattggttatgaactttggataaagaaaagagttggggatggttcagtgcttcgaactattcatggaaaagaaatgtccaaaatagccaggaagaagaaacgagctgtcattatgatggtgacagtggtggctctctttgctgtgtgctgggcaccattccatgttgtccatatgatgattgaatacagtaattttgaaaaggaatatgatgatgtcacaatcaagatgatttttgctatcgtgcaaattattggattttccaactccatctgtaatcccattgtctatgcatttatgaatgaaaacttcaaaaaaaatgttttgtctgcagtttgttattgcatagtaaataaaaccttctctccagcacaaaggcatggaaattcaggaattacaatgatgcggaagaaagcaaagttttccctcagagagaatccagtggaggaaaccaaaggagaagcattcagtgatggcaacattgaagtcaaattgtgtgaacagacagaggagaagaaaaagctcaaacgacatcttgctctctttaggtctgaactggctgagaattctcctttagacagtgggcattaa

SEQ ID NO: 172683 - DNA, 1429 bp, Homo sapiens
  Payload ID: 13949
  Gene Symbol: QRFPR
  Gene Name: pyroglutamylated RFamide peptide receptor
  ENST ID: ENST00000507331
  CDS Start-End: 1-573
atgcaggcgcttaacattaccccggagcagttctctcggctgctgcgggaccacaacctgacgcgggagcagttcatcgctctgtaccggctgcgaccgctcgtctacaccccagagctgccgggacgcgccaagctggccctcgtgctcaccggcgtgctcatcttcgccctggcgctctttggcaatgctctggtgttctacgtggtgacccgcagcaaggccatgcgcaccgtcaccaacatctttatctgctccttggcgctcagtgacctgctcatcaccttcttctgcattcccgtcaccatgctccagaacatttccgacaactggctggggggtgctttcatttgcaagatggtgccatttgtccagtctaccgctgttgtgacagaaatcctcactatgacctgcattgctgtggaaaggcaccagggacttgtgcatccttttaaaatgaagtggcaatacaccaaccgaagggctttcacaatgctaggtgtggtctggctggtggcagtcatcgtaggatcacccatgtggcacgtgcaacaacttgaggctttaccctgaatagaaatatatttaagagagagaagagcacaaagccctgccatgtgtttatgatgccttgatcaatgtggcttcactgacatcagtcattgaattatgtcttgttttggtgccccgtgatcaaatatgacttcctatatgaaaaggaacacatctgctgcttagaagagtggaccagccctgtgcaccagaagatctacaccaccttcatccttgtcatcctcttcctcctgcctcttatggtgatgcttattctgtacagtaaaattggttatgaactttggataaagaaaagagttggggatggttcagtgcttcgaactattcatggaaaagaaatgtccaaaatagccaggaagaagaaacgagctgtcattatgatggtgacagtggtggctctctttgctgtgtgctgggcaccattccatgttgtccatatgatgattgaatacagtaattttgaaaaggaatatgatgatgtcacaatcaagatgatttttgctatcgtgcaaattattggattttccaactccatctgtaatcccattgtctatgcatttatgaatgaaaacttcaaaaaaaatgttttgtctgcagtttgttattgcatagtaaataaaaccttctctccagcacaaaggcatggaaattcaggaattacaatgatgcggaagaaagcaaagttttccctcagagagaatccagtggaggaaaccaaaggagaagcattcagtgatggcaacattgaagtcaaattgtgtgaacagacagaggagaagaaaaagctcaaacgacatcttgctctctttaggtctgaactggctgagaattctcctttagacagtgggcattaatt

SEQ ID NO: 172684 - DNA, 1409 bp, Homo sapiens
  Payload ID: 13950
  Gene Symbol: PGPEP1
  Gene Name: pyroglutamyl-peptidase I
  Uniprot ID: Q9NXJ5
  ENST ID: ENST00000252813
  CDS Start-End: 252-650
gagaggctgcagcggcagcagctgtcgcgccagtcgcaacagaagcaggtccgaggcacagcccgatcccgccatggagcagccgaggaaggcggtggtagtgacgggagctagaaaagctaggccttggcgacagcgtggacctgcatgtgtacgagattccggttgagtaccaaacagtccagagactcatccccgccctgtgggagaagcacagtccacagctggtggtgcatgtgggggtgtcaggcatggcgaccacagtcacactggagaaatgtggacacaacaagggctacaaggggctggacaactgccgcttttgccccggctcccagtgctgcgtggaggacgggcctgaaagcattgactccatcatcgacatggatgctgtgtgcaagcgagtcaccacgttgggcctggatgtgtcggtgaccatctcgcaggatgccggcagatatctctgcgactttacctactacacctctttgtaccagagtcacggtcgatcagccttcgtccacgtgcccccactggggaagccgtacaacgcggaccagctgggcagggcactgagagccatcattgaggagatgttggacctcctggagcagtcagagggcaaaatcaactattgccacaaacactgagggacgctcaggtctcctaagacctcatcctgctggggaccccacgaggggacatccaccctctggggtgtggccaggaaaagacaagctcttcagcttggggatccgatctggaagagagattctgatctgcccacctcctcttcctccttctctacaaaagctccggttgattcgagggaagtggtgaaaatttttttttctcccattttcctccctgcatctggggacacagctgccgtgaccagggaggccagcctgggaggtccagatgcccagggagaatcttggtctggtgaatccatgagctgcgataccacggctggggccatatgttcacctgctttcctgtccgttggtgaaggaatttcagaattcattttatatccaagactggcttttaccaaatttaaaagcctctcaatgcgtcctcgaccttgaactgtgctcaacagcctggccctttctggggccaccctgggatatggctggctggctggctttctttctttctttctttctttctttcttgctttctttctttcttgctttctttcttctctctctctctttttttttttttttaaatagtgctagtttgggcacagagtaatttatattccctttggttaaaatgcaggctttttagccaacaacaaaagtgttttccccccacccccactcgcccaccagggtgatgccacttttgcctcctgccctgaaaattggacttaagatgccatgtcttggccaggcgca

SEQ ID NO: 172685 - DNA, 7092 bp, Homo sapiens
  Payload ID: 13950
  Gene Symbol: PGPEP1
  Gene Name: pyroglutamyl-peptidase I
  Uniprot ID: Q9NXJ5
  ENST ID: ENST00000269919
  CDS Start-End: 96-725
aggggcgtggcctcgcgcggccgagaggctgcagcggcagcagctgtcgcgccagtcgcaacagaagcaggtccgaggcacagcccgatcccgccatggagcagccgaggaaggcggtggtagtgacgggatttggcccttttggggaacacaccgtgaacgccagttggattgcagttcaggagctagaaaagctaggccttggcgacagcgtggacctgcatgtgtacgagattccggttgagtaccaaacagtccagagactcatccccgccctgtgggagaagcacagtccacagctggtggtgcatgtgggggtgtcaggcatggcgaccacagtcacactggagaaatgtggacacaacaagggctacaaggggctggacaactgccgcttttgccccggctcccagtgctgcgtggaggacgggcctgaaagcattgactccatcatcgacatggatgctgtgtgcaagcgagtcaccacgttgggcctggatgtgtcggtgaccatctcgcaggatgccggcagatatctctgcgactttacctactacacctctttgtaccagagtcacggtcgatcagccttcgtccacgtgcccccactggggaagccgtacaacgcggaccagctgggcagggcactgagagccatcattgaggagatgttggacctcctggagcagtcagagggcaaaatcaactattgccacaaacactgagggacgctcaggtctcctaagacctcatcctgctggggaccccacgaggggacatccaccctctggggtgtggccaggaaaagacaagctcttcagcttggggatccgatctggaagagagattctgatctgcccacctcctcttcctccttctctacaaaagctccggttgattcgagggaagtggtgaaaatttttttttctcccattttcctccctgcatctggggacacagctgccgtgaccagggaggccagcctgggaggtccagatgcccagggagaatcttggtctggtgaatccatgagctgcgataccacggctggggccatatgttcacctgctttcctgtccgttggtgaaggaatttcagaattcattttatatccaagactggcttttaccaaatttaaaagcctctcaatgcgtcctcgaccttgaactgtgctcaacagcctggccctttctggggccaccctgggatatggctggctggctggctttctttctttctttctttctttctttcttgctttctttctttcttgctttctttcttctctctctctctttttttttttttttaaatagtgctagtttgggcacagagtaatttatattccctttggttaaaatgcaggctttttagccaacaacaaaagtgttttccccccacccccactcgcccaccagggtgatgccacttttgcctcctgccctgaaaattggacttaagatgccatgtcttggccaggcgcagtggctcatgcctgtaatcccagcactttggaaggccagggtgggcggatcacctgagatcaggagttcaagatcagcctggccaacatggtgaaaccctgcctctactaaaaatacaaaaattagccgggcatggtgatgagtgcctgtagtcccagctactcgggaggctgaggctggagaatcgcttgaacttgggaggcagaggttgcagtgagctgagattgcacagctgcactccagcctgggtgacagagcgagactctgtctcaaaacaattggacttaagatggcatgtctttgttttagggccaaaaatgaggcccccttgcttaaggcatggggtccgtggccaggcaacggggtgggactgctgccccagatgtggccatgggggtcgtggtcctttcaacaccaagctatgagctgtcgccatggagaccagggccacctgtggaaaggcggattttgtctgcttttgacttttcttttttaatatgtaaaactccacatcagcggaaacccccccctacttctggcctggagcttcagggttttggtgctgggacgagtttgttgttctccttagcggggtggcgcggggggctcaaaacgggggcgcgggggctggagttggcagagctctgcatgtcccggcatgtctgagcaggaggaattccgggcggccaaagggttttatgtagattgcttttggacactcgcccaggagtcaggagttgatttttatctcacttcctggtaaccttgaacttaccaggcagggatgagatgacgtaaacttcctcagatgatgtaagttcagccacatcttgctgcccattagggagagaggacgacccccacagtgaaagtaattgagtgaaatgcacgttctggaaatcagtttctattttggcctggaggaatgtggctatactgcttccctgagtgtgacacagttggaatctaatcttgttggtttcccaacatctaggtttttgtttgtttgtttgtttttatgatagggtcttgttctgttgaccaggctggagtacagtagtgtgatcatggatcactgcagcctctacctcctgggctcaagtgatcctcccatctcagcctcctgagtagctgggactacaggcatgcaccaccacacctggctaatttttaaattttttatacagacagggtttcaccatgttgcccaggctggtctcgaactcctggactcaaactgatcctcctttctcggcctcccaaagtgctgggattacaggcatgagccactgcacccagcccagttctttcttaaaacagctgagagttttgttttcttcagcgttcaccttccttgtctccagttccgatgctggcagtggttcctacctctgttgggtttctagatagtttgggaacggggttgatgggtttctgtgaaacacattttccaagtcttgggctttctctggaggggaaggtggatgctggcgggtgacttgcagtgggcgcctggcagtgggtgtggactgtaactgacaggtggaaatgagtagggacactattgttccctccatgccagcttttttttttgctggaaatgccccctccacacccctggtagctctgtgtcctgagaaatccagagtgtgggagacatcactgcatctgtccccccagcttctgtgaagggaagctgtggcctcttttgaatgtggggaacaactgaagactcaggggtcacccagaggtctggtggaaagcaacttcaggtttcatcttgctctattcctcaaaggtctggtctgtgggcctctgaggagaaaacaggtctagccaagacagggacaaaatggggaaggggatgtgccaggcctgaactgagctaagcacctgccccgggctccacacttccatctttcttttgtcttcatttcacctctgtgtttaaagcactgtgtgacatagctccttagagatataacctattgtctgctcattgtcacgtgtgtgtgtgtcatctttgtattcttgcagtggtttcacatttccttacccagtcaagccagtatcccatccttcctcataatgcacaacatttggctcattttatttttctcattgttattttttatttttattttttgagatggattctcacactgttactcgggctagagtgcaatggcgtgatctcggctcactgcaacctccacctcctgggtttacacaattctcctgcctcagcctcccgagtagctgggattacaggcgcccgtcaccacacctggctaatttttgtatttttagtagagatgcagcttcaccatgttggccaggctggtcttgaaatcctgacctcaggtgatctgcctgccttggcctcccaaagtgctgggattacaggtgtgagctactgcgcctggccaagttttttacaaatatttttcttttggtggaactcatctgtgcactctctggtgtgtttttccacctttgttgggtcttggcttaaaatatcctcatgtgggctaggtgtggttactcacacctgtaatcctagcactttgggaggttgaggcaggagaatcccttgagccaggagttcaagaccagcctgggcaacatagcaagagatcccatatctaccaaaacatacaagaattagccagatgtggtggtgcatgcctgtggtcccagatactcaggaggctgaggcaggaggatcacctatgcctgggaggttgaagccccagtgagccatgatcacaccactgtagtccagcccgggtgacacagcaagactctgtctcaaaaaaaaaaaaaaaaaaaatcctcatgcaagaagggaaggaccaagtcccattccctcttgcctcattttcagagcctggggtaggggctacaggtggcataggaagggtctgcaaggtgggtgggacttggcaggtgttgggaagaggaataggggtggcaagtgtcaatggtgaaaagacaggctgaggggtgtggtgggaaggctgggggagaaaggtgagaagtgattgggggggcttccctgatgagtcctcatggagggtgctgaggcagggaacaggggtgcagggacagtgatcagggcacctggtaccctgaccaacttgatgatggcatctcttttaagatgcccaagtctgcgcacttttattcctttattcggcccctagcaccccctccccaccccaaagaaggtcagttgcatgcgtgtggggatgtagctcaaaaaagaaataagatggagtggaaaggaaagaaaggaagaagcaggaattcaaggtgggtgggctgagcttggggccacctagcccacctgctccaatcaagggctggaacaaacctgaggccacttggagaggcagggctgggcagggacagggggtgggggccgaaatcacagcttccccatcagagccagatgtgtgaaggaaatgtcccagatggcagtagtttctcggcaaggaggggaatcctggagatggttcatgtctgtgatcccagtgctttgggaggctgaggtgggaggattgcttgagcccgggagttcgagaccagccctgggcaacatggcgagaccccatctctacagaaattaaaaaaaaaaattagccagttgtggtgtcaagcacctgtagtcccagctacttgggaggctgagttgggaggcttatctgagcccaggaggtgaaggctgcaatgagccatgattacactactgtaccccagcctgggcaacagagcaagaccctgcctcaaaattaagaaaaaaaaaaggggggccaggcgcagtggcttatgcctgttatcccagcactttgggaggccaaggcagactgatcgcttgaggccaggagtttgcgaccagcctggccaacatagcaaaaccccatctctactaaaaatacaaaaattagtcaagagtggatggtgcgtgcctgtaatcccagctacctgggaggctgagacaggagaattgcttgaacctgggaggcagaggttgcagtggtgtgagatcacgccactgcattccagactgggcaacatagcaagactctgtcacaaaaaaaaaaaaaaaaaagaattccctgctctgcttttctgctcgttgctggcatagaaacatctagaacagaaagtatccactctggggcagatgggagagctggaaaagtagattcaagatgccttttagtcttggaagtttcttccaggaagcaagaccagctggtatgtttacacctgcactccagtgccctggggaggtgaccaggtggagggggatggctcatggaaatctgtcccgcacagctggcccccttttggctgccactgtctagactgttggcctttgacctctctgcctcttgtggcgtctgaacctagacgtcccttttggagacagctggacaaagccctattctccgcagccccagcctctatcctgaggcctctgggagctgcgtgacggccagcatggggtgctgatcatggtcaaggaggcaggtctttgccaggttgccccatgcagccacccatcctcagcatcctaacttgagggggcaggagagggctttgtttttataatccggattaaatttcccttccctgggcacaagtgcctcatgagggcccggggctgctggttgggagggaaagcatccccgtttttgcagtgaggaggccggccgagggctggggttccacttagacccttggcagaatggctgttgaggggcaggcgctgcccagtgcccacgtctggaaagctaattcccgggtggacgctgaacatacctgctgagagactctgtcccctggtttccaggacagttgtcacaagctgagtggggggggactcccaggacttgagggacccagtcccaccccaaactgctccccctcccccaaattccctttctcctcctgctctttctccccgctgtgcctcccccagttacccacagaagtgcctgcctctccagcgctcacagaacacacaaaaagggacaggaattggtcactgggtagtggccgtggctcctgacgatccagaccagcgtctggcccaagccattcagaggtggggtctggggcctgggggttttgtgtcgtgacactttgtctcaaggagattccacatagggatttgaattaggctttctgcttgccaaggcctgtggcatctgagcctggctgagggccgggcaagcctcccctgagcctttggaagccgagttcactctctgcctgcccaggggagcaccggcttggttctgggggctcctctaacatctcaggtttttatcttgtcttaaatttctttctaggaaaaaacccttccctgccaaaggtgactgtgttttctgccgccgaaggagggcccggtccctccaggctcagtgtggcttctccctgacccccgccctagaacttttgccagtgccttttctgaaactcctgtgtcccgggccccccaggcggagaaggatatgccggattctgcctggggctgggctctaggagaccccaaatttgacaccacagaaagcaaataaaacacttgaaatacgca

SEQ ID NO: 172686 - DNA, 1414 bp, Homo sapiens
  Payload ID: 13950
  Gene Symbol: PGPEP1
  Gene Name: pyroglutamyl-peptidase I
  ENST ID: ENST00000600283
  CDS Start-End: 69-338
gctgcagcggcagcagctgtcgcgccagtcgcaacagaagcaggtccgaggcacagcccgatcccgccatggagcagccgaggaaggcggtggtagtgacgggatttggcccttttggggaacacaccgtgaacgccagttggattgcagttcagagatgggatctcactatattgccctggctggtcttgaacttccgggctcaaatgatccttccacctcggcctcccaaagaagctgggattataggtgtgagccaccgagccctgccatcaggagctagaaaagctaggccttggcgacagcgtggacctgcatgtgtacgagattccggttgagtaccaaacagtccagagactcatccccgccctgtgggagaagcacagtccacagctggtggtgcatgtgggggtgtcaggcatggcgaccacagtcacactggagaaatgtggacacaacaagggctacaaggggctggacaactgccgcttttgccccggctcccagtgctgcgtggaggacgggcctgaaagcattgactccatcatcgacatggatgctgtgtgcaagcgagtcaccacgttgggcctggatgtgtcggtgaccatctcgcaggatgccggcagagtcacggtcgatcagccttcgtccacgtgcccccactggggaagccgtacaacgcggaccagctgggcagggcactgagagccatcattgaggagatgttggacctcctggagcagtcagagggcaaaatcaactattgccacaaacactgagggacgctcaggtctcctaagacctcatcctgctggggaccccacgaggggacatccaccctctggggtgtggccaggaaaagacaagctcttcagcttggggatccgatctggaagagagattctgatctgcccacctcctcttcctccttctctacaaaagctccggttgattcgagggaagtggtgaaaatttttttttctcccattttcctccctgcatctggggacacagctgccgtgaccagggaggccagcctgggaggtccagatgcccagggagaatcttggtctggtgaatccatgagctgcgataccacggctggggccatatgttcacctgctttcctgtccgttggtgaaggaatttcagaattcattttatatccaagactggcttttaccaaatttaaaagcctctcaatgcgtcctcgaccttgaactgtgctcaacagcctggccctttctggggccaccctgggatatggctggctggctggctttctttctttctttctttctttctttcttgctttctttctttcttgctttctttcttctctctctctctttttttttttttttaaatagtgctagtttgggcacagagtaatttatattccctttggttaaaa

SEQ ID NO: 172687 - DNA, 1237 bp, Homo sapiens
  Payload ID: 13950
  Gene Symbol: PGPEP1
  Gene Name: pyroglutamyl-peptidase I
  ENST ID: ENST00000596962
  CDS Start-End: 72-341
gaggctgcagcggcagcagctgtcgcgccagtcgcaacagaagcaggtccgaggcacagcccgatcccgccatggagcagccgaggaaggcggtggtagtgacgggatttggcccttttggggaacacaccgtgaacgccagttggattgcagttcagagatgggatctcactatattgccctggctggtcttgaacttccgggctcaaatgatccttccacctcggcctcccaaagaagctgggattataggtgtgagccaccgagccctgccatcaggagctagaaaagctaggccttggcgacagcgtggacctgcatgtgtacgagattccggttgagtaccaaacagtccagagactcatccccgccctgtgggagaagcacagtccacagctggtggtgcatgtgggggtgtcaggcatggcgaccacagtcacactggagaaatgtggacacaacaagggctacaaggggctggacaactgccgcttttgccccggctcccagtgctgcgtggaggacgggcctgaaagcattgactccatcatcgacatggatgctgtgtgcaagcgagtcaccacgttgggcctggatgtgtcggtgaccatctcgcaggatgccggcagatatctctgcgactttacctactacacctctttgtaccagagtcacggtcgatcagccttcgtccacgtgcccccactggggaagccgtacaacgcggaccagctgggcagggcactgagagccatcattgaggagatgttggacctcctggagcagtcagagggcaaaatcaactattgccacaaacactgagggacgctcaggtctcctaagacctcatcctgctggggaccccacgaggggacatccaccctctggggtgtggccaggaaaagacaagctcttcagcttggggatccgatctggaagagagattctgatctgcccacctcctcttcctccttctctacaaaagctccggttgattcgagggaagtggtgaaaatttttttttctcccattttcctccctgcatctggggacacagctgccgtgaccagggaggccagcctgggaggtccagatgcccagggagaatcttggtctggtgaatccatgagctgcgataccacggctggggccatatgttcacctgctttcctgtccgttggtgaaggaatttcagaattcattttatatccaagactggcttttaccaaatttaaaa

SEQ ID NO: 172688 - DNA, 418 bp, Homo sapiens
  Payload ID: 13950
  Gene Symbol: PGPEP1
  Gene Name: pyroglutamyl-peptidase I
  ENST ID: ENST00000595552
  CDS Start-End: 1-264
gaggacgggcctgaaagcattgactccatcatcgacatggatgctgtgtgcaagcgagtcaccacgttgggcctggatgtgtcggtgaccatctcgcaggatgccggcagccttggaagtcagaagtccaaggtcaaggtggtagcaggactggttccttctggaggtgctgagggaaaaaacccttccctgccaaaggtgactgtgttttctgccgccgaaggagggcccggtccctccaggctcagtgtggcttctccctgacccccgccctagaacttttgccagtgccttttctgaaactcctgtgtcccgggccccccaggcggagaaggatatgccggattctgcctggggctgggctctaggagaccccaaatttgacaccacagaaagcaaataaaacacttgaaatacg

SEQ ID NO: 172689 - DNA, 363 bp, Homo sapiens
  Payload ID: 13950
  Gene Symbol: PGPEP1
  Gene Name: pyroglutamyl-peptidase I
  ENST ID: ENST00000597663
  CDS Start-End: 1-331
cttttgccccggctcccagtgctgcgtggaggacgggcctgaaagcattgactccatcatcgacatggatgctgtgtgcaagcgagtcaccacgttgggcctggatgtgtcggtgaccatctcgcaggatgccggcaggaaaaaacccttccctgccaaaggtgactgtgttttctgccgccgaaggagggcccggtccctccaggctcagtgtggcttctccctgacccccgccctagaacttttgccagtgccttttctgaaactcctgtgtcccgggccccccaggcggagaaggatatgccggattctgcctggggctgggctctaggagaccccaaatttgacaccacagaaagcaaa

SEQ ID NO: 172690 - DNA, 769 bp, Homo sapiens
  Payload ID: 13950
  Gene Symbol: PGPEP1
  Gene Name: pyroglutamyl-peptidase I
  ENST ID: ENST00000604499
  CDS Start-End: 85-600
ctcgcgcggccgagaggctgcagcggcagcagctgtcgcgccagtcgcaacagaagcaggtccgaggcacagcccgatcccgccatggagcagccgaggaaggcggtggtagtgacgggatttggcccttttggggaacacaccgtgaacgccagttggattgcagttcaggagctagaaaagctaggccttggcgacagcgtggacctgcatgtgtacgagattccggttgagtaccaaacagtccagagactcatccccgccctgtgggagaagcacagtccacagctggtggtgcatgtgggggtgtcaggcatggcgaccacagtcacactggagaaatgtggacacaacaagggctacaaggggctggacaactgccgcttttgccccggctcccagtgctgcgtggaggacgggcctgaaagcattgactccatcatcgacatggatgctgtgtgcaagcgagtcaccacgttgggcctggatgtgtcggtgaccatctcgcaggatgccggcagagtcacggtcgatcagccttcgtccacgtgcccccactggggaagccgtacaacgcggaccagctgggcagggcactgagagccatcattgaggagatgttggacctcctggagcagtcagagggcaaaatcaactattgccacaaacactgagggacgctcaggtctcctaagacctcatcctgctggggaccccacgaggggacatccaccctctggggtgtggccaggaaaagacaagctcttca

SEQ ID NO: 172691 - DNA, 545 bp, Homo sapiens
  Payload ID: 13950
  Gene Symbol: PGPEP1
  Gene Name: pyroglutamyl-peptidase I
  ENST ID: ENST00000597431
  CDS Start-End: 44-379
cagtcgcaacagaagcaggtccgaggcacagcccgatcccgccatggagcagccgaggaaggcggtggtagtgacgggatttggcccttttggggaacacaccgtgaacgccagttggattgcagttcaggagctagaaaagctaggccttggcgacagcgtggacctgcatgtgtacgagattccggttgagtaccaaacagtccagagactcatccccgccctgtgggagaagcacagtccacagatatctctgcgactttacctactacacctctttgtaccagagtcacggtcgatcagccttcgtccacgtgcccccactggggaagccgtacaacgcggaccagctgggcagggcactgagagccatcattgaggagatgttggacctcctggagcagtcagagggcaaaatcaactattgccacaaacactgagggacgctcaggtctcctaagacctcatcctgctggggaccccacgaggggacatccaccctctggggtgtggccaggaaaagacaagctcttcagcttggggat

SEQ ID NO: 172692 - DNA, 762 bp, Homo sapiens
  Payload ID: 13950
  Gene Symbol: PGPEP1
  Gene Name: pyroglutamyl-peptidase I
  ENST ID: ENST00000595066
  CDS Start-End: 84-524
tcgcgcggccgagaggctgcagcggcagcagctgtcgcgccagtcgcaacagaagcaggtccgaggcacagcccgatcccgccatggagcagccgaggaaggcggtggtagtgacgggatttggcccttttggggaacacaccgtgaacgccagttggattgcagttcaggagctagaaaagctaggccttggcgacagcgtggacctgcatgtgtacgagattccggttgagtaccaaacagtccagagactcatccccgccctgtgggagaagcacagtccacagctggtggtgcatgtgggggtgtcaggcatggcgaccacagtcacactggagaaatgtggacacaacaagggctacaaggggctggacaactgccgcttttgccccggctcccagtgctgcgtggaggacgggcctgaaagcattgactccatcatcgacatggatgctgtgtgcaagcgagtcaccacgttgggcctggatgtgtcggtgaccatctcgcaggatgccggcaggtagggccctgtggggtgggagtgagtggggatttccctcctccacccactgagcctggtgtagaacaagccaagcgtgttgaccttggcctctttggaccaagcactcagtgtatactaggcacagagccaagtatttgtacgtagcaggtgccgttggttctgctcctgggactcatggatctgcccacttctccccaccatcacggtccccaccaaggcccccagcatctcccacctgg

SEQ ID NO: 172693 - DNA, 995 bp, Homo sapiens
  Payload ID: 13951
  Gene Symbol: PGPEP1L
  Gene Name: pyroglutamyl-peptidase I-like
  Uniprot ID: A6NFU8
  ENST ID: ENST00000378919
  CDS Start-End: 207-797
ccaggcagagaaggtgcccggagctcagagcgcgcagagcccggccgctgggccgctgcctgagccagggaggcgcagcgcgagctcccacttcgtcttcatggattcccagcccagctgcgtggtggtgactgcatgttttcaaggttgagccacgtggtagtgtgtccagaattggtgggttgttggtctcactgacttcaagaatgaagccgcggactctcgtggagctctccaagctgggcctggggaatgaaacagtggtgcagctgcggactctggagctgcctgtagattacagggaggctaagcggagggtcaccggaatctgggaagatcatcagccgcaactcgtcgtgcatgtgggcatggacaccgccgccaaggcgatcattctggaacagtctggcaagaaccaaggctaccgggacgccgacatccgcagcttctggcccgagggcggcgtgtgcctacctggcagcccagacgtgctggagtcaggggtctgcatgaaggcagtctgcaagcgcgtagctgtggagggtgtcgacgtgatcttttcccgagatgcaggcagatacgtctgtgattatacctattacctgtctctgcatcatggaaagggctgcgcggcactcatccatgtccctccactatcgcgcgggctcccggccagcctgctgggaagagccttgagagtcatcatccaggaaatgctggaagaggtgggaaagcccaagcacagagcccagttcgaagaaaactcaaccatggtccttccagccaaagggaactgaccgggggattgctcctctagagaaaattgaatgtttcaatcctgtatgtagcactcaactgtgcattgagaaactttttcaaaaattgcttgtaagacaaagagggtggaaaactctgaattagcccaacaaaatcacaaagggttattttattgtcaggagaaagaacactctgaaaggtggacatttcacagggga

SEQ ID NO: 172694 - DNA, 1483 bp, Homo sapiens
  Payload ID: 13951
  Gene Symbol: PGPEP1L
  Gene Name: pyroglutamyl-peptidase I-like
  Uniprot ID: A6NFU8
  ENST ID: ENST00000535714
  CDS Start-End: 807-1235
agtagcaacttgctggagtcgccttctgtgctgtggaagttttgttgttttgcttgtttgcaataaccgttgctgctgcttactgtttgggtccgcactgcctttatgagctgtaacgctcaccgtgaaggtctgcagcttcgttcttaaagccagccacatcacggacccaccgggagaaacgaataactccaaacacgccaccttaagagccgtagcactcatgatgaaggtccgtagcttcactcctgaagtcagcgagatcacgaatctgccagaaggaagaaactccgaacacatgcgagcatcagaagaaacaaacttgggacacgctgcctttaaaaactgtaacactcaccgccagggtccgcggcttcgttcttgaagtcagtgagaccaagaatccgccgattctggacacaccatgacggaactagatccttggcctttcggggcccagaacgctacggacgccgggcggccaggaggggttgggctcccgctccaccccggtccccggcgagcacgcggccaggcagagaaggtgcccggagctcagagcgcgcagagcccggccgctgggccgctgcctgagccagggaggcgcagcgcgagctcccacttcgtcttcatggattcccagcccagctgcgtggtggtgactggagctctccaagctgggcctggggaatgaaacagtggtgcagctgcggactctggagctgcctgtagattacagggaggctaagcggagggtcaccggaatctgggaagatcatcagccgcaactcgtcgtgcatgtgggcatggacaccgccgccaaggcgatcattctggaacagtctggcaagaaccaaggctaccgggacgccgacatccgcagcttctggcccgagggcggcgtgtgcctacctggcagcccagacgtgctggagtcaggggtctgcatgaaggcagtctgcaagcgcgtagctgtggagggtgtcgacgtgatcttttcccgagatgcaggcagatacgtctgtgattatacctattacctgtctctgcatcatggaaagggctgcgcggcactcatccatgtccctccactatcgcgcgggctcccggccagcctgctgggaagagccttgagagtcatcatccaggaaatgctggaagaggtgggaaagcccaagcacagagcccagttcgaagaaaactcaaccatggtccttccagccaaagggaactgaccgggggattgctcctctagagaaaattgaatgtttcaatcctgtatgtagcactcaactgtgcattgagaaactttttcaaaaattgcttgtaagacaaagagggtggaaaactctgaattagcccaacaaaatcacaaagggttattttattgtcaggagaaagaacactctgaaaggtggacatttcacaggggatgaactagcttcagttatggttttcatgacaataaaatgaaatccgagtc

SEQ ID NO: 172695 - DNA, 787 bp, Homo sapiens
  Payload ID: 13952
  Gene Symbol: PPA1
  Gene Name: pyrophosphatase (inorganic) 1
  ENST ID: ENST00000373230
  CDS Start-End: 11-547
ctccggcactatgagcggcttcagcaccgaggagcgcgccgcgcccttctccctggagtaccgagtcttcctcaaaaatgagaaaggacaatatatatctccatttcatgatattccaatttatgcagataaggatgtgtttcacatggtagttgaagtaccacgctggtctaatgcaaaaatggagattgctacaaaggaccctttaaaccctattaaacaagatgtgaaaaaaggaaaacttcgctatgttgcgaatttgttcccgtataaaggatatatctggaactatggtgccatccctcagacttgggaagacccagggcacaatgataaacatactggctgttgtggtgacaatgacccaattgatgtgtgtgaaattggaagcaaggtatgtgcaagaggtgaaataattggcgtgaaagttctaggcatattggctatgattgacgaaggggaaaccgactggaaagtcattgccattaatgtggatgatcctgatgcagccaattataatgtatgtaatagtgttgtgatcctctgacatagcctctgcctctggaccagggatagtacctcaagcctgtaatcccagtgctttgggaagccaaggcaggaggattgcttgagcccaggagtttgagaccagcctgggcaacatgacgagaccccatttctacaaaaaatttaaaaattagctgggcgtgtgcatgcttatagtcccagctactcaggaggctgagatatcaatgatgtcaaacggctgaaacctggctacttagaa

SEQ ID NO: 172696 - DNA, 1295 bp, Homo sapiens
  Payload ID: 13952
  Gene Symbol: PPA1
  Gene Name: pyrophosphatase (inorganic) 1
  Uniprot ID: Q15181
  ENST ID: ENST00000373232
  CDS Start-End: 101-970
agtgctcgcagtgcgcaggcgtggggctctctccttgtcagtcggcgccgcgtgcgggctggtggctctgtggcagcggcggcggcaggactccggcactatgagcggcttcagcaccgaggagcgcgccgcgcccttctccctggagtaccgagtcttcctcaaaaatgagaaaggacaatatatatctccatttcatgatattccaatttatgcagataaggatgtgtttcacatggtagttgaagtaccacgctggtctaatgcaaaaatggagattgctacaaaggaccctttaaaccctattaaacaagatgtgaaaaaaggaaaacttcgctatgttgcgaatttgttcccgtataaaggatatatctggaactatggtgccatccctcagacttgggaagacccagggcacaatgataaacatactggctgttgtggtgacaatgacccaattgatgtgtgtgaaattggaagcaaggtatgtgcaagaggtgaaataattggcgtgaaagttctaggcatattggctatgattgacgaaggggaaaccgactggaaagtcattgccattaatgtggatgatcctgatgcagccaattataatgatatcaatgatgtcaaacggctgaaacctggctacttagaagctactgtggactggtttagaaggtataaggttcctgatggaaaaccagaaaatgagtttgcgtttaatgcagaatttaaagataaggactttgccattgatattattaaaagcactcatgaccattggaaagcattagtgactaagaaaacgaatggaaaaggaatcagttgcatgaatacaactttgtctgagagccccttcaagtgtgatcctgatgctgccagagccattgtggatgctttaccaccaccctgtgaatctgcctgcacagtaccaacagacgtggataagtggttccatcaccagaaaaactaatgagatttctctggaatacaagctgatattgctacatcgtgttcatctggatgtattagaagtaaaagtagtagcttttcaaagctttaaatttgtagaactcatctaactaaagtaaattctgctgtgactaatccaatatactcagaatgttatccatctaaagcatttttcatatctcaactaagataacttttagcacatgcttaaatatcaaagcagttgtcatttggaagtcacttgtgaatagatgtgcaaggggagcacatattggatgtatatgttaccatatgttaggaaataaaattattttgctgaaacttgg

SEQ ID NO: 172697 - DNA, 644 bp, Homo sapiens
  Payload ID: 13952
  Gene Symbol: PPA1
  Gene Name: pyrophosphatase (inorganic) 1
  ENST ID: ENST00000625364
  CDS Start-End: 108-644
ccggtccagtgctcgcagtgcgcaggcgtggggctctctccttgtcagtcggcgccgcgtgcgggctggtggctctgtggcagcggcggcggcaggactccggcactatgagcggcttcagcaccgaggagcgcgccgcgcccttctccctggagtaccgagtcttcctcaaaaatgagaaaggacaatatatatctccatttcatgatattccaatttatgcagataaggatgtgtttcacatggtagttgaagtaccacgctggtctaatgcaaaaatggagattgctacaaaggaccctttaaaccctattaaacaagatgtgaaaaaaggaaaacttcgctatgttgcgaatttgttcccgtataaaggatatatctggaactatggtgccatccctcagacttgggaagacccagggcacaatgataaacatactggctgttgtggtgacaatgacccaattgatgtgtgtgaaattggaagcaaggtatgtgcaagaggtgaaataattggcgtgaaagttctaggcatattggctatgattgacgaaggggaaaccgactggaaagtcattgccattaatgtggatgatcctgatgcagccaattataatgtatgtaatagtgttgtgatcctctga

SEQ ID NO: 172698 - DNA, 1072 bp, Homo sapiens
  Payload ID: 13953
  Gene Symbol: PPA2
  Gene Name: pyrophosphatase (inorganic) 2
  ENST ID: ENST00000351450
  CDS Start-End: 18-185
ggaccgtcattgacgccatgagcgcgctgctgcggctgctgcgcacgggtgccccagccgctgcgtgcctgcggttggggaccagtgcagggaccgggtcgcgccgtgctatggccctgtaccacactgaggagcgcggccagccctgctcgcagaattaccgcctcttctttaaatctgtttaatatgattgtagaaatacctcggtggacaaatgctaaaatggagattgccaccaaggagccaatgaatcccattaaacaatatgtaaaggatggaaagctacgctatgtggcgaatatcttcccttacaagggttatatatggaattatggtaccctccctcagacttgggaagatccccatgaaaaagataagagcacgaactgctttggagataatgatcctattgatgtttgcgaaataggctcaaagattctttcttgtggagaagttattcatgtgaagatccttggaattttggctcttattgatgaaggtgaaacagattggaaattaattgctatcaatgcgaatgatcctgaagcctcaaagtttcatgatattgatgatgttaagaagttcaaaccgggttacctggaagctactcttaattggtttagattatataaggtaccagatggaaaaccagaaaaccagtttgcttttaatggagaattcaaaaacaaggcttttgctcttgaagttattaaatccactcatcaatgttggaaagcattgcttatgaagaagtgtaatggaggagctataaattgcacaaacgtgcagatatctgatagccctttccgttgcactcaagaggaagcaagatcattagttgaatcggtatcatcttcaccaaataaagaaagtaatgaagaagagcaagtgtggcacttccttggcaagtgattgaaacatctgaaattctgctgtcaagattcccatctctaaggactccaagtgctagagacaagggggtctatgagcatttactgacttcctgttaaaacttcattttttcaaactttttgagctatgcaatatataaataaacagtaagaattttaaa

SEQ ID NO: 172699 - DNA, 1414 bp, Homo sapiens
  Payload ID: 13953
  Gene Symbol: PPA2
  Gene Name: pyrophosphatase (inorganic) 2
  Uniprot ID: Q9H2U2
  ENST ID: ENST00000348706
  CDS Start-End: 15-932
ccgtcattgacgccatgagcgcgctgctgcggctgctgcgcacgggtgccccagccgctgcgtgcctgcggttggggaccagtgcagggaccgggtcgcgccgtgctatggccctgtaccacactgaggagcgcggccagccctgctcgcagaattaccgcctcttctttaagaatgtaactggtcactacatttccccctttcatgatattcctctgaaggtgaactctaaagaggaaaatggcattcctatgaagaaagcacgaaatgatgaatatgagaatctgtttaatatgattgtagaaatacctcggtggacaaatgctaaaatggagattgccaccaaggagccaatgaatcccattaaacaatatgtaaaggatggaaagctacgctatgtggcgaatatcttcccttacaagggttatatatggaattatggtaccctccctcagattctttcttgtggagaagttattcatgtgaagatccttggaattttggctcttattgatgaaggtgaaacagattggaaattaattgctatcaatgcgaatgatcctgaagcctcaaagtttcatgatattgatgatgttaagaagttcaaaccgggttacctggaagctactcttaattggtttagattatataaggtaccagatggaaaaccagaaaaccagtttgcttttaatggagaattcaaaaacaaggcttttgctcttgaagttattaaatccactcatcaatgttggaaagcattgcttatgaagaagtgtaatggaggagctataaattgcacaaacgtgcagatatctgatagccctttccgttgcactcaagaggaagcaagatcattagttgaatcggtatcatcttcaccaaataaagaaagtaatgaagaagagcaagtgtggcacttccttggcaagtgattgaaacatctgaaattctgctgtcaagattcccatctctaaggactccaagtgctagagacaagggggtctatgagcatttactgacttcctgttaaaacttcattttttcaaactttttgagctatgcaatatataaataaacagtaagaattttaaattactctcctttggacatttattgatataaaaagaagattttggccaggcacggtggctcatgcctgtaatttcagcactttgggaggccgaggtgggcagatcacaaggtcaggagttcaagaccagcctggccagtatgttgaaaccccatctctattaaaaatacaaaaattagccaggcgtggtggtgcatgcctgtagacccagctactcaggaggctgaggcagaagaactgcttgagcccaggaggcagaggttgcagtgagcagagattgtgccactgcactccagcctaggcgacagagagagactccgtctc

SEQ ID NO: 172700 - DNA, 667 bp, Homo sapiens
  Payload ID: 13953
  Gene Symbol: PPA2
  Gene Name: pyrophosphatase (inorganic) 2
  Uniprot ID: Q9H2U2
  ENST ID: ENST00000354147
  CDS Start-End: 1-507
atgagcgcgctgctgcggctgctgcgcacgggtgccccagccgctgcgtgcctgcggttggggaccagtgcagggaccgggtcgcgccgtgctatggccctgtaccacactgaggagcgcggccagccctgctcgcagaattaccgcctcttctttaatattgatgatgttaagaagttcaaaccgggttacctggaagctactcttaattggtttagattatataaggtaccagatggaaaaccagaaaaccagtttgcttttaatggagaattcaaaaacaaggcttttgctcttgaagttattaaatccactcatcaatgttggaaagcattgcttatgaagaagtgtaatggaggagctataaattgcacaaacgtgcagatatctgatagccctttccgttgcactcaagaggaagcaagatcattagttgaatcggtatcatcttcaccaaataaagaaagtaatgaagaagagcaagtgtggcacttccttggcaagtgattgaaacatctgaaattctgctgtcaagattcccatctctaaggactccaagtgctagagacaagggggtctatgagcatttactgacttcctgttaaaacttcattttttcaaactttttgagctatgcaatatataaataaacagtaagaattttaaa

SEQ ID NO: 172701 - DNA, 1684 bp, Homo sapiens
  Payload ID: 13953
  Gene Symbol: PPA2
  Gene Name: pyrophosphatase (inorganic) 2
  Uniprot ID: Q9H2U2
  ENST ID: ENST00000341695
  CDS Start-End: 32-1036
ccgcgcgcacagcaggaccgtcattgacgccatgagcgcgctgctgcggctgctgcgcacgggtgccccagccgctgcgtgcctgcggttggggaccagtgcagggaccgggtcgcgccgtgctatggccctgtaccacactgaggagcgcggccagccctgctcgcagaattaccgcctcttctttaagaatgtaactggtcactacatttccccctttcatgatattcctctgaaggtgaactctaaagaggaaaatggcattcctatgaagaaagcacgaaatgatgaatatgagaatctgtttaatatgattgtagaaatacctcggtggacaaatgctaaaatggagattgccaccaaggagccaatgaatcccattaaacaatatgtaaaggatggaaagctacgctatgtggcgaatatcttcccttacaagggttatatatggaattatggtaccctccctcagacttgggaagatccccatgaaaaagataagagcacgaactgctttggagataatgatcctattgatgtttgcgaaataggctcaaagattctttcttgtggagaagttattcatgtgaagatccttggaattttggctcttattgatgaaggtgaaacagattggaaattaattgctatcaatgcgaatgatcctgaagcctcaaagtttcatgatattgatgatgttaagaagttcaaaccgggttacctggaagctactcttaattggtttagattatataaggtaccagatggaaaaccagaaaaccagtttgcttttaatggagaattcaaaaacaaggcttttgctcttgaagttattaaatccactcatcaatgttggaaagcattgcttatgaagaagtgtaatggaggagctataaattgcacaaacgtgcagatatctgatagccctttccgttgcactcaagaggaagcaagatcattagttgaatcggtatcatcttcaccaaataaagaaagtaatgaagaagagcaagtgtggcacttccttggcaagtgattgaaacatctgaaattctgctgtcaagattcccatctctaaggactccaagtgctagagacaagggggtctatgagcatttactgacttcctgttaaaacttcattttttcaaactttttgagctatgcaatatataaataaacagtaagaattttaaattactctcctttggacatttattgatataaaaagaagattttggccaggcacggtggctcatgcctgtaatttcagcactttgggaggccgaggtgggcagatcacaaggtcaggagttcaagaccagcctggccagtatgttgaaaccccatctctattaaaaatacaaaaattagccaggcgtggtggtgcatgcctgtagacccagctactcaggaggctgaggcagaagaactgcttgagcccaggaggcagaggttgcagtgagcagagattgtgccactgcactccagcctaggcgacagagagagactccgtctcaaaaaaaaaaaaaagattttgtttcatttcatagcacaaatttagaggcattgagttgaccatttctagtttctatacctgaaggaacccattgattttaccagtttttatttctgtagattggatgtaaaaatcacagattcaataaattaataaactttgtgta

SEQ ID NO: 172702 - DNA, 859 bp, Homo sapiens
  Payload ID: 13953
  Gene Symbol: PPA2
  Gene Name: pyrophosphatase (inorganic) 2
  Uniprot ID: Q9H2U2
  ENST ID: ENST00000432483
  CDS Start-End: 1-699
atgagcgcgctgctgcggctgctgcgcacgggtgccccagccgctgcgtgcctgcggttggggaccagtgcagggaccgggtcgcgccgtgctatggccctgtaccacactgaggagcgcggccagccctgctcgcagaattaccgcctcttctttaagaatgtaactggtcactacatttccccctttcatgatattcctctgaaggtgaactctaaagagattctttcttgtggagaagttattcatgtgaagatccttggaattttggctcttattgatgaaggtgaaacagattggaaattaattgctatcaatgcgaatgatcctgaagcctcaaagtttcatgatattgatgatgttaagaagttcaaaccgggttacctggaagctactcttaattggtttagattatataaggtaccagatggaaaaccagaaaaccagtttgcttttaatggagaattcaaaaacaaggcttttgctcttgaagttattaaatccactcatcaatgttggaaagcattgcttatgaagaagtgtaatggaggagctataaattgcacaaacgtgcagatatctgatagccctttccgttgcactcaagaggaagcaagatcattagttgaatcggtatcatcttcaccaaataaagaaagtaatgaagaagagcaagtgtggcacttccttggcaagtgattgaaacatctgaaattctgctgtcaagattcccatctctaaggactccaagtgctagagacaagggggtctatgagcatttactgacttcctgttaaaacttcattttttcaaactttttgagctatgcaatatataaataaacagtaagaattttaaa

SEQ ID NO: 172703 - DNA, 596 bp, Homo sapiens
  Payload ID: 13953
  Gene Symbol: PPA2
  Gene Name: pyrophosphatase (inorganic) 2
  ENST ID: ENST00000504028
  CDS Start-End: 10-596
attgacgccatgagcgcgctgctgcggctgctgcgcacgggtgccccagccgctgcgtgcctgcggttggggaccagtgcagggaccgggtcgcgccgtgctatggccctgtaccacactgaggagcgcggccagccctgctcgcagaattaccgcctcttctttaagaatgtaactggtcactacatttccccctttcatgatattcctctgaaggaaaatggcattcctatgaagaaagcacgaaatgatgaatatgagaatctgtttaatatgattgtagaaatacctcggtggacaaatgctaaaatggagattgccaccaaggagccaatgaatcccattaaacaatatgtaaaggatggaaagctacgctatgtggcgaatatcttcccttacaagggttatatatggaattatggtaccctccctcagacttgggaagatccccatgaaaaagataagagcacgaactgctttggagataatgatcctattgatgtttgcgaaataggctcaaagattctttcttgtggagaagttattcatgtgaagatccttggaattttggctcttattgatgaaggtgaaacaga

SEQ ID NO: 172704 - DNA, 839 bp, Homo sapiens
  Payload ID: 13953
  Gene Symbol: PPA2
  Gene Name: pyrophosphatase (inorganic) 2
  ENST ID: ENST00000506815
  CDS Start-End: 1-129
accagtgcagggaccgggtcgcgccgtgctatggccctgtaccacactgaggagcgcggccagccctgctcgcagaattaccgcctcttctttagaaaatggcattcctatgaagaaagcacgaaatgatgaatatgagaatctgtttaatatgattgtagaaatacctcggtggacaaatgctaaaatggagattgccaccaaggagccaatgaatcccattaaacaatatgtaaaggatggaaagctacgctatgtggcgaatatcttcccttacaagggttatatatggaattatggtaccctccctcagacttgggaagatccccatgaaaaagataagagcacgaactgctttggagataatgatcctattgatgtttgcgaaataggctcaaagattctttcttgtggagaagttattcatgtgaagatccttggaattttggctcttattgatgaaggtgaaacagattggaaattaattgctatcaatgcgaatgatcctgaagcctcaaagtttcatggtctcagaaatattccagtatatacaataaatcgcatagtcatcctgccttcacttgacaggagccaaacttccagcctgtcctacctgcctgcacatcaggattcctgtgtgcccctggatgcagccctacatgttgttttgtatttttgttccctcttgggtctacaaagttacttatcttgtttttgagtctttttgatgttaatctgtttataaggtatctattttaggtaggttagcctgagggagtacattgaaacacgaatttagtgcccctcctgtcaaaaggtctctgttttttccgaagcag

SEQ ID NO: 172705 - DNA, 571 bp, Homo sapiens
  Payload ID: 13953
  Gene Symbol: PPA2
  Gene Name: pyrophosphatase (inorganic) 2
  ENST ID: ENST00000513649
  CDS Start-End: 10-351
attgacgccatgagcgcgctgctgcggctgctgcgcacgggtgccccagccgctgcgtgcctgcggttggggaccagtgcagggaccgggtcgcgccgtgctatggccctgtaccacactgaggagcgcggccagccctgctcgcagaattaccgcctcttctttaagaatgtaactggtcactacatttccccctttcatgatattcctctgaaggtgaactctaaagaggaaaatggcattcctatgaagaaagcacgaaatgatgaatatgagaatctgtttaatatgattgtagaaatacctcggtggacaaatgctaaaatggaggttttaaagatagcaatgtgaatatacatgatagaaaactaactttgaggccgagtgcagtggctaacacctgtaatcccagcccattgagaaaccaagattgccaccaaggagccaatgaatcccattaaacaatatgtaaaggatggaaagctacgctatgtggcgaatatcttcccttacaagggttatatatggaattatggtaccctccctcagacttgggaagatccccatgaaa

SEQ ID NO: 172706 - DNA, 582 bp, Homo sapiens
  Payload ID: 13953
  Gene Symbol: PPA2
  Gene Name: pyrophosphatase (inorganic) 2
  ENST ID: ENST00000510015
  CDS Start-End: 10-582
attgacgccatgagcgcgctgctgcggctgctgcgcacgggtgccccagccgctgcgtgcctgcggttggggaccagtgcagggaccgggtcgcgccgtgctatggccctgtaccacactgaggagcgcggccagccctgctcgcagaattaccgcctcttctttaagaatgtaactggtcactacatttccccctttcatgatattcctctgaaggtgaactctaaagagacttgggaagatccccatgaaaaagataagagcacgaactgctttggagataatgatcctattgatgtttgcgaaataggctcaaagattctttcttgtggagaagttattcatgtgaagatccttggaattttggctcttattgatgaaggtgaaacagattggaaattaattgctatcaatgcgaatgatcctgaagcctcaaagtttcatgatattgatgatgttaagaagttcaaaccgggttacctggaagctactcttaattggtttagattatataaggtaccagatggaaaaccagaaaaccagtttgcttttaatggagaattcaaaaacaaggcttttgct

SEQ ID NO: 172707 - DNA, 1177 bp, Homo sapiens
  Payload ID: 13953
  Gene Symbol: PPA2
  Gene Name: pyrophosphatase (inorganic) 2
  ENST ID: ENST00000509031
  CDS Start-End: 58-249
ccagccgctgcgtgcctgcggttggggaccagtgcagggaccgggtcgcgccgtgctatggccctgtaccacactgaggagcgcggccagccctgctcgcagaattaccgcctcttctttaagaatgtaactggtcactacatttccccctttcatgatattcctctgaaggtgaactctaaagaggacactgaggctcaaggcatttttatagacttgtctaagatctggaaaatggcattcctatgaagaaagcacgaaatgatgaatatgagaatctgtttaatatgattgtagaaatacctcggtggacaaatgctaaaatggagattgccaccaaggagccaatgaatcccattaaacaatatgtaaaggatggaaagctacgctatgtggcgaatatcttcccttacaagggttatatatggaattatggtaccctccctcagacttgggaagatccccatgaaaaagataagagcacgaactgctttggagataatgatcctattgatgtttgcgaaataggctcaaagattctttcttgtggagaagttattcatgtgaagatccttggaattttggctcttattgatgaaggtgaaacagattggaaattaattgctatcaatgcgaatgatcctgaagcctcaaagtttcatgatattgatgatgttaagaagttcaaaccgggttacctggaagctactcttaattggtttagattatataaggtaccagatggaaaaccagaaaaccagtttgcttttaatggagaattcaaaaacaaggcttttgctcttgaagttattaaatccactcatcaatgttggaaagcattgcttatgaagaagtgtaatggaggagctataaattgcacaaacgtgcagatatctgatagccctttccgttgcactcaagaggaagcaagatcattagttgaatcggtatcatcttcaccaaataaagaaagtaatgaagaagagcaagtgtggcacttccttggcaagtgattgaaacatctgaaattctgctgtcaagattcccatctctaaggactccaagtgctagagacaagggggtctatgagcatttactgacttcctgttaaaacttcattttttcaaactttttgagctatgcaatatataaataaacagtaagaattttaaattac

SEQ ID NO: 172708 - DNA, 677 bp, Homo sapiens
  Payload ID: 13953
  Gene Symbol: PPA2
  Gene Name: pyrophosphatase (inorganic) 2
  ENST ID: ENST00000508518
  CDS Start-End: 1-677
tgctgcggctgctgcgcacgggtgccccagccgctgcgtgcctgcggttggggaccagtgcagggaccgggtcgcgccgtgctatggccctgtaccacactgaggagcgcggccagccctgctcgcagaattaccgcctcttctttaagaatgtaactggtcactacatttccccctttcatgatattcctctgaaggtgaactctaaagaggaaaatggcattcctatgaagaaagcacgaaatgatgaatatgagattgccaccaaggagccaatgaatcccattaaacaatatgtaaaggatggaaagctacgctatgtggcgaatatcttcccttacaagggttatatatggaattatggtaccctccctcagacttgggaagatccccatgaaaaagataagagcacgaactgctttggagataatgatcctattgatgtttgcgaaataggctcaaagattctttcttgtggagaagttattcatgtgaagatccttggaattttggctcttattgatgaaggtgaaacagattggaaattaattgctatcaatgcgaatgatcctgaagcctcaaagtttcatgatattgatgatgttaagaagttcaaaccgggttacctggaagctactcttaattggtttagattatataaggtaccagatggaaaa

SEQ ID NO: 172709 - DNA, 481 bp, Homo sapiens
  Payload ID: 13953
  Gene Symbol: PPA2
  Gene Name: pyrophosphatase (inorganic) 2
  ENST ID: ENST00000514209
  CDS Start-End: 10-177
attgacgccatgagcgcgctgctgcggctgctgcgcacgggtgccccagccgctgcgtgcctgcggttggggaccagtgcagggaccgggtcgcgccgtgctatggccctgtaccacactgaggagcgcggccagccctgctcgcagaattaccgcctcttctttaaatctgtttaatatgattgtagaaatacctcggtggacaaatgctaaaatggagattgccaccaaggagccaatgaatcccattaaacaatatgtaaaggatggaaagctacgctatgtggcgaatatcttcccttacaagggttatatatggaattatggtaccctccctcagattctttcttgtggagaagttattcatgtgaagatccttggaattttggctcttattgatgaaggtgaaacagattggaaattaattgctatcaatgcgaatgatcctgaagcctcaaagtttcatgatattgatgatgtt

SEQ ID NO: 172710 - DNA, 714 bp, Homo sapiens
  Payload ID: 13953
  Gene Symbol: PPA2
  Gene Name: pyrophosphatase (inorganic) 2
  ENST ID: ENST00000502596
  CDS Start-End: 451-714
agcgaggaggcggcggatcaagaccccaaagcggagagcagaggcgcagggctgccggctggggggtagatagcgccctgtgccctgccagccgccctccccgaggggtaggcagagtgcaagcggccaccccgcggcggcctgcagccattagccggcccggccgccgttcccggttcacacaactcagtgaggaagggaaggcagagcccgcccacacgccggccttcctagaggcgtaagaaacctcctactgcgggagctccctgacgtcggagaggcaggcggaactttgcggatgcctaatccagcgcgtcttctttttttggagggactctgatgaaggttctttccccagaagcttgacttgagaatgtaactggtcactacatttccccctttcatgatattcctctgaaggtgaactctaaagaggaaaatggcattcctatgaagaaagcacgaaatgatgaatatgagaatctgtttaatatgattgtagaaatacctcggtggacaaatgctaaaatggagattgccaccaaggagccaatgaatcccattaaacaatatgtaaaggatggaaagctacgctatgtggcgaatatcttcccttacaagggttatatatggaattatggtaccctccctcagacttgggaagatccccatgaaaaagataagagcacgaactgctttggagataatgatcct

SEQ ID NO: 172711 - DNA, 368 bp, Homo sapiens
  Payload ID: 13953
  Gene Symbol: PPA2
  Gene Name: pyrophosphatase (inorganic) 2
  ENST ID: ENST00000515567
  CDS Start-End: 1-208
gtggacaaatgctaaaatggagattgccaccaaggagccaatgaatcccattaaacaatatgtaaaggatggaaagctacgctatgtggcgaatatcttcccttacaagggttatatatggaattatggtaccctccctcaggtatcatcttcaccaaataaagaaagtaatgaagaagagcaagtgtggcacttccttggcaagtgattgaaacatctgaaattctgctgtcaagattcccatctctaaggactccaagtgctagagacaagggggtctatgagcatttactgacttcctgttaaaacttcattttttcaaactttttgagctatgcaatatataaataaacagtaagaattttaaa

SEQ ID NO: 172712 - DNA, 1855 bp, Homo sapiens
  Payload ID: 13954
  Gene Symbol: PYCR1
  Gene Name: pyrroline-5-carboxylate reductase 1
  Uniprot ID: P32322
  ENST ID: ENST00000329875
  CDS Start-End: 66-1025
gccggtctcgtcccgcagagccggtgccatctgtgggggctttgggccaggggtctccggacagcatgagcgtgggcttcatcggcgctggccagctggcttttgccctggccaagggcttcacagcagcaggcgtcttggctgcccacaagataatggctagctccccagacatggacctggccacagtttctgctctcaggaagatgggggtgaagttgacaccccacaacaaggagacggtgcagcacagtgatgtgctcttcctggctgtgaagccacacatcatccccttcatcctggatgaaataggcgccgacattgaggacagacacattgtggtgtcctgcgcggccggcgtcaccatcagctccattgagaagaagctgtcagcgtttcggccagcccccagggtcatccgctgcatgaccaacactccagtcgtggtgcgggagggggccaccgtgtatgccacaggcacgcacgcccaggtggaggacgggaggctcatggagcagctgctgagcagcgtgggcttctgcacggaggtggaagaggacctgattgatgccgtcacggggctcagtggcagcggccccgcctacgcattcacagccctggatgccctggctgatgggggtgtgaagatgggacttccaaggcgcctggcagtccgcctcggggcccaggccctcctgggggctgccaagatgctgctgcactcagaacagcacccaggccagctcaaggacaacgtcagctctcctggtggggccaccatccatgccttgcatgtgctggagagtgggggcttccgctccctgctcatcaacgctgtggaggcctcctgcatccgcacacgggagctgcagtccatggctgaccaggagcaggtgtcaccagccgccatcaagaagaccatcctggacaaggtgaagctggactcccctgcagggaccgctctgtcaccttctggccacaccaagctgctcccccgcagcctggccccagcgggcaaggattgacacgtcctgcctgaccaccatcctgccaccaccttctcttctcttgtcactagggggactagggggtccccaaagtggcccactttctgtggctctgatcagcgcaggggccagccagggacatagccagggaggggccacatcacttcccactggaaatctctgtggtctgcaagtgcttcccagcccagaacaggggtggattccccaacctcaacctcctttcttctctgctcccaaaccatgtcaggaccaccttcctctagagctcgggagcccggagggtcttcacccactcctactccagtatcagctggcacgggctccttcctgagagcaaaggtcaaggaccccctctgtgaaggctcagcagaggtgggatcccacgccccctcccggcccctccctgccctccattcagggagaaacctctccttcccgtgtgagaagggccagagggtccaggcatcccaagtccagcgtgaagggccacagcccctcttggctgccaagcacgcagatcccatggacatttggggaaagggctccttgggctgctggtgaacttctgtggccaccacctcctgctcctgacctccctgggagggtgctatcagttctgtcctggccctttcagttttataagttggtttccagcccccagtgtcctgacttctgtctgccacatgaggagggaggccctgcctgtgtgggagggtggttactgtgggtggaatagtggaggccttcaactgattagacaaggcccgcccacatcttggagggcatctgccttactgattaaaatgtcaatgtaatctaatgcaaaa

SEQ ID NO: 172713 - DNA, 1890 bp, Homo sapiens
  Payload ID: 13954
  Gene Symbol: PYCR1
  Gene Name: pyrroline-5-carboxylate reductase 1
  Uniprot ID: P32322
  ENST ID: ENST00000337943
  CDS Start-End: 444-1394
gtacgacccgcgcacggtagctgggttggggtcgggctccgggaatggtgggcggcggtcgccgggtggggcgcgacggtagcccagttctgggcggggtgggaacccagacgggggacccctaggcgccgggccctccctctccccgtacttttcccccttcccagtcatttcttctgcggaacctccacccctccagtgggtgcgggaccctaggcagcaggccaggcaccgccgctctgactgggggccccgaagcagttaacgggccggacagcaaagtggaaagttagaccagctgggaccaggggaggtgggcacccggctgcgggaggagcggccaggctggcactgcccccctaacttgctctcgatcctgccggtctcgtcccgcagagccggtgccatctgtgggggctttgggccaggggtctccggacagcatgagcgtgggcttcatcggcgctggccagctggcttttgccctggccaagggcttcacagcagcaggcgtcttggctgcccacaagataatggctagctccccagacatggacctggccacagtttctgctctcaggaagatgggggtgaagttgacaccccacaacaaggagacggtgcagcacagtgatgtgctcttcctggctgtgaagccacacatcatccccttcatcctggatgaaataggcgccgacattgaggacagacacattgtggtgtcctgcgcggccggcgtcaccatcagctccattgagaagaagctgtcagcgtttcggccagcccccagggtcatccgctgcatgaccaacactccagtcgtggtgcgggagggggccaccgtgtatgccacaggcacgcacgcccaggtggaggacgggaggctcatggagcagctgctgagcagcgtgggcttctgcacggaggtggaagaggacctgattgatgccgtcacggggctcagtggcagcggccccgcctacgcattcacagccctggatgccctggctgatgggggtgtgaagatgggacttccaaggcgcctggcagtccgcctcggggcccaggccctcctgggggctgccaagatgctgctgcactcagaacagcacccaggccagctcaaggacaacgtcagctctcctggtggggccaccatccatgccttgcatgtgctggagagtgggggcttccgctccctgctcatcaacgctgtggaggcctcctgcatccgcacacgggagctgcagtccatggctgaccaggagcaggtgtcaccagccgccatcaagaagaccatcctggacaaggaccaccttcctctagagctcgggagcccggagggtcttcacccactcctactccagtatcagctggcacgggctccttcctgagagcaaaggtcaaggaccccctctgtgaaggctcagcagaggtgggatcccacgccccctcccggcccctccctgccctccattcagggagaaacctctccttcccgtgtgagaagggccagagggtccaggcatcccaagtccagcgtgaagggccacagcccctcttggctgccaagcacgcagatcccatggacatttggggaaagggctccttgggctgctggtgaacttctgtggccaccacctcctgctcctgacctccctgggagggtgctatcagttctgtcctggccctttcagttttataagttggtttccagcccccagtgtcctgacttctgtctgccacatgaggagggaggccctgcctgtgtgggagggtggttactgtgggtggaatagtggaggccttcaactgattagacaaggcccgcccacatcttggagggcatctgccttactgattaaaatgtcaatgtaatctaatgcaaaa

SEQ ID NO: 172714 - DNA, 1346 bp, Homo sapiens
  Payload ID: 13954
  Gene Symbol: PYCR1
  Gene Name: pyrroline-5-carboxylate reductase 1
  Uniprot ID: P32322
  ENST ID: ENST00000402252
  CDS Start-End: 27-1067
agctgggttggggtcgggctccgggaatggtgggcggcggtcgccgggtggggcgcgacgagccggtgccatctgtgggggctttgggccaggggtctccggacagcatgagcgtgggcttcatcggcgctggccagctggcttttgccctggccaagggcttcacagcagcaggcgtcttggctgcccacaagataatggctagctccccagacatggacctggccacagtttctgctctcaggaagatgggggtgaagttgacaccccacaacaaggagacggtgcagcacagtgatgtgctcttcctggctgtgaagccacacatcatccccttcatcctggatgaaataggcgccgacattgaggacagacacattgtggtgtcctgcgcggccggcgtcaccatcagctccattgagaagaagctgtcagcgtttcggccagcccccagggtcatccgctgcatgaccaacactccagtcgtggtgcgggagggggccaccgtgtatgccacaggcacgcacgcccaggtggaggacgggaggctcatggagcagctgctgagcagcgtgggcttctgcacggaggtggaagaggacctgattgatgccgtcacggggctcagtggcagcggccccgcctacgcattcacagccctggatgccctggctgatgggggtgtgaagatgggacttccaaggcgcctggcagtccgcctcggggcccaggccctcctgggggctgccaagatgctgctgcactcagaacagcacccaggccagctcaaggacaacgtcagctctcctggtggggccaccatccatgccttgcatgtgctggagagtgggggcttccgctccctgctcatcaacgctgtggaggcctcctgcatccgcacacgggagctgcagtccatggctgaccaggagcaggtgtcaccagccgccatcaagaagaccatcctggacaaggtgaagctggactcccctgcagggaccgctctgtcaccttctggccacaccaagctgctcccccgcagcctggccccagcgggcaaggattgacacgtcctgcctgaccaccatcctgccaccaccttctcttctcttgtcactagggggactagggggtccccaaagtggcccactttctgtggctctgatcagcgcaggggccagccagggacatagccagggaggggccacatcacttcccactggaaatctctgtggtctgcaagtgcttcccagcccagaacaggggtggattccccaacctcaacctcctttcttctctgctcccaaaccatgtcaggaccaccttcctctagagctcgggagccc

SEQ ID NO: 172715 - DNA, 1811 bp, Homo sapiens
  Payload ID: 13954
  Gene Symbol: PYCR1
  Gene Name: pyrroline-5-carboxylate reductase 1
  ENST ID: ENST00000403172
  CDS Start-End: 115-981
ggattcgctggcgcgacgggggcggggcctgggtgcgggtgccgcgtggcggccgcagcgctgagggagccggtgccatctgtgggggctttgggccaggggtctccggacagcatgagcgtgggcttcatcggcgctggccagctggcttttgccctggccaagggcttcacagcagcaggcgtcttggctgcccacaagataatggctagctccccagacatggacctggccacagtttctgctctcaggaagatgggggtgaagttgacaccccacaacaaggagacggtgcagcacagtgatgtgctcttcctggctgtgaagccacacatcatccccttcatcctggatgaaataggcgccgacattgaggacagacacattgtggtgtcctgcgcggccggcgtcaccatcagctccattgagaagaagctgtcagcgtttcggccagcccccagggtcatccgctgcatgaccaacactccagtcgtggtgcgggagggggccaccgtgtatgccacaggcacgcacgcccaggtggaggacgggaggctcatggagcagctgctgagcagcgtgggcttctgcacggaggtggaagaggacctgattgatgccgtcacggggctcagtggcagcggccccgcctacggggctgccaagatgctgctgcactcagaacagcacccaggccagctcaaggacaacgtcagctctcctggtggggccaccatccatgccttgcatgtgctggagagtgggggcttccgctccctgctcatcaacgctgtggaggcctcctgcatccgcacacgggagctgcagtccatggctgaccaggagcaggtgtcaccagccgccatcaagaagaccatcctggacaaggtgaagctggactcccctgcagggaccgctctgtcaccttctggccacaccaagctgctcccccgcagcctggccccagcgggcaaggattgacacgtcctgcctgaccaccatcctgccaccaccttctcttctcttgtcactagggggactagggggtccccaaagtggcccactttctgtggctctgatcagcgcaggggccagccagggacatagccagggaggggccacatcacttcccactggaaatctctgtggtctgcaagtgcttcccagcccagaacaggggtggattccccaacctcaacctcctttcttctctgctcccaaaccatgtcaggaccaccttcctctagagctcgggagcccggagggtcttcacccactcctactccagtatcagctggcacgggctccttcctgagagcaaaggtcaaggaccccctctgtgaaggctcagcagaggtgggatcccacgccccctcccggcccctccctgccctccattcagggagaaacctctccttcccgtgtgagaagggccagagggtccaggcatcccaagtccagcgtgaagggccacagcccctcttggctgccaagcacgcagatcccatggacatttggggaaagggctccttgggctgctggtgaacttctgtggccaccacctcctgctcctgacctccctgggagggtgctatcagttctgtcctggccctttcagttttataagttggtttccagcccccagtgtcctgacttctgtctgccacatgaggagggaggccctgcctgtgtgggagggtggttactgtgggtggaatagtggaggccttcaactgattagacaaggcccgcccacatcttggagggcatctgccttactgattaaaatgtcaatgtaatctaatgcaaaa

SEQ ID NO: 172716 - DNA, 841 bp, Homo sapiens
  Payload ID: 13954
  Gene Symbol: PYCR1
  Gene Name: pyrroline-5-carboxylate reductase 1
  ENST ID: ENST00000405481
  CDS Start-End: 83-841
gtgcgggtgccgcgtggcggccgcagcgctgagggagccggtgccatctgtgggggctttgggccaggggtctccggacagcatgagcgtgggcttcatcggcgctggccagctggcttttgccctggccaagggcttcacagcagcaggcgtcttggctgcccacaagataatggctagctccccagacatggacctggccacagtttctgctctcaggaagatgggggtgaagttgacaccccacaacaaggagacggtgcagcacagtgatgtgctcttcctggctgtgaagccacacatcatccccttcatcctggatgaaataggcgccgacattgaggacagacacattgtggtgtcctgcgcggccggcgtcaccatcagctccattgagaagaagctgtcagcgtttcggccagcccccagggtcatccgctgcatgaccaacactccagtcgtggtgcgggagggggccaccgtgtatgccacaggcacgcacgcccaggtggaggacgggaggctcatggagcagctgctgagcagcgtgggcttctgcacggaggtggaagaggacctgattgatgccgtcacggggctcagtggcagcggccccgcctacgcattcacagccctggatgccctggctgatgggggtgtgaagatgggacttccaaggcgcctggcagtccgcctcggggcccaggccctcctgggggctgccaagatgctgctgcactcagaacagcacccaggccagctcaaggacaacgtcagctctcctggtggggccaccatccatgccttgcatgtgctggagagtgggggcttccgctccctg

SEQ ID NO: 172717 - DNA, 681 bp, Homo sapiens
  Payload ID: 13954
  Gene Symbol: PYCR1
  Gene Name: pyrroline-5-carboxylate reductase 1
  ENST ID: ENST00000579366
  CDS Start-End: 354-681
gggcctgggctgcccctttgaccggctggtggtggtgtacaccttcctggctgtgctcctgtacctcagcgccgccgtgatctggccagtcttctgtttcgatcccaagtacggtgagcccaaacggccccccaactgtgctcggggcagctgtccctgggacagccagctggtggtggccatcttcacctacgtcaacctgctcctgtacgtcgttgacctcgcctactcccagaggattcgcttcgtgcccagcctgtagcccacagtggcagcccacccacctctgctctctggccaccagctccaggctctgcgagggaaactcaggcgtcttggctgcccacaagataatggctagctccccagacatggacctggccacagtttctgctctcaggaagatgggggtgaagttgacaccccacaacaaggagacggtgcagcacagtgatgtgctcttcctggctgtgaagccacacatcatccccttcatcctggatgaaataggcgccgacattgaggacagacacattgtggtgtcctgcgcggccggcgtcaccatcagctccattgagaagaagctgtcagcgtttcggccagcccccagggtcatccgctgcatgaccaacactccagtcgtggtgcgggagggggccaccgtgtatgccacaggcacgc

SEQ ID NO: 172718 - DNA, 578 bp, Homo sapiens
  Payload ID: 13954
  Gene Symbol: PYCR1
  Gene Name: pyrroline-5-carboxylate reductase 1
  ENST ID: ENST00000585244
  CDS Start-End: 327-578
gcgcacggtagctgggttggggtcgggctccgggaatggtgggcggcggtcgccgggtggggcgcgacggtagcccagttctgggcggggtgggaacccagacgggggacccctaggcgccgggccctccctctccccgtacttttcccccttcccagtcatttcttctgcggaacctccacccctccagtgggtgcgggaccctaggcagcaggccaggcaccgccgctctgactgggggccccgaagcagttaacgggccggacagcaaagtggaaaagccggtgccatctgtgggggctttgggccaggggtctccggacagcatgagcgtgggcttcatcggcgctggccagctggcttttgccctggccaagggcttcacagcagcaggcgtcttggctgcccacaagataatggctagctccccagacatggacctggccacagtttctgctctcaggaagatgggggtgaagttgacaccccacaacaaggagacggtgcagcacagtgatgtgctcttcctggctgtgaagccacacatcatccccttcatcctggatgaaataggcgcc

SEQ ID NO: 172719 - DNA, 377 bp, Homo sapiens
  Payload ID: 13954
  Gene Symbol: PYCR1
  Gene Name: pyrroline-5-carboxylate reductase 1
  ENST ID: ENST00000583564
  CDS Start-End: 95-377
agctgggttggggtcgggctccgggaatggtgggcggcggtcgccggagccggtgccatctgtgggggctttgggccaggggtctccggacagcatgagcgtgggcttcatcggcgctggccagctggcttttgccctggccaagggcttcacagcagcaggcgtcttggctgcccacaagataatggctagctccccagacatggacctggccacagtttctgctctcaggaagatgggggtgaagttgacaccccacaacaaggagacggtgcagcacagtgatgtgctcttcctggctgtgaagccacacatcatccccttcatcctggatgaaataggcgccgacattgaggacagacacattgtggtgtcct

SEQ ID NO: 172720 - DNA, 868 bp, Homo sapiens
  Payload ID: 13954
  Gene Symbol: PYCR1
  Gene Name: pyrroline-5-carboxylate reductase 1
  ENST ID: ENST00000582198
  CDS Start-End: 141-868
ggccacggtctccatgctctgctcctctggccgcagcagaaccctgtgaaccccaggcaatgacagcaggatcctgaagcccatgcaggctctgaaccacgcggccatccagaaggggcgtcttggctgcccacaagataatggctagctccccagacatggacctggccacagtttctgctctcaggaagatgggggtgaagttgacaccccacaacaaggagacggtgcagcacagtgatgtgctcttcctggctgtgaagccacacatcatccccttcatcctggatgaaataggcgccgacattgaggacagacacattgtggtgtcctgcgcggccggcgtcaccatcagctccattgagaagaagctgtcagcgtttcggccagcccccagggtcatccgctgcatgaccaacactccagtcgtggtgcgggagggggccaccgtgtatgccacaggcacgcacgcccaggtggaggacgggaggctcatggagcagctgctgagcagcgtgggcttctgcacggaggtggaagaggacctgattgatgccgtcacggggctcagtggcagcggccccgcctacgcattcacagccctggatgccctggctgatgggggtgtgaagatgggacttccaaggcgcctggcagtccgcctcggggcccaggccctcctgggggctgccaagatgctgctgcactcagaacagcacccaggccagctcaaggacaacgtcagctctcctggtggggccaccatccatgccttgcatgtgctggagagtgggggcttccgctccctgctcatcaacgctgtggaggcctcctgcatccgcacacgggagctgcagtccatggctga

SEQ ID NO: 172721 - DNA, 949 bp, Homo sapiens
  Payload ID: 13954
  Gene Symbol: PYCR1
  Gene Name: pyrroline-5-carboxylate reductase 1
  ENST ID: ENST00000584848
  CDS Start-End: 1-522
gccctggccaagggcttcacagcagcaggcgtcttggctgcccacaagataatggctagctccccagacatggacctggccacagtttctgctctcaggaagatgggggtgaagttgacaccccacaacaaggagacggtgcagcacagtgatgtgctcttcctggctgtgaagccacacatcatccccttcatcctggatgaaataggcgccgacattgaggacagacacattgtggtgtcctgcgcggccggcgtcaccatcagctccattgagaagaagctgtcagcgtttcggccagcccccagggtcatccgctgcatgaccaacactccagtcgtggtgcgggagggggccaccgtgtatgccacaggcacgcacgcccaggtggaggacgggaggctcatggagcagctgctgagcagcgtgggcttctgcacggaggtggaagaggacctgattgatgccgtcacggggctcagtggcagcggccccgcctacggagctgcagtccatggctgaccaggagcaggtgtcaccagccgccatcaagaagaccatcctggacaaggtgaagctggactcccctgcagggaccgctctgtcaccttctggccacaccaagctgctcccccgcagcctggccccagcgggcaaggattgacacgtcctgcctgaccaccatcctgccaccaccttctcttctcttgtcactagggggactagggggtccccaaagtggcccactttctgtggctctgatcagcgcaggggccagccagggacatagccagggaggggccacatcacttcccactggaaatctctgtggtctgcaagtgcttcccagcccagaacaggggtggattccccaacctcaacctcctttcttctctgctcccaaaccatgtcaggaccaccttcctctagagctcgggagcccggaggg

SEQ ID NO: 172722 - DNA, 767 bp, Homo sapiens
  Payload ID: 13954
  Gene Symbol: PYCR1
  Gene Name: pyrroline-5-carboxylate reductase 1
  ENST ID: ENST00000585215
  CDS Start-End: 91-767
ctgggtgcgggtgccgcgtggcggccgcagcgctgaggggtggagccggtgccatctgtgggggctttgggccaggggtctccggacagcatgagcgtgggcttcatcggcgctggccagctggcttttgccctggccaagggcttcacagcagcaggcgtcttggctgcccacaagataatggctagctccccagacatggacctggccacagtttctgctctcaggaagatgggggtgaagttgacaccccacaacaaggagacggtgcagcacagtgatgtgctcttcctggctgtgaagccacacatcatccccttcatcctggatgaaataggcgccgacattgaggacagacacattgtggtgtcctgcgcggccggcgtcaccatcagctccattgagaagaagctgtcagcgtttcggccagcccccagggtcatccgctgcatgaccaacactccagtcgtggtgcgggagggggccaccgtgtatgccacaggcacgcacgcccaggtggaggacgggaggctcatggagcagctgctgagcagcgtgggcttctgcacggaggtggaagaggacctgattgatgccgtcacggggctcagtggcagcggccccgcctacgcattcacagccctggatgccctggctgatgggggtgtgaagatgggacttccaaggcgcctggcagtccgcctcggggcccaggccctcctgggggctgccaagatgctgctgcactcagaacagcacccaggcca

SEQ ID NO: 172723 - DNA, 1144 bp, Homo sapiens
  Payload ID: 13954
  Gene Symbol: PYCR1
  Gene Name: pyrroline-5-carboxylate reductase 1
  ENST ID: ENST00000577756
  CDS Start-End: 56-709
tcccgcagagccggtgccatctgtgggggctttgggccaggggtctccggacagcatgagcgtgggcttcatcggcgctggccagctggcttttgccctggccaagggcttcacagcagcaggcgtcttggctgcccacaagataatggctagctccccagacatggacctggccacagtttctgctctcaggaagatgggggtgaagttgacaccccacaacaaggagacggtgcagcacagtgatgtgctcttcctggctgtgaagccacacatcatccccttcatcctggatgaaataggcgccgacattgaggacagacacattgtggtgtcctgcgcggccggcgtcaccatcagctccattgagaagaagctgtcagcgtttcggccagcccccagggtcatccgctgcatgaccaacactccagtcgtggtgcgggagggggccaccgtgtatgccacaggcacgcacgcccaggtggaggacgggaggctcatggagcagctgctgagcagcgtgggcttctgcacggaggtggaagaggacctgattgatgccgtcacggggctcagtggcagcggccccgcctacgcattcacagccctggatgccctggctgatgggggtgtgaagatgggacttccaaggcgcctggcagtccgcctcggggcccaggccctcctgggagctgcagtccatggctgaccaggagcaggtgtcaccagccgccatcaagaagaccatcctggacaaggtgaagctggactcccctgcagggaccgctctgtcaccttctggccacaccaagctgctcccccgcagcctggccccagcgggcaaggattgacacgtcctgcctgaccaccatcctgccaccaccttctcttctcttgtcactagggggactagggggtccccaaagtggcccactttctgtggctctgatcagcgcaggggccagccagggacatagccagggaggggccacatcacttcccactggaaatctctgtggtctgcaagtgcttcccagcccagaacaggggtggattccccaacctcaacctcctttcttctctgctcccaaaccatgtcaggaccaccttcctctagagctcgggagcccggagggtcttcacc

SEQ ID NO: 172724 - DNA, 572 bp, Homo sapiens
  Payload ID: 13954
  Gene Symbol: PYCR1
  Gene Name: pyrroline-5-carboxylate reductase 1
  ENST ID: ENST00000579698
  CDS Start-End: 78-572
gtacgacccgcgcacggtagctgggttgggagccggtgccatctgtgggggctttgggccaggggtctccggacagcatgagcgtgggcttcatcggcgctggccagctggcttttgccctggccaagggcttcacagcagcaggcgtcttggctgcccacaagataatggctagctccccagacatggacctggccacagtttctgctctcaggaagatgggggtgaagttgacaccccacaacaaggagacggtgcagcacagtgatgtgctcttcctggctgtgaagccacacatcatccccttcatcctggatgaaataggcgccgacattgaggacagacacattgtggtgtcctgcgcggccggcgtcaccatcagctccattgagaagaagctgtcagcgtttcggccagcccccagggtcatccgctgcatgaccaacactccagtcgtggtgcgggagggggccaccgtgtatgccacaggcacgcacgcccaggtggaggacgggaggctcatggagcagctgctgagcagcgtgggcttctgcacggaggtggaagaggac

SEQ ID NO: 172725 - DNA, 510 bp, Homo sapiens
  Payload ID: 13954
  Gene Symbol: PYCR1
  Gene Name: pyrroline-5-carboxylate reductase 1
  ENST ID: ENST00000577624
  CDS Start-End: 114-510
gattcgctggcgcgacgggggcggggcctgggtgcgggtgccgcgtggcggccgcagcgctgagggagccggtgccatctgtgggggctttgggccaggggtctccggacagcatgagcgtgggcttcatcggcgctggccagctggcttttgccctggccaagggcttcacagcagcaggcgtcttggctgcccacaagataatggctagctccccagacatggacctggccacagtttctgctctcaggctgtcagcgtttcggccagcccccagggtcatccgctgcatgaccaacactccagtcgtggtgcgggagggggccaccgtgtatgccacaggcacgcacgcccaggtggaggacgggaggctcatggagcagctgctgagcagcgtgggcttctgcacggaggtggaagaggacctgattgatgccgtcacggggctcagtggcagcggccccgcctacgcattcacagccctggatgccctggctgatgggggtgtga

SEQ ID NO: 172726 - DNA, 528 bp, Homo sapiens
  Payload ID: 13954
  Gene Symbol: PYCR1
  Gene Name: pyrroline-5-carboxylate reductase 1
  ENST ID: ENST00000581271
  CDS Start-End: 183-528
agagccggccgcgcgcccagggacgccagctggacgcgtccgtgtccgggtggcccaagacaaagccctgcgtggagggcccctcacaggccccaatcgggccgccccctccgcccgcgtcctcggaccccacgtagccggtgccatctgtgggggctttgggccaggggtctccggacagcatgagcgtgggcttcatcggcgctggccagctggcttttgccctggccaagggcttcacagcagcaggcgtcttggctgcccacaagataatggctagctccccagacatggacctggccacagtttctgctctcaggaagatgggggtgaagttgacaccccacaacaaggagacggtgcagcacagtgatgtgctcttcctggctgtgaagccacacatcatccccttcatcctggatgaaataggcgccgacattgaggacagacacattgtggtgtcctgcgcggccggcgtcaccatcagctccattgagaagaagctgtcagcgtttcggccagccccca

SEQ ID NO: 172727 - DNA, 1904 bp, Homo sapiens
  Payload ID: 13954
  Gene Symbol: PYCR1
  Gene Name: pyrroline-5-carboxylate reductase 1
  Uniprot ID: P32322
  ENST ID: ENST00000619204
  CDS Start-End: 115-1074
ggattcgctggcgcgacgggggcggggcctgggtgcgggtgccgcgtggcggccgcagcgctgagggagccggtgccatctgtgggggctttgggccaggggtctccggacagcatgagcgtgggcttcatcggcgctggccagctggcttttgccctggccaagggcttcacagcagcaggcgtcttggctgcccacaagataatggctagctccccagacatggacctggccacagtttctgctctcaggaagatgggggtgaagttgacaccccacaacaaggagacggtgcagcacagtgatgtgctcttcctggctgtgaagccacacatcatccccttcatcctggatgaaataggcgccgacattgaggacagacacattgtggtgtcctgcgcggccggcgtcaccatcagctccattgagaagaagctgtcagcgtttcggccagcccccagggtcatccgctgcatgaccaacactccagtcgtggtgcgggagggggccaccgtgtatgccacaggcacgcacgcccaggtggaggacgggaggctcatggagcagctgctgagcagcgtgggcttctgcacggaggtggaagaggacctgattgatgccgtcacggggctcagtggcagcggccccgcctacgcattcacagccctggatgccctggctgatgggggtgtgaagatgggacttccaaggcgcctggcagtccgcctcggggcccaggccctcctgggggctgccaagatgctgctgcactcagaacagcacccaggccagctcaaggacaacgtcagctctcctggtggggccaccatccatgccttgcatgtgctggagagtgggggcttccgctccctgctcatcaacgctgtggaggcctcctgcatccgcacacgggagctgcagtccatggctgaccaggagcaggtgtcaccagccgccatcaagaagaccatcctggacaaggtgaagctggactcccctgcagggaccgctctgtcaccttctggccacaccaagctgctcccccgcagcctggccccagcgggcaaggattgacacgtcctgcctgaccaccatcctgccaccaccttctcttctcttgtcactagggggactagggggtccccaaagtggcccactttctgtggctctgatcagcgcaggggccagccagggacatagccagggaggggccacatcacttcccactggaaatctctgtggtctgcaagtgcttcccagcccagaacaggggtggattccccaacctcaacctcctttcttctctgctcccaaaccatgtcaggaccaccttcctctagagctcgggagcccggagggtcttcacccactcctactccagtatcagctggcacgggctccttcctgagagcaaaggtcaaggaccccctctgtgaaggctcagcagaggtgggatcccacgccccctcccggcccctccctgccctccattcagggagaaacctctccttcccgtgtgagaagggccagagggtccaggcatcccaagtccagcgtgaagggccacagcccctcttggctgccaagcacgcagatcccatggacatttggggaaagggctccttgggctgctggtgaacttctgtggccaccacctcctgctcctgacctccctgggagggtgctatcagttctgtcctggccctttcagttttataagttggtttccagcccccagtgtcctgacttctgtctgccacatgaggagggaggccctgcctgtgtgggagggtggttactgtgggtggaatagtggaggccttcaactgattagacaaggcccgcccacatcttggagggcatctgccttactgattaaaatgtcaatgtaatctaatgcaaaa

SEQ ID NO: 172728 - DNA, 1740 bp, Homo sapiens
  Payload ID: 13954
  Gene Symbol: PYCR1
  Gene Name: pyrroline-5-carboxylate reductase 1
  ENST ID: ENST00000629768
  CDS Start-End: 115-768
ggattcgctggcgcgacgggggcggggcctgggtgcgggtgccgcgtggcggccgcagcgctgagggagccggtgccatctgtgggggctttgggccaggggtctccggacagcatgagcgtgggcttcatcggcgctggccagctggcttttgccctggccaagggcttcacagcagcaggcgtcttggctgcccacaagataatggctagctccccagacatggacctggccacagtttctgctctcaggaagatgggggtgaagttgacaccccacaacaaggagacggtgcagcacagtgatgtgctcttcctggctgtgaagccacacatcatccccttcatcctggatgaaataggcgccgacattgaggacagacacattgtggtgtcctgcgcggccggcgtcaccatcagctccattgagaagaagctgtcagcgtttcggccagcccccagggtcatccgctgcatgaccaacactccagtcgtggtgcgggagggggccaccgtgtatgccacaggcacgcacgcccaggtggaggacgggaggctcatggagcagctgctgagcagcgtgggcttctgcacggaggtggaagaggacctgattgatgccgtcacggggctcagtggcagcggccccgcctacgcattcacagccctggatgccctggctgatgggggtgtgaagatgggacttccaaggcgcctggcagtccgcctcggggcccaggccctcctgggagctgcagtccatggctgaccaggagcaggtgtcaccagccgccatcaagaagaccatcctggacaaggtgaagctggactcccctgcagggaccgctctgtcaccttctggccacaccaagctgctcccccgcagcctggccccagcgggcaaggattgacacgtcctgcctgaccaccatcctgccaccaccttctcttctcttgtcactagggggactagggggtccccaaagtggcccactttctgtggctctgatcagcgcaggggccagccagggacatagccagggaggggccacatcacttcccactggaaatctctgtggtctgcaagtgcttcccagcccagaacaggggtggattccccaacctcaacctcctttcttctctgctcccaaaccatgtcaggaccaccttcctctagagctcgggagcccggagggtcttcacccactcctactccagtatcagctggcacgggctccttcctgagagcaaaggtcaaggaccccctctgtgaaggctcagcagaggtgggatcccacgccccctcccggcccctccctgccctccattcagggagaaacctctccttcccgtgtgagaagggccagagggtccaggcatcccaagtccagcgtgaagggccacagcccctcttggctgccaagcacgcagatcccatggacatttggggaaagggctccttgggctgctggtgaacttctgtggccaccacctcctgctcctgacctccctgggagggtgctatcagttctgtcctggccctttcagttttataagttggtttccagcccccagtgtcctgacttctgtctgccacatgaggagggaggccctgcctgtgtgggagggtggttactgtgggtggaatagtggaggccttcaactgattagacaaggcccgcccacatcttggagggcatctgccttactgattaaaatgtcaatgtaatctaatgcaaaa

SEQ ID NO: 172729 - DNA, 1689 bp, Homo sapiens
  Payload ID: 13955
  Gene Symbol: PYCR2
  Gene Name: pyrroline-5-carboxylate reductase family, member 2
  Uniprot ID: Q96C36
  ENST ID: ENST00000343818
  CDS Start-End: 150-1112
ggttgcaccatcccagaagctgctgttagctcgccggtcctcggcacgccgcccgttcgcccctgcgctgtccgcccttcccctagcgttacttccggtccctcgctgagggggttcgtgcggctcccaggaggcgtgaaccgcggaccatgagcgtgggcttcatcggggccggccagctggcctatgctctggcgcggggcttcacggccgcaggcatcctgtcggctcacaagataatagccagctccccagaaatgaacctgcccacggtgtccgcgctcaggaagatgggtgtgaacctgacacgcagcaacaaggagacggtgaagcacagcgacgtcctgtttctggctgtgaagccacatatcatccccttcatcctggatgagattggggccgacgtgcaagccagacacatcgtggtctcctgtgcggctggtgtcaccatcagctctgtggagaagaagctgatggcattccagccagcccccaaagtgattcgctgcatgaccaacacacctgtggtagtgcaggaaggcgctacagtgtacgccacgggcacccatgccctggtggaggatgggcagctcctggagcagctcatgagcagcgtgggcttctgcactgaggtggaagaggacctcatcgatgccgtcacggggctcagtggcagcgggcctgcctatgcattcatggctctggacgcattggctgatggtggggtgaagatgggtttgccacggcgcctggcaatccaactcggggcccaggctttgctgggagctgccaagatgctgctggactcggagcagcatccatgccagcttaaggacaatgtctgctcccctgggggagccaccatccacgccctgcactttctagagagtgggggcttccgctctctgctcatcaatgcagttgaggcctcctgtatccgaacacgagagctacagtccatggccgaccaagaaaagatctccccagctgcccttaagaagaccctcttagacagagtgaagctggaatcccccacagtctccacactgaccccctccagcccagggaagctcctcacaagaagcctggccctgggaggcaagaaggactaaggcagcatctgtcccctctgtgattcagagcccttagttgagagcccctgccgcccctgccacccccctgccccgctcccaccattgcccctcctcagctgtgcaaggagaaagcatgcttaggaagttttcaggtccttgtgataaaacctccttaaatctgttcagaccaagcaatgcgagcttcctctcctgtcccatgttggaagttgctctgaaggggtggtagatgctggaagccagacacaaccctgcgtacgctgctcagttggtggagactggggctgggactggagtcagcccagctgggaggaggggctggggaggatctgcagctgaagcccgaggcagggttggtgtgatgccaaggcaaagtggtgaggagaaaacaggaaacgggctttctctgaattggtaaatgggaaagaagtgagcaacttaagattgtcacaattaatcacaagtgtacaggattagactgggtttatatttaactcttgcttcataggtgtaccatttaaagagtgttatttaatgctaagtttaactgctttaataaagtttatttttaaatatc

SEQ ID NO: 172730 - DNA, 1549 bp, Homo sapiens
  Payload ID: 13955
  Gene Symbol: PYCR2
  Gene Name: pyrroline-5-carboxylate reductase family, member 2
  ENST ID: ENST00000612039
  CDS Start-End: 231-971
gattggtcgcccggacggggcggggccacgtggcctaaggcgccatcagccgcccgggagatatccgccgggggagaatagggttgcaccatcccagaagctgctgttagctcgccggtcctcggcacgccgcccgttcgcccctgcgctgtccgcccttcccctagcgttacttccggtccctcgctgagggggttcgtgcggctcccaggaggcgtgaaccgcggaccatgagcgtgggcttcatcggggccggccagctggcctatgctctggcgcggggcttcacggccgcaggcatcctgtcggctcacaagataatagccagctccccagaaatgaacctgcccacggtgtccgcgctcaggaagatgggtgtgaacctgacacgcagcaacaaggagacggtgaagcacagcgacgtcctgtttctggctgtgaagccacatatcatccccttcatcctggatgagattggggccgacgtgcaagccagacacatcgtggtctcctgtgcggctggtgtcaccatcagctctgtggagaaggcattcatggctctggacgcattggctgatggtggggtgaagatgggtttgccacggcgcctggcaatccaactcggggcccaggctttgctgggagctgccaagatgctgctggactcggagcagcatccatgccagcttaaggacaatgtctgctcccctgggggagccaccatccacgccctgcactttctagagagtgggggcttccgctctctgctcatcaatgcagttgaggcctcctgtatccgaacacgagagctacagtccatggccgaccaagaaaagatctccccagctgcccttaagaagaccctcttagacagagtgaagctggaatcccccacagtctccacactgaccccctccagcccagggaagctcctcacaagaagcctggccctgggaggcaagaaggactaaggcagcatctgtcccctctgtgattcagagcccttagttgagagcccctgccgcccctgccacccccctgccccgctcccaccattgcccctcctcagctgtgcaaggagaaagcatgcttaggaagttttcaggtccttgtgataaaacctccttaaatctgttcagaccaagcaatgcgagcttcctctcctgtcccatgttggaagttgctctgaaggggtggtagatgctggaagccagacacaaccctgcgtacgctgctcagttggtggagactggggctgggactggagtcagcccagctgggaggaggggctggggaggatctgcagctgaagcccgaggcagggttggtgtgatgccaaggcaaagtggtgaggagaaaacaggaaacgggctttctctgaattggtaaatgggaaagaagtgagcaacttaagattgtcacaattaatcacaagtgtacaggattagactgggtttatatttaactcttgcttcataggtgtaccatttaaagagtgttatttaatgctaagtttaactgctttaataaagtttatttttaaatatct

SEQ ID NO: 172731 - DNA, 422 bp, Homo sapiens
  Payload ID: 13955
  Gene Symbol: PYCR2
  Gene Name: pyrroline-5-carboxylate reductase family, member 2
  ENST ID: ENST00000472798
  CDS Start-End: 162-422
agagggttgagggggagagggagactggcactgttaggacggctctgggttttagagccagggaaagcgtggtaacgggctgggccgcgacccctagttgaaaagctctgtcttctgcaggcatcctgtcggctcacaagataatagccagctccccagaaatgaacctgcccacggtgtccgcgctcaggaagatgggtgtgaacctgacacgcagcaacaaggagacggtgaagcacagcgacgtcctgtttctggctgtgaagccacatatcatccccttcatcctggatgagattggggccgacgtgcaagccagacacatcgtggtctcctgtgcggctggtgtcaccatcagctctgtggagaagaagctgatggcattccagccagcccccaaagtgattcgctgcatgaccaac

SEQ ID NO: 172732 - DNA, 597 bp, Homo sapiens
  Payload ID: 13955
  Gene Symbol: PYCR2
  Gene Name: pyrroline-5-carboxylate reductase family, member 2
  ENST ID: ENST00000489681
  CDS Start-End: 125-597
gggggcctccgtcccaccagcatgagcgaatgaaaggggagtttgcgtccggtggggtagatgagactctggttgagcagcaagcatcctgtcggctcacaagataatagccagctccccagaaatgaacctgcccacggtgtccgcgctcaggaagatgggtgtgaacctgacacgcagcaacaaggagacggtgaagcacagcgacgtcctgtttctggctgtgaagccacatatcatccccttcatcctggatgagattggggccgacgtgcaagccagacacatcgtggtctcctgtgcggctggtgtcaccatcagctctgtggagaagaagctgatggcattccagccagcccccaaagtgattcgctgcatgaccaacacacctgtggtagtgcaggaaggcgctacagtgtacgccacgggcacccatgccctggtggaggatgggcagctcctggagcagctcatgagcagcgtgggcttctgcactgaggtggaagaggacctcatcgatgccgtcacggggctcagtggcagcgggcctgcctatgcattcatggctctggacgcattggctgatggtggggtgaa

SEQ ID NO: 172733 - DNA, 1538 bp, Homo sapiens
  Payload ID: 13955
  Gene Symbol: PYCR2
  Gene Name: pyrroline-5-carboxylate reductase family, member 2
  ENST ID: ENST00000612651
  CDS Start-End: 1-960
atgagcgtgggcttcatcggggccggccagctggccatgctctggcgcggggcttcacggccgcagcatcctgtcggctcacaagataatagccagctccccagaaatgaacctgcccacggtgtccgcgctcaggaagatgggtgtgaacctgacacgcagcaacaaggagacggtgaagcacagcgacgtcctgtttctggctgtgaagcccatatcatccccttcatcctggatgagattggggccgacgtgcaagccagacacatcgtggtctcctgtgcggctggtgtcaccatcagctctgtggagaagaagctgatggcattccagccagcccccaaagtgattcgctgcatgaccaacacacctgtggtagtgcaggaaggcgctacagtgtacgccacgggcacccatgccctggtggaggatgggcagctcctggagcagctcatgagcagcgtgggcttctgcactgaggtggaagaggacctcatcgatgccgtcacggggctcagtggcagcgggcctgcctatgcattcatggctctggacgcattggctgatggtggggtgaagatgggtttgccacggcgcctggcaatccaactcggggcccaggctttgctgggagctgccaagatgctgctggactcggagcagcatccatgccagcttaaggacaatgtctgctcccctgggggagccaccatccacgccctgcactttctagagagtgggggcttccgctctctgctcatcaatgcagttgaggcctcctgtatccgaacacgagagctacagtccatggccgaccaagaaaagatctccccagctgcccttaagaagaccctcttagacagagtgaagctggaatcccccacagtctccacactgaccccctccagcccagggaagctcctcacaagaagcctggccctgggaggcaagaaggactaaggcagcatctgtcccctctgtgattcagagcccttagttgagagcccctgccgcccctgccacccccctgccccgctcccaccattgcccctcctcagctgtgcaaggagaaagcatgcttaggaagttttcaggtccttgtgataaaacctccttaaatctgttcagaccaagcaatgcgagcttcctctcctgtcccatgttggaagttgctctgaaggggtggtagatgctggaagccagacacaaccctgcgtacgctgctcagttggtggagactggggctgggactggagtcagcccagctgggaggaggggctggggaggatctgcagctgaagcccgaggcagggttggtgtgatgccaaggcaaagtggtgaggagaaaacaggaaacgggctttctctgaattggtaaatgggaaagaagtgagcaacttaagattgtcacaattaatcacaagtgtacaggattagactgggtttatatttaactcttgcttcataggtgtaccatttaaagagtgttatttaatgctaagtttaactgctttaataaagtttatttttaaatatct

SEQ ID NO: 172734 - DNA, 2678 bp, Homo sapiens
  Payload ID: 13956
  Gene Symbol: PYCRL
  Gene Name: pyrroline-5-carboxylate reductase-like
  ENST ID: ENST00000220966
  CDS Start-End: 31-891
ctagatctgtgggcggggcgcggcctgtggatgggcggtgagcgcagcggcgtccgaggcaacaagatggcagctgcggagccgtctccgcggcgcgtgggcttcgtgggcgcgggccgcatggcgggggccatcgcgcagggcctcatcagagcaggaaaagtggaagctcagcacatactggccagtgcaccaacagacaggaacctatgtcactttcaagctctgggttgccggaccacgcactccaaccaggaggtgctgcagagctgcctgctcgtcatctttgccaccaagcctcatgtgctgccagctgtcctggcagaggtggctcctgtggtcaccactgaacacatcttggtgtccgtggctgctggggtgtctctgagcaccctggaggagctgctgcccccaaacacacgggtgctgcgggtcttgcccaacctgccctgtgtggtccaggaaggggccatagtgatggcgcggggccgccacgtggggagcagcgagaccaagctcctgcagcatctgctggaggcctgtgggcggtgtgaggaggtgcctgaagcctacgtcgacatccacactggcctcagtggcagtggcgtggccttcgtgtgtgcattctccgaggccctggctgaaggagccgtcaagatgggcatgcccagcagcctggcccaccgcatcgctgcccagaccctgctggggacggccaagatgctgctgcacgagggccaacacccagcccagctgcgctcagacgtgtgcaccccgggtggcaccaccatctatggactccacgccctggagcagggcgggctgcgagcagccaccatgagcgccgtggaggctgccacctgccgggccaaggagctcagcagaaagtaggctgggctctggccatcctttcctgcctctgtgcccctgcctctccctgtgtcccttcccctgaggactgcggctccctccctcctgcatgagggtctcctactgctccttctccccttgcacagggaaatgcagggggcaggacttgggaggttccagcaggcgggggagccccgaccagtggggacactcctccctccccagtgagcagaaggcaccgtggtggtggctctgccccttgctgcagtgagcccaccttgctgcaacattggttctgaggggcccaagagatggcgtcttggtcatttgcccgcatggttgggcagttggttgaggccatgaacagaacttacggtaacaggcacggctggcccaatgcctggtctggagctggagcttgcctttggctttccaggtggctccgtgcagctacagccaggccggctgcctcatctcagctctagggggcacgagccatatggggtctgcacaagagaccctctcccctgcagtaaagccaggggccctggcctgatggggcccccatggggagctggagcctgccctgcagcctggagaagagggtggctgtggtgggcgtgctcatcccctgctaaggagcaggagctgctgggccaggtctgcggcagtgctggggtggcaccaggtgggcagtggtaggtggggtggcttgaggtctgggagggtggccctggccagccaggacacatgcagacccctggctttagtctggatacaggctccctctttcctcccaatcctaagctcctgacaagtggccaggtggctctgggccctcctgccccgtgcctaggtcaggggtcctggaataccccgtagctctggcaccaccacactggcctctgatggcaagacttggcccctccacctgtccctaacggacggcaggtcaggaaagccaggactcaggggagaagcaaacccccaggattgaaggctagggttctagggcctttgggtggggagggcccgggccggacagcctcagctccgtcccctgccccacaagattcacctgggcctccagtcccacgctggccccaactgctgcagctctcggcttccgcccaacagcctctggaggtgaggcgggagcatgccctcagcgaggctgggcggcgggtcctgctgtgccatctccctgtgcgcctgagcagatcaatccaccagtgcaaaacagggctaacggcacctgcaggacagcagcacgctccatccctcatgctcagctgcctctgcggccacggacttctgcccttcatctgctctctcttactctcctgagcctagcccgtccgtaagctccctcccctgcctggttcccagggcaggctgactcagttgactgcttggtccaagcctggccctggcacttgtcagggtcagcctaaggagatgggaataaagaggccagagagcaccaagtgagctcatgtttcaccagaggtggataaaaccaagttctgggctgggcccagtggctcacatctgtaattccagcactttgggaggccgaggcgggcagatcacaaagtcaggagtttgagaccaacctgaccaacatggagaaaccccatctctactaaaaatacaaaattagctggatgtggtggtgcgtgcctgtaatcccagctacttgggaggctgaggcaggagaattgcttgaatccaggaggcggagattgcagagagccaagatcatgccactgcactccagcctgggtgacagcaagactctgtcttgg

SEQ ID NO: 172735 - DNA, 985 bp, Homo sapiens
  Payload ID: 13956
  Gene Symbol: PYCRL
  Gene Name: pyrroline-5-carboxylate reductase-like
  ENST ID: ENST00000377579
  CDS Start-End: 419-832
atagccctttcgggccaataagcagcgagaggcggggttcccgcgccttgcgaacttgtagagtgcggacaaaaagccggccggagtgtgccgtcccagaaaagtggaagctcagcacatactggccagtgcaccaacagacaggaacctatgtcactttcaagctctgggttgccggaccacgcactccaaccaggaggtgctgcagagctgcctgctcgtcatctttgccaccaagcctcatgtgctgccagctgtcctggcagaggtggctcctgtggtcaccactgaacacatcttggtgtccgtggctgctggggtgtctctgagcaccctggaggagctgctgcccccaaacacacgggtgctgcgggtcttgcccaacctgccctgtgtggtccaggaaggggccatagtgatggcgcggggccgccacgtggggagcagcgagaccaagctcctgcagcatctgctggaggcctgtgggcggtgtgaggaggtgcctgaagcctacgtcgacatccacactggcctcagtggcagtggcgtggccttcgtgtgtgcattctccgaggccctggctgaaggagccgtcaagatgggcatgcccagcagcctggcccaccgcatcgctgcccagaccctgctggggacggccaagatgctgctgcacgagggccaacacccagcccagctgcgctcagacgtgtgcaccccgggtggcaccaccatctatggactccacgccctggagcagggcgggctgcgagcagccaccatgagcgccgtggaggctgccacctgccgggccaaggagctcagcagaaagtaggctgggctctggccatcctttcctgcctctgtgcccctgcctctccctgtgtcccttcccctgaggactgcggctccctccctcctgcatgagggtctcctactgctccttctccccttgcacagggaaatgcagggggcaggacttgggagg

SEQ ID NO: 172736 - DNA, 1324 bp, Homo sapiens
  Payload ID: 13956
  Gene Symbol: PYCRL
  Gene Name: pyrroline-5-carboxylate reductase-like
  ENST ID: ENST00000447926
  CDS Start-End: 22-156
agcggcgtccgaggcaacaagatggcagctgcggagccgtctccgcggcgcgtgggcttcgtgggcgcgggccgcatggcgggggccatcgcgcagggcctcatcagagcagccatacttcagggtccagaagagtcaagatcaatcgggaaatagcttactatgagtctcaggagtcttccctgtgaaacctggcagtaccgcatgcctcccagagctgtacaggaaaagtggaagctcagcacatactggccagtgcaccaacagacaggaacctatgtcactttcaagctctgggttgccggaccacgcactccaaccaggaggtgctgcagagctgcctgctcgtcatctttgccaccaagcctcatgtgctgccagctgtcctggcagaggtggctcctgtggtcaccactgaacacatcttggtgtccgtggctgctggggtgtctctgagcaccctggaggagctgctgcccccaaacacacgggtgctgcgggtcttgcccaacctgccctgtgtggtccaggaaggggccatagtgatggcgcggggccgccacgtggggagcagcgagaccaagctcctgcagcatctgctggaggcctgtgggcggtgtgaggaggtgcctgaagcctacgtcgacatccacactggcctcagtggcagtggcgtggccttcgtgtgtgcattctccgaggccctggctgaaggagccgtcaagatgggcatgcccagcagcctggcccaccgcatcgctgcccagaccctgctggggacggccaagatgctgctgcacgagggccaacacccagcccagctgcgctcagacgtgtgcaccccgggtggcaccaccatctatggactccacgccctggagcagggcgggctgcgagcagccaccatgagcgccgtggaggctgccacctgccgggccaaggagctcagcagaaagtaggctgggctctggccatcctttcctgcctctgtgcccctgcctctccctgtgtcccttcccctgaggactgcggctccctccctcctgcatgagggtctcctactgctccttctccccttgcacagggaaatgcagggggcaggacttgggaggttccagcaggcgggggagccccgaccagtggggacactcctccctccccagtgagcagaaggcaccgtggtggtggctctgccccttgctgcagtgagcccaccttgctgcaacattggttctgaggggcccaagagatggcgtcttggtcatttgcccgcatggttgggcagttggttgaggccatgaacagaacttacggtaacaggcac

SEQ ID NO: 172737 - DNA, 1000 bp, Homo sapiens
  Payload ID: 13956
  Gene Symbol: PYCRL
  Gene Name: pyrroline-5-carboxylate reductase-like
  Uniprot ID: Q53H96
  ENST ID: ENST00000433751
  CDS Start-End: 22-786
agcggcgtccgaggcaacaagatggcagctgcggagccgtctccgcggcgcgtgggcttcgtgggcgcgggccgcatggcgggggccatcgcgcagggcctcatcagagcaggaaaagtggaagctcagcacatactggccagtgcaccaacagacaggaacctatgtcactttcaagctctgggttgccggaccacgcactccaaccaggaggtgctgcagagctgcctgctcgtcatctttgccaccaagcctcatgtgctgccagctgtcctggcagaggtggctcctgtggtcaccactgaacacatcttggtgtccgtggctgctggggtgtctctgagcaccctggaggaggaaggggccatagtgatggcgcggggccgccacgtggggagcagcgagaccaagctcctgcagcatctgctggaggcctgtgggcggtgtgaggaggtgcctgaagcctacgtcgacatccacactggcctcagtggcagtggcgtggccttcgtgtgtgcattctccgaggccctggctgaaggagccgtcaagatgggcatgcccagcagcctggcccaccgcatcgctgcccagaccctgctggggacggccaagatgctgctgcacgagggccaacacccagcccagctgcgctcagacgtgtgcaccccgggtggcaccaccatctatggactccacgccctggagcagggcgggctgcgagcagccaccatgagcgccgtggaggctgccacctgccgggccaaggagctcagcagaaagtaggctgggctctggccatcctttcctgcctctgtgcccctgcctctccctgtgtcccttcccctgaggactgcggctccctccctcctgcatgagggtctcctactgctccttctccccttgcacagggaaatgcagggggcaggacttgggaggttccagcaggcgggggagccccgaccagtggggacactcctccctccccagtgagcagaag

SEQ ID NO: 172738 - DNA, 579 bp, Homo sapiens
  Payload ID: 13956
  Gene Symbol: PYCRL
  Gene Name: pyrroline-5-carboxylate reductase-like
  ENST ID: ENST00000462036
  CDS Start-End: 403-579
agaggtactgcctcttctgctccaggcagccttcccttccctggaggcagaggccccagggatctgtgtcctcaccaatgaggaaaagtggaagctcagcacatactggccagtgcaccaacagacaggaacctatgtcactttcaagctctgggttgccggaccacgcactccaaccaggaggtgctgcagagctgcctgctcgtcatctttgccaccaagcctcatgtgctgccagctgtcctggcagaggtggctcctgtggtcaccactgaacacatcttggtgtccgtggctgctggggtgtctctgagcaccctggaggagctgctgcccccaaacacacgggtgctgcgggtcttgcccaacctgccctgtgtggtccaggaaggggccatagtgatggcgcggggccgccacgtggggagcagcgagaccaagctcctgcagcatctgctggaggcctgtgggcggtgtgaggaggtgcctgaagcctacgtcgacatccacactggcctcagtggcagtggcgtggccttcgtgtgtgcattctccgaggccctggctgaaggagccgtc

SEQ ID NO: 172739 - DNA, 2332 bp, Homo sapiens
  Payload ID: 13956
  Gene Symbol: PYCRL
  Gene Name: pyrroline-5-carboxylate reductase-like
  Uniprot ID: Q53H96
  ENST ID: ENST00000495276
  CDS Start-End: 27-851
agcgcagcggcgtccgaggcaacaagatggcagctgcggagccgtctccgcggcgcgtgggcttcgtgggcgcgggccgcatggcgggggccatcgcgcagggcctcatcagagcaggaaaagtggaagctcagcacatactggccagtgcaccaacagacaggaacctatgtcactttcaagctctgggttgccggaccacgcactccaaccaggaggtgctgcagagctgcctgctcgtcatctttgccaccaagcctcatgtgctgccagctgtcctggcagaggtggctcctgtggtcaccactgaacacatcttggtgtccgtggctgctggggtgtctctgagcaccctggaggagctgctgcccccaaacacacgggtgctgcgggtcttgcccaacctgccctgtgtggtccaggaaggggccatagtgatggcgcggggccgccacgtggggagcagcgagaccaagctcctgcagcatctgctggaggcctgtgggcggtgtgaggaggtgcctgaagcctacgtcgacatccacactggcctcagtggcagtggcgtggccttcgtgtgtgcattctccgaggccctggctgaaggagccgtcaagatgggcatgcccagcagcctggcccaccgcatcgctgcccagaccctgctggggacggccaagatgctgctgcacgagggccaacacccagcccagctgcgctcagacgtgtgcaccccgggtggcaccaccatctatggactccacgccctggagcagggcgggctgcgagcagccaccatgagcgccgtggaggctgccacctgccgggccaaggagctcagcagaaagtaggctgggctctggccatcctttcctgcctctgtgcccctgcctctccctgtgtcccttcccctgaggactgcggctccctccctcctgcatgagggtctcctactgctccttctccccttgcacagggaaatgcagggggcaggacttgggaggttccagcaggcgggggagccccgaccagtggggacactcctccctccccagtgagcagaaggcaccgtggtggtggctctgccccttgctgcagtgagcccaccttgctgcaacattggttctgaggggcccaagagatggcgtcttggtcatttgcccgcatggttgggcagttggttgaggccatgaacagaacttacggtaacaggcacggctggcccaatgcctggtctggagctggagcttgcctttggctttccaggtggctccgtgcagctacagccaggccggctgcctcatctcagctctagggggcacgagccatatggggtctgcacaagagaccctctcccctgcagtaaagccaggggccctggcctgatggggcccccatggggagctggagcctgccctgcagcctggagaagagggtggctgtggtgggcgtgctcatcccctgctaaggagcaggagctgctgggccaggtctgcggcagtgctggggtggcaccaggtgggcagtggtaggtggggtggcttgaggtctgggagggtggccctggccagccaggacacatgcagacccctggctttagtctggatacaggctccctctttcctcccaatcctaagctcctgacaagtggccaggtggctctgggccctcctgccccgtgcctaggtcaggggtcctggaataccccgtagctctggcaccaccacactggcctctgatggcaagacttggcccctccacctgtccctaacggacggcaggtcaggaaagccaggactcaggggagaagcaaacccccaggattgaaggctagggttctagggcctttgggtggggagggcccgggccggacagcctcagctccgtcccctgccccacaagattcacctgggcctccagtcccacgctggccccaactgctgcagctctcggcttccgcccaacagcctctggaggtgaggcgggagcatgccctcagcgaggctgggcggcgggtcctgctgtgccatctccctgtgcgcctgagcagatcaatccaccagtgcaaaacagggctaacggcacctgcaggacagcagcacgctccatccctcatgctcagctgcctctgcggccacggacttctgcccttcatctgctctctcttactctcctgagcctagcccgtccgtaagctccctcccctgcctggttcccagggcaggctgactcagttgactgcttggtccaagcctggccctggcacttgtcagggtcagcctaaggagatgggaataaagaggccagagagcaccaagtgagctcatgtttc

SEQ ID NO: 172740 - DNA, 2678 bp, Homo sapiens; identical to SEQ ID NO: 172734
  Payload ID: 13956
  Gene Symbol: PYCRL
  Gene Name: pyrroline-5-carboxylate reductase-like
  ENST ID: ENST00000616663
  CDS Start-End: 31-891

SEQ ID NO: 172741 - DNA, 985 bp, Homo sapiens; identical to SEQ ID NO: 172735
  Payload ID: 13956
  Gene Symbol: PYCRL
  Gene Name: pyrroline-5-carboxylate reductase-like
  ENST ID: ENST00000634183
  CDS Start-End: 419-832

SEQ ID NO: 172742 - DNA, 2332 bp, Homo sapiens; identical to SEQ ID NO: 172739
  Payload ID: 13956
  Gene Symbol: PYCRL
  Gene Name: pyrroline-5-carboxylate reductase-like
  Uniprot ID: Q53H96
  ENST ID: ENST00000632107
  CDS Start-End: 27-851

SEQ ID NO: 172743 - DNA, 1324 bp, Homo sapiens; identical to SEQ ID NO: 172736
  Payload ID: 13956
  Gene Symbol: PYCRL
  Gene Name: pyrroline-5-carboxylate reductase-like
  ENST ID: ENST00000633357
  CDS Start-End: 22-156

SEQ ID NO: 172744 - DNA, 579 bp, Homo sapiens; identical to SEQ ID NO: 172738
  Payload ID: 13956
  Gene Symbol: PYCRL
  Gene Name: pyrroline-5-carboxylate reductase-like
  ENST ID: ENST00000633497
  CDS Start-End: 403-579

SEQ ID NO: 172745 - DNA, 1000 bp, Homo sapiens; identical to SEQ ID NO: 172737
  Payload ID: 13956
  Gene Symbol: PYCRL
  Gene Name: pyrroline-5-carboxylate reductase-like
  Uniprot ID: Q53H96
  ENST ID: ENST00000631620
  CDS Start-End: 22-786

SEQ ID NO: 172746 - DNA, 4004 bp, Homo sapiens
  Payload ID: 13957
  Gene Symbol: PC
  Gene Name: pyruvate carboxylase
  Uniprot ID: P11498
  ENST ID: ENST00000393955
  CDS Start-End: 82-3618
caggcagcaggcctcaggcccagacttgggtgttacaggaacagtgtggcctctctggaactctgcagaccaactgccgtgatgctgaagttccgaacagtccatgggggcctgaggctcctgggaatccgccgaacctccaccgcccccgctgcctccccaaatgtccggcgcctggagtataagcccatcaagaaagtcatggtggccaacagaggtgagattgccatccgtgtgttccgggcctgcacggagctgggcatccgcaccgtagccatctactctgagcaggacacgggccagatgcaccggcagaaagcagatgaagcctatctcatcggccgcggcctggcccccgtgcaggcctacctgcacatcccagacatcatcaaggtggccaaggagaacaacgtagatgcagtgcaccctggctacgggttcctctctgagcgagcggacttcgcccaggcctgccaggatgcaggggtccggtttattgggccaagcccagaagtggtccgcaagatgggagacaaggtggaggcccgggccatcgccattgctgcgggtgttcccgttgtccctggcacagatgcccccatcacgtccctgcatgaggcccacgagttctccaacacctacggcttccccatcatcttcaaggcggcctatgggggtggagggcgtggcatgagggtggtgcacagctacgaggagctggaggagaattacacccgggcctactcagaggctctggccgcctttgggaatggggcgctgtttgtggagaagttcatcgagaagccacggcacatcgaggtgcagatcttgggggaccagtatgggaacatcctgcacctgtacgagcgagactgctccatccagcggcggcaccagaaggtggtcgagattgcccccgccgcccacctggacccgcagcttcggactcggctcaccagcgactctgtgaaactcgctaaacaggtgggctacgagaacgcaggcaccgtggagttcctggtggacaggcacggcaagcactacttcatcgaggtcaactcccgcctgcaggtggagcacacggtcacagaggagatcaccgacgtagacctggtccatgctcagatccacgtggctgagggcaggagcctacccgacctgggcctgcggcaggagaacatccgcatcaacgggtgtgccatccagtgccgggtcaccaccgaggaccccgcgcgcagcttccagccggacaccggccgcattgaggtgttccggagcggagagggcatgggcatccgcctggataatgcttccgccttccaaggagccgtcatctcgccccactacgactccctgctggtcaaagtcattgcccacggcaaagaccaccccacggccgccaccaagatgagcagggcccttgcggagttccgcgtccgaggtgtgaagaccaacatcgccttcctgcagaatgtgctcaacaaccagcagttcctggcaggcactgtggacacccagttcatcgacgagaacccagagctgttccagctgcggcctgcacagaaccgggcccaaaagctgttgcactacctcggccatgtcatggtaaacggtccaaccaccccgattcccgtcaaggccagccccagccccacggaccccgttgtccctgcagtgcccataggcccgcccccggctggtttcagagacatcctgctgcgagaggggcctgagggctttgctcgagctgtgcggaaccacccggggctgctgctgatggacacgaccttcagggacgcccaccagtcactgctggccactcgtgtgcgcacccacgatctcaaaaagatcgccccctatgttgcccacaacttcagcaagctcttcagcatggagaactggggaggagccacgtttgacgtcgccatgcgcttcctgtatgagtgcccctggcggcggctgcaggagctccgggagctcatccccaacatccctttccagatgctgctgcggggggccaatgctgtgggctacaccaactacccagacaacgtggtcttcaagttctgtgaagtggccaaagagaatggcatggatgtcttccgtgtgtttgactccctcaactacttgcccaacatgctgctgggcatggaggcggcaggaagtgccggaggcgtggtggaggctgccatctcatacacgggcgacgtggccgaccccagccgcaccaagtactcactgcagtactacatgggcttggccgaagagctggtgcgagctggcacccacatcctgtgcatcaaggacatggccgggctgctgaagcccacggcctgcaccatgctggtcagctccctccgggaccgcttccccgacctcccactgcacatccacacccacgacacgtcaggggcaggcgtggcagccatgctggcctgtgcccaggctggagctgatgtggtggatgtggcagctgattccatgtctgggatgacttcacagcccagcatgggggccctggtggcctgtaccagagggactcccctggacacagaggtgcccatggagcgcgtgtttgactacagtgagtactgggagggggctcggggactgtacgcggccttcgactgcacggccaccatgaagtctggcaactcggacgtgtatgaaaatgagatcccagggggccagtacaccaacctgcacttccaggcccacagcatggggcttggctccaagttcaaggaggtcaagaaggcctatgtggaggccaaccagatgctgggcgatctcatcaaggtgacgccctcctccaagatcgtgggggacctggcccagtttatggtgcagaatggattgagccgggcagaggccgaagctcaggcggaagagctgtcctttccccgctccgtggtggagttcctgcagggctacatcggtgtcccccatggggggttccccgaaccctttcgctctaaggtactgaaggacctgccaagggtggaggggcggcctggagcctccctccctcccctggatctgcaggcactggagaaggagctggtagaccggcatggggaggaggtgacgccggaagatgtgctctcagcagctatgtaccccgatgtgtttgcccacttcaaggacttcactgccacctttggccccctggatagcctgaatactcgcctcttcctgcagggacccaagatcgcagaggagtttgaggtggagctggagcggggcaagacgctgcacatcaaagccctggccgtgagcgacctgaaccgggccggccagaggcaggtcttctttgagctcaatgggcagctgcggtccatcttggtcaaggacacccaggccatgaaggagatgcacttccaccccaaggccctaaaggacgtgaagggccagatcggggcgcccatgcctgggaaggtgatagacatcaaagtggtggcaggggccaaggtggccaagggccagcccctgtgtgtgctcagtgccatgaagatggagactgtggtgacctcacccatggagggtactgtccgcaaggttcatgtgaccaaggacatgacactggaaggtgacgacctcatcctggagatcgagtgatcttgccccagaccggcagcctggccatccccaagccttcaacagaagctgtgctgccacggcaggcccaggccagccagtgcccgaggccaggaaggccgggccgtggaggtcctgtccacagctggacaggagagacaccgcctgcggtggttcattcctttcagccatcgtcctttcctccggcggacagctgcttacatgttcatctcttgccaaataagggtcccctcctcactggagactacaagtggtgggtcaggtggtcctaggacccaggggaggtttaggggtcctatctcctgggggaaggggagatctaagatgtcccaggtcctgggaagtttactcaataaagctggctttcccctgccctccatgctgga

SEQ ID NO: 172747 - DNA, 4005 bp, Homo sapiens
  Payload ID: 13957
  Gene Symbol: PC
  Gene Name: pyruvate carboxylase
  Uniprot ID: P11498
  ENST ID: ENST00000393958
  CDS Start-End: 95-3631
gtcagtggaggcagcagcggtagaggcggcggcgaggactggcgacggcgaggagatagtgtctgccttctggagagctgaccaaacactaaggatgctgaagttccgaacagtccatgggggcctgaggctcctgggaatccgccgaacctccaccgcccccgctgcctccccaaatgtccggcgcctggagtataagcccatcaagaaagtcatggtggccaacagaggtgagattgccatccgtgtgttccgggcctgcacggagctgggcatccgcaccgtagccatctactctgagcaggacacgggccagatgcaccggcagaaagcagatgaagcctatctcatcggccgcggcctggcccccgtgcaggcctacctgcacatcccagacatcatcaaggtggccaaggagaacaacgtagatgcagtgcaccctggctacgggttcctctctgagcgagcggacttcgcccaggcctgccaggatgcaggggtccggtttattgggccaagcccagaagtggtccgcaagatgggagacaaggtggaggcccgggccatcgccattgctgcgggtgttcccgttgtccctggcacagatgcccccatcacgtccctgcatgaggcccacgagttctccaacacctacggcttccccatcatcttcaaggcggcctatgggggtggagggcgtggcatgagggtggtgcacagctacgaggagctggaggagaattacacccgggcctactcagaggctctggccgcctttgggaatggggcgctgtttgtggagaagttcatcgagaagccacggcacatcgaggtgcagatcttgggggaccagtatgggaacatcctgcacctgtacgagcgagactgctccatccagcggcggcaccagaaggtggtcgagattgcccccgccgcccacctggacccgcagcttcggactcggctcaccagcgactctgtgaaactcgctaaacaggtgggctacgagaacgcaggcaccgtggagttcctggtggacaggcacggcaagcactacttcatcgaggtcaactcccgcctgcaggtggagcacacggtcacagaggagatcaccgacgtagacctggtccatgctcagatccacgtggctgagggcaggagcctacccgacctgggcctgcggcaggagaacatccgcatcaacgggtgtgccatccagtgccgggtcaccaccgaggaccccgcgcgcagcttccagccggacaccggccgcattgaggtgttccggagcggagagggcatgggcatccgcctggataatgcttccgccttccaaggagccgtcatctcgccccactacgactccctgctggtcaaagtcattgcccacggcaaagaccaccccacggccgccaccaagatgagcagggcccttgcggagttccgcgtccgaggtgtgaagaccaacatcgccttcctgcagaatgtgctcaacaaccagcagttcctggcaggcactgtggacacccagttcatcgacgagaacccagagctgttccagctgcggcctgcacagaaccgggcccaaaagctgttgcactacctcggccatgtcatggtaaacggtccaaccaccccgattcccgtcaaggccagccccagccccacggaccccgttgtccctgcagtgcccataggcccgcccccggctggtttcagagacatcctgctgcgagaggggcctgagggctttgctcgagctgtgcggaaccacccggggctgctgctgatggacacgaccttcagggacgcccaccagtcactgctggccactcgtgtgcgcacccacgatctcaaaaagatcgccccctatgttgcccacaacttcagcaagctcttcagcatggagaactggggaggagccacgtttgacgtcgccatgcgcttcctgtatgagtgcccctggcggcggctgcaggagctccgggagctcatccccaacatccctttccagatgctgctgcggggggccaatgctgtgggctacaccaactacccagacaacgtggtcttcaagttctgtgaagtggccaaagagaatggcatggatgtcttccgtgtgtttgactccctcaactacttgcccaacatgctgctgggcatggaggcggcaggaagtgccggaggcgtggtggaggctgccatctcatacacgggcgacgtggccgaccccagccgcaccaagtactcactgcagtactacatgggcttggccgaagagctggtgcgagctggcacccacatcctgtgcatcaaggacatggccgggctgctgaagcccacggcctgcaccatgctggtcagctccctccgggaccgcttccccgacctcccactgcacatccacacccacgacacgtcaggggcaggcgtggcagccatgctggcctgtgcccaggctggagctgatgtggtggatgtggcagctgattccatgtctgggatgacttcacagcccagcatgggggccctggtggcctgtaccagagggactcccctggacacagaggtgcccatggagcgcgtgtttgactacagtgagtactgggagggggctcggggactgtacgcggccttcgactgcacggccaccatgaagtctggcaactcggacgtgtatgaaaatgagatcccagggggccagtacaccaacctgcacttccaggcccacagcatggggcttggctccaagttcaaggaggtcaagaaggcctatgtggaggccaaccagatgctgggcgatctcatcaaggtgacgccctcctccaagatcgtgggggacctggcccagtttatggtgcagaatggattgagccgggcagaggccgaagctcaggcggaagagctgtcctttccccgctccgtggtggagttcctgcagggctacatcggtgtcccccatggggggttccccgaaccctttcgctctaaggtactgaaggacctgccaagggtggaggggcggcctggagcctccctccctcccctggatctgcaggcactggagaaggagctggtagaccggcatggggaggaggtgacgccggaagatgtgctctcagcagctatgtaccccgatgtgtttgcccacttcaaggacttcactgccacctttggccccctggatagcctgaatactcgcctcttcctgcagggacccaagatcgcagaggagtttgaggtggagctggagcggggcaagacgctgcacatcaaagccctggccgtgagcgacctgaaccgggccggccagaggcaggtcttctttgagctcaatgggcagctgcggtccatcttggtcaaggacacccaggccatgaaggagatgcacttccaccccaaggccctaaaggacgtgaagggccagatcggggcgcccatgcctgggaaggtgatagacatcaaagtggtggcaggggccaaggtggccaagggccagcccctgtgtgtgctcagtgccatgaagatggagactgtggtgacctcacccatggagggtactgtccgcaaggttcatgtgaccaaggacatgacactggaaggtgacgacctcatcctggagatcgagtgatcttgccccagaccggcagcctggccatccccaagccttcaacagaagctgtgctgccacggcaggcccaggccagccagtgcccgaggccaggaaggccgggccgtggaggtcctgtccacagctggacaggagagacaccgcctgcggtggttcattcctttcagccatcgtcctttcctccggcggacagctgcttacatgttcatctcttgccaaataagggtcccctcctcactggagactacaagtggtgggtcaggtggtcctaggacccaggggaggtttaggggtcctatctcctgggggaaggggagatctaagatgtcccaggtcctgggaagtttactcaataaagctggctttcccctgcc

SEQ ID NO: 172748 - DNA, 4192 bp, Homo sapiens
  Payload ID: 13957
  Gene Symbol: PC
  Gene Name: pyruvate carboxylase
  Uniprot ID: P11498
  ENST ID: ENST00000393960
  CDS Start-End: 283-3819
gtcagtggaggcagcagcggtagaggcggcggcgaggactggcgacggcgaggagctgccttctagtctcacctgtggacactttgccaaaggagtcgggcctgacggtggaagatgggaaatggccaaaagaataaaccatttcctcttacttaccgaatgaaaagcttgcttcatcttggcgttcaagactctctaatatgattccacctgttgggctctttcttccatttgcctccgcagatagtgtctgccttctggagagctgaccaaacactaaggatgctgaagttccgaacagtccatgggggcctgaggctcctgggaatccgccgaacctccaccgcccccgctgcctccccaaatgtccggcgcctggagtataagcccatcaagaaagtcatggtggccaacagaggtgagattgccatccgtgtgttccgggcctgcacggagctgggcatccgcaccgtagccatctactctgagcaggacacgggccagatgcaccggcagaaagcagatgaagcctatctcatcggccgcggcctggcccccgtgcaggcctacctgcacatcccagacatcatcaaggtggccaaggagaacaacgtagatgcagtgcaccctggctacgggttcctctctgagcgagcggacttcgcccaggcctgccaggatgcaggggtccggtttattgggccaagcccagaagtggtccgcaagatgggagacaaggtggaggcccgggccatcgccattgctgcgggtgttcccgttgtccctggcacagatgcccccatcacgtccctgcatgaggcccacgagttctccaacacctacggcttccccatcatcttcaaggcggcctatgggggtggagggcgtggcatgagggtggtgcacagctacgaggagctggaggagaattacacccgggcctactcagaggctctggccgcctttgggaatggggcgctgtttgtggagaagttcatcgagaagccacggcacatcgaggtgcagatcttgggggaccagtatgggaacatcctgcacctgtacgagcgagactgctccatccagcggcggcaccagaaggtggtcgagattgcccccgccgcccacctggacccgcagcttcggactcggctcaccagcgactctgtgaaactcgctaaacaggtgggctacgagaacgcaggcaccgtggagttcctggtggacaggcacggcaagcactacttcatcgaggtcaactcccgcctgcaggtggagcacacggtcacagaggagatcaccgacgtagacctggtccatgctcagatccacgtggctgagggcaggagcctacccgacctgggcctgcggcaggagaacatccgcatcaacgggtgtgccatccagtgccgggtcaccaccgaggaccccgcgcgcagcttccagccggacaccggccgcattgaggtgttccggagcggagagggcatgggcatccgcctggataatgcttccgccttccaaggagccgtcatctcgccccactacgactccctgctggtcaaagtcattgcccacggcaaagaccaccccacggccgccaccaagatgagcagggcccttgcggagttccgcgtccgaggtgtgaagaccaacatcgccttcctgcagaatgtgctcaacaaccagcagttcctggcaggcactgtggacacccagttcatcgacgagaacccagagctgttccagctgcggcctgcacagaaccgggcccaaaagctgttgcactacctcggccatgtcatggtaaacggtccaaccaccccgattcccgtcaaggccagccccagccccacggaccccgttgtccctgcagtgcccataggcccgcccccggctggtttcagagacatcctgctgcgagaggggcctgagggctttgctcgagctgtgcggaaccacccggggctgctgctgatggacacgaccttcagggacgcccaccagtcactgctggccactcgtgtgcgcacccacgatctcaaaaagatcgccccctatgttgcccacaacttcagcaagctcttcagcatggagaactggggaggagccacgtttgacgtcgccatgcgcttcctgtatgagtgcccctggcggcggctgcaggagctccgggagctcatccccaacatccctttccagatgctgctgcggggggccaatgctgtgggctacaccaactacccagacaacgtggtcttcaagttctgtgaagtggccaaagagaatggcatggatgtcttccgtgtgtttgactccctcaactacttgcccaacatgctgctgggcatggaggcggcaggaagtgccggaggcgtggtggaggctgccatctcatacacgggcgacgtggccgaccccagccgcaccaagtactcactgcagtactacatgggcttggccgaagagctggtgcgagctggcacccacatcctgtgcatcaaggacatggccgggctgctgaagcccacggcctgcaccatgctggtcagctccctccgggaccgcttccccgacctcccactgcacatccacacccacgacacgtcaggggcaggcgtggcagccatgctggcctgtgcccaggctggagctgatgtggtggatgtggcagctgattccatgtctgggatgacttcacagcccagcatgggggccctggtggcctgtaccagagggactcccctggacacagaggtgcccatggagcgcgtgtttgactacagtgagtactgggagggggctcggggactgtacgcggccttcgactgcacggccaccatgaagtctggcaactcggacgtgtatgaaaatgagatcccagggggccagtacaccaacctgcacttccaggcccacagcatggggcttggctccaagttcaaggaggtcaagaaggcctatgtggaggccaaccagatgctgggcgatctcatcaaggtgacgccctcctccaagatcgtgggggacctggcccagtttatggtgcagaatggattgagccgggcagaggccgaagctcaggcggaagagctgtcctttccccgctccgtggtggagttcctgcagggctacatcggtgtcccccatggggggttccccgaaccctttcgctctaaggtactgaaggacctgccaagggtggaggggcggcctggagcctccctccctcccctggatctgcaggcactggagaaggagctggtagaccggcatggggaggaggtgacgccggaagatgtgctctcagcagctatgtaccccgatgtgtttgcccacttcaaggacttcactgccacctttggccccctggatagcctgaatactcgcctcttcctgcagggacccaagatcgcagaggagtttgaggtggagctggagcggggcaagacgctgcacatcaaagccctggccgtgagcgacctgaaccgggccggccagaggcaggtcttctttgagctcaatgggcagctgcggtccatcttggtcaaggacacccaggccatgaaggagatgcacttccaccccaaggccctaaaggacgtgaagggccagatcggggcgcccatgcctgggaaggtgatagacatcaaagtggtggcaggggccaaggtggccaagggccagcccctgtgtgtgctcagtgccatgaagatggagactgtggtgacctcacccatggagggtactgtccgcaaggttcatgtgaccaaggacatgacactggaaggtgacgacctcatcctggagatcgagtgatcttgccccagaccggcagcctggccatccccaagccttcaacagaagctgtgctgccacggcaggcccaggccagccagtgcccgaggccaggaaggccgggccgtggaggtcctgtccacagctggacaggagagacaccgcctgcggtggttcattcctttcagccatcgtcctttcctccggcggacagctgcttacatgttcatctcttgccaaataagggtcccctcctcactggagactacaagtggtgggtcaggtggtcctaggacccaggggaggtttaggggtcctatctcctgggggaaggggagatctaagatgtcccaggtcctgggaagtttactcaataaagctggctttcccctgc

SEQ ID NO: 172749 - DNA, 1714 bp, Homo sapiens
  Payload ID: 13957
  Gene Symbol: PC
  Gene Name: pyruvate carboxylase
  ENST ID: ENST00000524491
  CDS Start-End: 215-1684
gtcagtggaggcagcagcggtagaggcggcggcgaggactggcgacggcgaggagatagtgtctgccttctggagagctgaccaaacactaaggatgctgaagttccgaacagtccatgggggcctgaggctcctgggaatccgccgaacctccaccgcccccgctgcctccccaaatgtccggcgcctggagtataagcccatcaagaaagtcatggtggccaacagaggtgagattgccatccgtgtgttccgggcctgcacggagctgggcatccgcaccgtagccatctactctgagcaggacacgggccagatgcaccggcagaaagcagatgaagcctatctcatcggccgcggcctggcccccgtgcaggcctacctgcacatcccagacatcatcaaggtggccaaggagaacaacgtagatgcagtgcaccctggctacgggttcctctctgagcgagcggacttcgcccaggcctgccaggatgcaggggtccggtttattgggccaagcccagaagtggtccgcaagatgggagacaaggtggaggcccgggccatcgccattgctgcgggtgttcccgttgtccctggcacagatgcccccatcacgtccctgcatgaggcccacgagttctccaacacctacggcttccccatcatcttcaaggcggcctatgggggtggagggcgtggcatgagggtggtgcacagctacgaggagctggaggagaattacacccgggcctactcagaggctctggccgcctttgggaatggggcgctgtttgtggagaagttcatcgagaagccacggcacatcgaggtgcagatcttgggggaccagtatgggaacatcctgcacctgtacgagcgagactgctccatccagcggcggcaccagaaggtggtcgagattgcccccgccgcccacctggacccgcagcttcggactcggctcaccagcgactctgtgaaactcgctaaacaggtgggctacgagaacgcaggcaccgtggagttcctggtggacaggcacggcaagcactacttcatcgaggtcaactcccgcctgcaggtggagcacacggtcacagaggagatcaccgacgtagacctggtccatgctcagatccacgtggctgagggcaggagcctacccgacctgggcctgcggcaggagaacatccgcatcaacgggtgtgccatccagtgccgggtcaccaccgaggaccccgcgcgcagcttccagccggacaccggccgcattgaggtgttccggagcggagagggcatgggcatccgcctggataatgcttccgccttccaaggagccgtcatctcgccccactacgactccctgctggtcaaagtcattgcccacggcaaagaccaccccacggccgccaccaagatgagcagggcccttgcggagttccgcgtccgaggtgtgaaggtcagaagacaccaggcacagcccttggccgcagccctgggccgcccctgtggacaggaagccaggaggccccaggctgctgtgactgcccccaccggccctggtagccccacccttgtccgtgtgccaccagcggcccgtgtcctgtcctcccgtctcgggggacctagccagacaacaccagagactagcactgaggtgtccccaacaattttattataaataaaaacaagactcccagtgggtggctgc

SEQ ID NO: 172750 - DNA, 1607 bp, Homo sapiens
  Payload ID: 13957
  Gene Symbol: PC
  Gene Name: pyruvate carboxylase
  ENST ID: ENST00000529047
  CDS Start-End: 45-941
tcccagggggccagtacaccaacctgcacttccaggcccacagcatggggcttggctccaagttcaaggaggtcaagaaggcctatgtggaggccaaccagatgctgggcgatctcatcaaggtgacgccctcctccaagatcgtgggggacctggcccagtttatggtgcagaatggattgagccgggcagaggccgaagctcaggcggaagagctgtcctttccccgctccgtggtggagttcctgcagggctacatcggtgtcccccatggggggttccccgaaccctttcgctctaaggtactgaaggacctgccaagggtggaggggcggcctggagcctccctccctcccctggatctgcaggcactggagaaggagctggtagaccggcatggggaggaggtgacgccggaagatgtgctctcagcagctatgtaccccgatgtgtttgcccacttcaaggacttcactgccacctttggccccctggatagcctgaatactcgcctcttcctgcagggacccaagatcgcagaggagtttgaggtggagctggagcggggcaagacgctgcacatcaaagccctggccgtgagcgacctgaaccgggccggccagaggcaggtcttctttgagctcaatgggcagctgcggtccatcttggtcaaggacacccaggccatgaaggagatgcacttccaccccaaggccctaaaggacgtgaagggccagatcggggcgcccatgcctgggaaggtgatagacatcaaagtggtggcaggggccaaggtggccaagggccagcccctgtgtgtgctcagtgccatgaagatggagactgtggtgacctcacccatggagggtactgtccgcaaggttcatgtgaccaaggacatgacactggaaggtgacgacctcatcctggagatcgagtgatcttgccccagaccggcagcctggccatccccaagccttcaacagaagctgtgctgccacggcaggcccaggccagccagtgcccgaggccaggaaggccgggccgtggaggtcctgtccacagctggacaggagagacaccgcctgcggtggttcattcctttcagccatcgtcctttcctccggcggacagctgcttacatgttcatctcttgccaaataagggtcccctcctcactggagactacaagtggtgggtcaggtggtcctaggacccaggggaggtttaggggtcctatctcctgggggaaggggagatctaagatgtcccaggtcctgggaagtttactcaataaagctggctttcccctgccctccatgctggatcctgtgcagcccccagcctgcaccactcagcagtggggggctgcctttcaagctccccatgggtgggcaggtcagttgtgtcgttctcctcagagggtagtgagaatgaccatcgtggccctgttttaagtcactattgggtgcctactgtgtatactccccaaacaggactagtagtactgaacttgcttgaggggtggggcctgttctaagtatttaacacctattaacacagggaattaaccttcatcctcttatggacacagaaatcaagtcaca

SEQ ID NO: 172751 - DNA, 1470 bp, Homo sapiens
  Payload ID: 13957
  Gene Symbol: PC
  Gene Name: pyruvate carboxylase
  ENST ID: ENST00000628663
  CDS Start-End: 1-1470
atggtggccaacagaggtgagattgccatccgtgtgttccgggcctgcacggagctgggcatccgcaccgtagccatctactctgagcaggacacgggccagatgcaccggcagaaagcagatgaagcctatctcatcggccgcggcctggcccccgtgcaggcctacctgcacatcccagacatcatcaaggtggccaaggagaacaacgtagatgcagtgcaccctggctacgggttcctctctgagcgagcggacttcgcccaggcctgccaggatgcaggggtccggtttattgggccaagcccagaagtggtccgcaagatgggagacaaggtggaggcccgggccatcgccattgctgcgggtgttcccgttgtccctggcacagatgcccccatcacgtccctgcatgaggcccacgagttctccaacacctacggcttccccatcatcttcaaggcggcctatgggggtggagggcgtggcatgagggtggtgcacagctacgaggagctggaggagaattacacccgggcctactcagaggctctggccgcctttgggaatggggcgctgtttgtggagaagttcatcgagaagccacggcacatcgaggtgcagatcttgggggaccagtatgggaacatcctgcacctgtacgagcgagactgctccatccagcggcggcaccagaaggtggtcgagattgcccccgccgcccacctggacccgcagcttcggactcggctcaccagcgactctgtgaaactcgctaaacaggtgggctacgagaacgcaggcaccgtggagttcctggtggacaggcacggcaagcactacttcatcgaggtcaactcccgcctgcaggtggagcacacggtcacagaggagatcaccgacgtagacctggtccatgctcagatccacgtggctgagggcaggagcctacccgacctgggcctgcggcaggagaacatccgcatcaacgggtgtgccatccagtgccgggtcaccaccgaggaccccgcgcgcagcttccagccggacaccggccgcattgaggtgttccggagcggagagggcatgggcatccgcctggataatgcttccgccttccaaggagccgtcatctcgccccactacgactccctgctggtcaaagtcattgcccacggcaaagaccaccccacggccgccaccaagatgagcagggcccttgcggagttccgcgtccgaggtgtgaaggtcagaagacaccaggcacagcccttggccgcagccctgggccgcccctgtggacaggaagccaggaggccccaggctgctgtgactgcccccaccggccctggtagccccacccttgtccgtgtgccaccagcggcccgtgtcctgtcctcccgtctcgggggacctagccagacaacaccagagactagcactgaggtgtccccaacaattttattataa

SEQ ID NO: 172752 - DNA, 699 bp, Homo sapiens
  Payload ID: 13958
  Gene Symbol: PDHA1
  Gene Name: pyruvate dehydrogenase (lipoamide) alpha 1
  ENST ID: ENST00000355808
  CDS Start-End: 89-699
gctggggcacctgaaggagacttgggggcacccgcgtcgtgcctcctgggttgtgaggagtcgccgctgccgccactgcctgtgcttcatgaggaagatgctcgccgccgtctcccgcgtgctgtctggcgcttctcagaagccggcaagcagagtgctggtagcatcccgtaattttgcaaatgatgctacatttgaaattaagaaatgtgaccttcaccggctggaagaaggccctcctgtcacaacagtgctcaccagggaggatgggctcaaatactacaggatgatgcagactgtacgccgaatggagttgaaagcagatcagctgtataaacagaaaattattcgtggtttctgtcacttgtgtgatggtcagtttctccttcctctaacacaggaagcttgctgtgtgggcctggaggccggcatcaaccccacagaccatctcatcacagcctaccgggctcacggctttactttcacccggggcctttccgtccgagaaattctcgcagagcttacaggacgaaaaggaggttgtgctaaagggaaaggaggatcgatgcacatgtatgccaagaacttctacgggggcaatggcatcgtgggagcgcaggtgcccctgggcgctgggattgctctagcctgtaagtataatggaaaagatgaggtctgcctgactttatatggcgatgg

SEQ ID NO: 172753 - DNA, 709 bp, Homo sapiens
  Payload ID: 13958
  Gene Symbol: PDHA1
  Gene Name: pyruvate dehydrogenase (lipoamide) alpha 1
  ENST ID: ENST00000379804
  CDS Start-End: 189-518
gaaacattggagagtttcattctcatacaggagcaggtcatgtgaaagtaaaatggtttggggcagttggattcatgcttcgcccctcccctgtttattaccaggtggatggaatggatatcctgtgcgtccgagaggcaacaaggtttgctgctgcctattgtagatctgggaaggggcccatcctgatggagctgcagacttaccgttaccacggacacagtatgagtgaccctggagtcagttaccgtacacgagaagaaattcaggaagtaagaagtaagagtgaccctattatgcttctcaaggacaggatggtgaacagcaatcttgccagtgtggaagaactaaaggaaattgatgtggaagtgaggaaggagattgaggatgctgcccagtttgccacggccgatcctgagccacctttggaagagctgggctaccacatctactccagcgacccaccttttgaagttcgtggtgccaatcagtggatcaagtttaagtcagtcagttaaggggaggagaaggagaggttataccttcagggggctaccagacagtgttctcaacttggttaaggaggaagaaaacccagtcaatgaaattcaatgaaattcttggaaacttccattaagtgtgtagattgagcaggtagtaattgcatgcagtttgtacattagtgcattaaaagatgaattattgagtg

SEQ ID NO: 172754 - DNA, 734 bp, Homo sapiens
  Payload ID: 13958
  Gene Symbol: PDHA1
  Gene Name: pyruvate dehydrogenase (lipoamide) alpha 1
  ENST ID: ENST00000379805
  CDS Start-End: 71-613
gacttgggggcacccgcgtcgtgcctcctgggttgtgaggagtcgccgctgccgccactgcctgtgcttcatgaggaagatgctcgccgccgtctcccgcgtgctgtctggcgcttctcagaagccggcaagcagagtgctggtagcatcccgtaattttgcaaatgatgctacatttgaaattaagaaatgtgaccttcaccggctggaagaaggccctcctgtcacaacagtgctcaccagggaggatgggctcaaatactacaggatgatgcagactgtacgccgaatggagttgaaagcagatcagctgtataaacagaaaattattcgtggtttctgtcacttgtgtgatggtcaggaagcttgctgtgtgggcctggaggccggcatcaaccccacagaccatctcatcacagcctaccgggctcacggctttactttcacccggggcctttccgtccgagaaattctcgcagagcttacaggacgaaaaggaggttgtgctaaagggaaaggaggatcgatgcacatgtatgccaagaacttctacgggggcaatggcatcgtgggagcgcaggtagtcaaggacgaggattgtgtgctgctttagatttggccctggactttgtcttcaaaaactttcacagccccagacaacttttcctgaagtagtacagccatgtgctgcacagtgacgctttggtcaatgtcgcatatatgatgttggaccc

SEQ ID NO: 172755 - DNA, 3484 bp, Homo sapiens
  Payload ID: 13958
  Gene Symbol: PDHA1
  Gene Name: pyruvate dehydrogenase (lipoamide) alpha 1
  Uniprot ID: P08559
  ENST ID: ENST00000379806
  CDS Start-End: 146-1432
agcgcatgacgttattacgactctgtcacgccgcggtgcgactgaggcgtggcgtctgctggggcacctgaaggagacttgggggcacccgcgtcgtgcctcctgggttgtgaggagtcgccgctgccgccactgcctgtgcttcatgaggaagatgctcgccgccgtctcccgcgtgctgtctggcgcttctcagaagccgagacatggtcttgctacgttgcccagtctggtctccatctccaggctcaagcagtcctcccacctcggcctcccaaagtgctgggattactctcactctcttaaaaccaggcaggcaagcagagtgctggtagcatcccgtaattttgcaaatgatgctacatttgaaattaagaaatgtgaccttcaccggctggaagaaggccctcctgtcacaacagtgctcaccagggaggatgggctcaaatactacaggatgatgcagactgtacgccgaatggagttgaaagcagatcagctgtataaacagaaaattattcgtggtttctgtcacttgtgtgatggtcaggaagcttgctgtgtgggcctggaggccggcatcaaccccacagaccatctcatcacagcctaccgggctcacggctttactttcacccggggcctttccgtccgagaaattctcgcagagcttacaggacgaaaaggaggttgtgctaaagggaaaggaggatcgatgcacatgtatgccaagaacttctacgggggcaatggcatcgtgggagcgcaggtgcccctgggcgctgggattgctctagcctgtaagtataatggaaaagatgaggtctgcctgactttatatggcgatggtgctgctaaccagggccagatattcgaagcttacaacatggcagctttgtggaaattaccttgtattttcatctgtgagaataatcgctatggaatgggaacgtctgttgagagagcggcagccagcactgattactacaagagaggcgatttcattcctgggctgagagtggatggaatggatatcctgtgcgtccgagaggcaacaaggtttgctgctgcctattgtagatctgggaaggggcccatcctgatggagctgcagacttaccgttaccacggacacagtatgagtgaccctggagtcagttaccgtacacgagaagaaattcaggaagtaagaagtaagagtgaccctattatgcttctcaaggacaggatggtgaacagcaatcttgccagtgtggaagaactaaaggaaattgatgtggaagtgaggaaggagattgaggatgctgcccagtttgccacggccgatcctgagccacctttggaagagctgggctaccacatctactccagcgacccaccttttgaagttcgtggtgccaatcagtggatcaagtttaagtcagtcagttaaggggaggagaaggagaggttataccttcagggggctaccagacagtgttctcaacttggttaaggaggaagaaaacccagtcaatgaaattcaatgaaattcttggaaacttccattaagtgtgtagattgagcaggtagtaattgcatgcagtttgtacattagtgcattaaaagatgaattattgagtgcttaaagattatttttgacttaaaatagtatactttgaacaaatactctaattatgaaaaggaagaacaattccttgtatgcctgtttcccctgcccccagccacctttttgggaggagaccattatggcggggcccctcacagcattctaccaaccatagcacccaccccgagcagcgctggtgctgcagcctgttcgcgctgaccatttctctacaagatacaatatttattatcaggcaagaggacagttccattttaaaataagacttttgtaatcattccaattttgtaatcatttcaaaggccacataacttagttttctctacttacacattcagtataaatatgaagctattttctgttcatatcaaacattaactacaaggcacattcgtatcagttttgtgtttctcaaattgaagtaccataccagttctgaggcagtgtcccagcttccatgtttgttaaataccccttgtttgtttcaccattccagcaagtgctgaagggtgtactttttttgagacagggtcgggctctgttgcccaggctggagtgcagtggtgtgatcatggctcactgcagcctccacacctcctgggctcaagcaatcctcccacctcagcctcctgcatagctgggactacaagtgaatttcctaatattccgggaggtcaaaaccaaggctcactgttttcacaatacacacagttctatgtttataaataacaggtttcaaaagaaactcaggacagtatttaaaacaagttcttaaactattaattgaacaatggcatttttaaatatgtaaacacagcggaattcgtgtatacactaacagaagctttaacaaaacatgtagcgtggtgggacactctgccacagcttagctgattggtatcaagccttgtctttggtttctgaggcctcctgagcccttctgtactgggagaccgcactccagagtctgcagaggagaccacccctgggaaacaaacacagctgtcttcagagtcagtgcttcaagccaacagagcttaaaactgcagtccctaatttaaaaacctaatgaaaataaaaacattctcctcacatatggaggtgacgctcgtgtcccagcagtagtaggacatggccttagaggtacgtacctgcagagagctggctatttcaaatgactcgggaacaagaaggcaggctgcagtttaaagaagggggtgggtccagcgtgcaggcacgcttgccatgtgcctccacccactcccagccaggcattaatggcaggagattggccagctcttctctgtcacattcctatttctgacttctgcctggctttcagtttctgccccaccttggctttttcccagcttgaacctaatagaactccagagtttggggggaggcccagccctttgttttctgctcttgaagcatattcacacataaaaagttgtattctcttatacaaactgttttgaggctcttaccgtagtcgaaggtatcttagatcttccttagtgatctcattaagaatatccgaaagtgtataaccctcttcaacaatctgaaacaaagatcagatccttaagagctgagcagctgtgtaacaacagcataagaatttctttgttgtaaatttaccttttcaattgtctttgcatcagctccttgcagccgcaaccagtctataagctctttatctgttctctgcccgtaggggcctgctgggttctctgtaatacctgtaacgattggcaatttgttatatattagtctaaccataaaactcttcaaaagtaaccagttggattaataaatgattccagaatgtaaatgtgatgtgaaaaagagatg

SEQ ID NO: 172756 - DNA, 3310 bp, Homo sapiens
  Payload ID: 13958
  Gene Symbol: PDHA1
  Gene Name: pyruvate dehydrogenase (lipoamide) alpha 1
  Uniprot ID: P08559
  ENST ID: ENST00000422285
  CDS Start-End: 106-1278
actgaggcgtggcgtctgctggggcacctgaaggagacttgggggcacccgcgtcgtgcctcctgggttgtgaggagtcgccgctgccgccactgcctgtgcttcatgaggaagatgctcgccgccgtctcccgcgtgctgtctggcgcttctcagaagccggcaagcagagtgctggtagcatcccgtaattttgcaaatgatgctacatttgaaattaagaaatgtgaccttcaccggctggaagaaggccctcctgtcacaacagtgctcaccagggaggatgggctcaaatactacaggatgatgcagactgtacgccgaatggagttgaaagcagatcagctgtataaacagaaaattattcgtggtttctgtcacttgtgtgatggtcaggaagcttgctgtgtgggcctggaggccggcatcaaccccacagaccatctcatcacagcctaccgggctcacggctttactttcacccggggcctttccgtccgagaaattctcgcagagcttacaggacgaaaaggaggttgtgctaaagggaaaggaggatcgatgcacatgtatgccaagaacttctacgggggcaatggcatcgtgggagcgcaggtgcccctgggcgctgggattgctctagcctgtaagtataatggaaaagatgaggtctgcctgactttatatggcgatggtgctgctaaccagggccagatattcgaagcttacaacatggcagctttgtggaaattaccttgtattttcatctgtgagaataatcgctatggaatgggaacgtctgttgagagagcggcagccagcactgattactacaagagaggcgatttcattcctgggctgagagtggatggaatggatatcctgtgcgtccgagaggcaacaaggtttgctgctgcctattgtagatctgggaaggggcccatcctgatggagctgcagacttaccgttaccacggacacagtatgagtgaccctggagtcagttaccgtacacgagaagaaattcaggaagtaagaagtaagagtgaccctattatgcttctcaaggacaggatggtgaacagcaatcttgccagtgtggaagaactaaaggaaattgatgtggaagtgaggaaggagattgaggatgctgcccagtttgccacggccgatcctgagccacctttggaagagctgggctaccacatctactccagcgacccaccttttgaagttcgtggtgccaatcagtggatcaagtttaagtcagtcagttaaggggaggagaaggagaggttataccttcagggggctaccagacagtgttctcaacttggttaaggaggaagaaaacccagtcaatgaaattcaatgaaattcttggaaacttccattaagtgtgtagattgagcaggtagtaattgcatgcagtttgtacattagtgcattaaaagatgaattattgagtgcttaaagattatttttgacttaaaatagtatactttgaacaaatactctaattatgaaaaggaagaacaattccttgtatgcctgtttcccctgcccccagccacctttttgggaggagaccattatggcggggcccctcacagcattctaccaaccatagcacccaccccgagcagcgctggtgctgcagcctgttcgcgctgaccatttctctacaagatacaatatttattatcaggcaagaggacagttccattttaaaataagacttttgtaatcattccaattttgtaatcatttcaaaggccacataacttagttttctctacttacacattcagtataaatatgaagctattttctgttcatatcaaacattaactacaaggcacattcgtatcagttttgtgtttctcaaattgaagtaccataccagttctgaggcagtgtcccagcttccatgtttgttaaataccccttgtttgtttcaccattccagcaagtgctgaagggtgtactttttttgagacagggtcgggctctgttgcccaggctggagtgcagtggtgtgatcatggctcactgcagcctccacacctcctgggctcaagcaatcctcccacctcagcctcctgcatagctgggactacaagtgaatttcctaatattccgggaggtcaaaaccaaggctcactgttttcacaatacacacagttctatgtttataaataacaggtttcaaaagaaactcaggacagtatttaaaacaagttcttaaactattaattgaacaatggcatttttaaatatgtaaacacagcggaattcgtgtatacactaacagaagctttaacaaaacatgtagcgtggtgggacactctgccacagcttagctgattggtatcaagccttgtctttggtttctgaggcctcctgagcccttctgtactgggagaccgcactccagagtctgcagaggagaccacccctgggaaacaaacacagctgtcttcagagtcagtgcttcaagccaacagagcttaaaactgcagtccctaatttaaaaacctaatgaaaataaaaacattctcctcacatatggaggtgacgctcgtgtcccagcagtagtaggacatggccttagaggtacgtacctgcagagagctggctatttcaaatgactcgggaacaagaaggcaggctgcagtttaaagaagggggtgggtccagcgtgcaggcacgcttgccatgtgcctccacccactcccagccaggcattaatggcaggagattggccagctcttctctgtcacattcctatttctgacttctgcctggctttcagtttctgccccaccttggctttttcccagcttgaacctaatagaactccagagtttggggggaggcccagccctttgttttctgctcttgaagcatattcacacataaaaagttgtattctcttatacaaactgttttgaggctcttaccgtagtcgaaggtatcttagatcttccttagtgatctcattaagaatatccgaaagtgtataaccctcttcaacaatctgaaacaaagatcagatccttaagagctgagcagctgtgtaacaacagcataagaatttctttgttgtaaatttaccttttcaattgtctttgcatcagctccttgcagccgcaaccagtctataagctctttatctgttctctgcccgtaggggcctgctgggttctctgtaatacctgtaacgattggcaatttgttatatattagtctaaccataaaactcttcaaaagtaaccagttggattaataaatgattccagaatgtaaa

SEQ ID NO: 172757 - DNA, 471 bp, Homo sapiens
  Payload ID: 13958
  Gene Symbol: PDHA1
  Gene Name: pyruvate dehydrogenase (lipoamide) alpha 1
  ENST ID: ENST00000417819
  CDS Start-End: 109-471
gcgactgaggcgtggcgtctgctggggcacctgaaggagacttgggggcacccgcgtcgtgcctcctgggttgtgaggagtcgccgctgccgccactgcctgtgcttcatgaggaagatgctcgccgccgtctcccgcgtgctgtctggcgcttctcagaagccgtttgcagggtccccccccccccgccaccttacagtaggaagaaaattgagttccagatatgaagtcacctttgaaagtgcccaggcaagcagagtgctggtagcatcccgtaattttgcaaatgatgctacatttgaaattaagaaatgtgaccttcaccggctggaagaaggccctcctgtcacaacagtgctcaccagggaggatgggctcaaatactacaggatgatgcagactgtacgccgaatggagttgaaagcagatcagctgtataaacagaaaattattcgtggtttctgtcacttg

SEQ ID NO: 172758 - DNA, 731 bp, Homo sapiens
  Payload ID: 13958
  Gene Symbol: PDHA1
  Gene Name: pyruvate dehydrogenase (lipoamide) alpha 1
  ENST ID: ENST00000423505
  CDS Start-End: 117-731
gccgcggtgcgactgaggcgtggcgtctgctggggcacctgaaggagacttgggggcacccgcgtcgtgcctcctgggttgtgaggagtcgccgctgccgccactgcctgtgcttcatgaggaagatgctcgccgccgtctcccgcgtgctgtctggcgcttctcagaagccgagacatggtcttgctacgttgcccagtctggtctccatctccaggctcaagcagtcctcccacctcggcctcccaaagtgctgggattactctcactctcttaaaaccaggcaggcaagcagagtgctggtagcatcccgtaattttgcaaatgatgctacatttgaaattaagaaatgtgaccttcaccggctggaagaaggccctcctgtcacaacagtgctcaccagggaggatgggctcaaatactacaggatgatgcagactgtacgccgaatggagttgaaagcagatcagctgtataaacagaaaattattcgtggtttctgtcacttgtgtgatggtcaggaagcttgctgtgtgggcctggaggccggcatcaaccccacagaccatctcatcacagcctaccgggctcacggctttactttcacccggggcctttccgtccgagaaattctcgcagagcttacaggacgaaaaggaggttgtgctaaagggaaaggaggatcgatgcacatgtatgccaagaacttctacgggggcaatggcatcgtg

SEQ ID NO: 172759 - DNA, 3391 bp, Homo sapiens
  Payload ID: 13958
  Gene Symbol: PDHA1
  Gene Name: pyruvate dehydrogenase (lipoamide) alpha 1
  Uniprot ID: P08559
  ENST ID: ENST00000545074
  CDS Start-End: 146-1339
agcgcatgacgttattacgactctgtcacgccgcggtgcgactgaggcgtggcgtctgctggggcacctgaaggagacttgggggcacccgcgtcgtgcctcctgggttgtgaggagtcgccgctgccgccactgcctgtgcttcatgaggaagatgctcgccgccgtctcccgcgtgctgtctggcgcttctcagaagccggcaagcagagtgctggtagcatcccgtaattttgcaaatgatgctacatttgaaattaagaaatgtgaccttcaccggctggaagaaggccctcctgtcacaacagtgctcaccagggaggatgggctcaaatactacaggatgatgcagactgtacgccgaatggagttgaaagcagatcagctgtataaacagaaaattattcgtggtttctgtcacttgtgtgatggtcagtttctccttcctctaacacaggaagcttgctgtgtgggcctggaggccggcatcaaccccacagaccatctcatcacagcctaccgggctcacggctttactttcacccggggcctttccgtccgagaaattctcgcagagcttacaggacgaaaaggaggttgtgctaaagggaaaggaggatcgatgcacatgtatgccaagaacttctacgggggcaatggcatcgtgggagcgcaggtgcccctgggcgctgggattgctctagcctgtaagtataatggaaaagatgaggtctgcctgactttatatggcgatggtgctgctaaccagggccagatattcgaagcttacaacatggcagctttgtggaaattaccttgtattttcatctgtgagaataatcgctatggaatgggaacgtctgttgagagagcggcagccagcactgattactacaagagaggcgatttcattcctgggctgagagtggatggaatggatatcctgtgcgtccgagaggcaacaaggtttgctgctgcctattgtagatctgggaaggggcccatcctgatggagctgcagacttaccgttaccacggacacagtatgagtgaccctggagtcagttaccgtacacgagaagaaattcaggaagtaagaagtaagagtgaccctattatgcttctcaaggacaggatggtgaacagcaatcttgccagtgtggaagaactaaaggaaattgatgtggaagtgaggaaggagattgaggatgctgcccagtttgccacggccgatcctgagccacctttggaagagctgggctaccacatctactccagcgacccaccttttgaagttcgtggtgccaatcagtggatcaagtttaagtcagtcagttaaggggaggagaaggagaggttataccttcagggggctaccagacagtgttctcaacttggttaaggaggaagaaaacccagtcaatgaaattcaatgaaattcttggaaacttccattaagtgtgtagattgagcaggtagtaattgcatgcagtttgtacattagtgcattaaaagatgaattattgagtgcttaaagattatttttgacttaaaatagtatactttgaacaaatactctaattatgaaaaggaagaacaattccttgtatgcctgtttcccctgcccccagccacctttttgggaggagaccattatggcggggcccctcacagcattctaccaaccatagcacccaccccgagcagcgctggtgctgcagcctgttcgcgctgaccatttctctacaagatacaatatttattatcaggcaagaggacagttccattttaaaataagacttttgtaatcattccaattttgtaatcatttcaaaggccacataacttagttttctctacttacacattcagtataaatatgaagctattttctgttcatatcaaacattaactacaaggcacattcgtatcagttttgtgtttctcaaattgaagtaccataccagttctgaggcagtgtcccagcttccatgtttgttaaataccccttgtttgtttcaccattccagcaagtgctgaagggtgtactttttttgagacagggtcgggctctgttgcccaggctggagtgcagtggtgtgatcatggctcactgcagcctccacacctcctgggctcaagcaatcctcccacctcagcctcctgcatagctgggactacaagtgaatttcctaatattccgggaggtcaaaaccaaggctcactgttttcacaatacacacagttctatgtttataaataacaggtttcaaaagaaactcaggacagtatttaaaacaagttcttaaactattaattgaacaatggcatttttaaatatgtaaacacagcggaattcgtgtatacactaacagaagctttaacaaaacatgtagcgtggtgggacactctgccacagcttagctgattggtatcaagccttgtctttggtttctgaggcctcctgagcccttctgtactgggagaccgcactccagagtctgcagaggagaccacccctgggaaacaaacacagctgtcttcagagtcagtgcttcaagccaacagagcttaaaactgcagtccctaatttaaaaacctaatgaaaataaaaacattctcctcacatatggaggtgacgctcgtgtcccagcagtagtaggacatggccttagaggtacgtacctgcagagagctggctatttcaaatgactcgggaacaagaaggcaggctgcagtttaaagaagggggtgggtccagcgtgcaggcacgcttgccatgtgcctccacccactcccagccaggcattaatggcaggagattggccagctcttctctgtcacattcctatttctgacttctgcctggctttcagtttctgccccaccttggctttttcccagcttgaacctaatagaactccagagtttggggggaggcccagccctttgttttctgctcttgaagcatattcacacataaaaagttgtattctcttatacaaactgttttgaggctcttaccgtagtcgaaggtatcttagatcttccttagtgatctcattaagaatatccgaaagtgtataaccctcttcaacaatctgaaacaaagatcagatccttaagagctgagcagctgtgtaacaacagcataagaatttctttgttgtaaatttaccttttcaattgtctttgcatcagctccttgcagccgcaaccagtctataagctctttatctgttctctgcccgtaggggcctgctgggttctctgtaatacctgtaacgattggcaatttgttatatattagtctaaccataaaactcttcaaaagtaaccagttggattaataaatgattccagaatgtaaatgtgatgtgaaaaagagatg

SEQ ID NO: 172760 - DNA, 3277 bp, Homo sapiens
  Payload ID: 13958
  Gene Symbol: PDHA1
  Gene Name: pyruvate dehydrogenase (lipoamide) alpha 1
  Uniprot ID: P08559
  ENST ID: ENST00000540249
  CDS Start-End: 146-1225
agcgcatgacgttattacgactctgtcacgccgcggtgcgactgaggcgtggcgtctgctggggcacctgaaggagacttgggggcacccgcgtcgtgcctcctgggttgtgaggagtcgccgctgccgccactgcctgtgcttcatgaggaagatgctcgccgccgtctcccgcgtgctgtctggcgcttctcagaagccggcaagcagagtgctggtagcatcccgtaattttgcaaatgatgctacatttgaaattaagaaatgtgaccttcaccggctggaagaaggccctcctgtcacaacagtgctcaccagggaggatgggctcaaatactacaggatgatgcagactgtacgccgaatggagttgaaagcagatcagctgtataaacagaaaattattcgtggtttctgtcacttgtgtgatggtcaggaagcttgctgtgtgggcctggaggccggcatcaaccccacagaccatctcatcacagcctaccgggctcacggctttactttcacccggggcctttccgtccgagaaattctcgcagagcttacaggacgaaaaggaggttgtgctaaagggaaaggaggatcgatgcacatgtatgccaagaacttctacgggggcaatggcatcgtgggagcgcagggccagatattcgaagcttacaacatggcagctttgtggaaattaccttgtattttcatctgtgagaataatcgctatggaatgggaacgtctgttgagagagcggcagccagcactgattactacaagagaggcgatttcattcctgggctgagagtggatggaatggatatcctgtgcgtccgagaggcaacaaggtttgctgctgcctattgtagatctgggaaggggcccatcctgatggagctgcagacttaccgttaccacggacacagtatgagtgaccctggagtcagttaccgtacacgagaagaaattcaggaagtaagaagtaagagtgaccctattatgcttctcaaggacaggatggtgaacagcaatcttgccagtgtggaagaactaaaggaaattgatgtggaagtgaggaaggagattgaggatgctgcccagtttgccacggccgatcctgagccacctttggaagagctgggctaccacatctactccagcgacccaccttttgaagttcgtggtgccaatcagtggatcaagtttaagtcagtcagttaaggggaggagaaggagaggttataccttcagggggctaccagacagtgttctcaacttggttaaggaggaagaaaacccagtcaatgaaattcaatgaaattcttggaaacttccattaagtgtgtagattgagcaggtagtaattgcatgcagtttgtacattagtgcattaaaagatgaattattgagtgcttaaagattatttttgacttaaaatagtatactttgaacaaatactctaattatgaaaaggaagaacaattccttgtatgcctgtttcccctgcccccagccacctttttgggaggagaccattatggcggggcccctcacagcattctaccaaccatagcacccaccccgagcagcgctggtgctgcagcctgttcgcgctgaccatttctctacaagatacaatatttattatcaggcaagaggacagttccattttaaaataagacttttgtaatcattccaattttgtaatcatttcaaaggccacataacttagttttctctacttacacattcagtataaatatgaagctattttctgttcatatcaaacattaactacaaggcacattcgtatcagttttgtgtttctcaaattgaagtaccataccagttctgaggcagtgtcccagcttccatgtttgttaaataccccttgtttgtttcaccattccagcaagtgctgaagggtgtactttttttgagacagggtcgggctctgttgcccaggctggagtgcagtggtgtgatcatggctcactgcagcctccacacctcctgggctcaagcaatcctcccacctcagcctcctgcatagctgggactacaagtgaatttcctaatattccgggaggtcaaaaccaaggctcactgttttcacaatacacacagttctatgtttataaataacaggtttcaaaagaaactcaggacagtatttaaaacaagttcttaaactattaattgaacaatggcatttttaaatatgtaaacacagcggaattcgtgtatacactaacagaagctttaacaaaacatgtagcgtggtgggacactctgccacagcttagctgattggtatcaagccttgtctttggtttctgaggcctcctgagcccttctgtactgggagaccgcactccagagtctgcagaggagaccacccctgggaaacaaacacagctgtcttcagagtcagtgcttcaagccaacagagcttaaaactgcagtccctaatttaaaaacctaatgaaaataaaaacattctcctcacatatggaggtgacgctcgtgtcccagcagtagtaggacatggccttagaggtacgtacctgcagagagctggctatttcaaatgactcgggaacaagaaggcaggctgcagtttaaagaagggggtgggtccagcgtgcaggcacgcttgccatgtgcctccacccactcccagccaggcattaatggcaggagattggccagctcttctctgtcacattcctatttctgacttctgcctggctttcagtttctgccccaccttggctttttcccagcttgaacctaatagaactccagagtttggggggaggcccagccctttgttttctgctcttgaagcatattcacacataaaaagttgtattctcttatacaaactgttttgaggctcttaccgtagtcgaaggtatcttagatcttccttagtgatctcattaagaatatccgaaagtgtataaccctcttcaacaatctgaaacaaagatcagatccttaagagctgagcagctgtgtaacaacagcataagaatttctttgttgtaaatttaccttttcaattgtctttgcatcagctccttgcagccgcaaccagtctataagctctttatctgttctctgcccgtaggggcctgctgggttctctgtaatacctgtaacgattggcaatttgttatatattagtctaaccataaaactcttcaaaagtaaccagttggattaataaatgattccagaatgtaaatgtgatgtgaaaaagagatg

SEQ ID NO: 172761 - DNA, 1456 bp, Homo sapiens
  Payload ID: 13959
  Gene Symbol: PDHA2
  Gene Name: pyruvate dehydrogenase (lipoamide) alpha 2
  Uniprot ID: P29803
  ENST ID: ENST00000295266
  CDS Start-End: 133-1299
tctatcacccgtgtgcactgcccggatggtgccaagcgcattggagcaccggaaggagacgcggagccgaggccaggccttccggcggtcgttacgggacgccgctgccatctacagcactccgtgaagaatatgctggccgccttcatctcccgcgtgttgaggcgagttgcccagaaatcagctcgcagagtgctggtggcatcccgtaactcctcaaatgacgctacatttgaaattaagaaatgtgatctttatctgttggaagagggtccccctgtcactacagtgctcactagggcggaggggcttaaatactacaggatgatgctgactgttcgccgcatggaattgaaggcagatcagctgtacaaacagaaattcattcgcggtttctgtcacctgtgcgatggtcaggaagcttgttgcgtgggccttgaggccggcataaacccctcggatcacgtcattacatcctatagggctcatggtgtgtgctatactcggggactttctgtccgatccattctcgcagagctgacgggaagaagaggaggttgtgctaaaggaaaaggaggatcgatgcatatgtataccaagaacttctatgggggcaatggcatcgtcggtgcacagggccccctgggcgctggcattgctctggcctgtaaatataaaggaaacgatgagatctgtttgactttatatggggatggcgctgcgaatcaggggcagatagccgaagctttcaatatggcagctttatggaaattaccttgtgttttcatctgtgagaataacctatatggaatgggaacatctactgagagagcagcagccagccctgattactacaagaggggcaattttatccctgggctaaaggtcgatggaatggatgttctgtgtgttcgtgaggcaacaaaatttgcagctaactactgtagatctggaaaggggcccatactgatggagctgcaaacctaccgttatcatggacacagtatgagtgatcctggagtcagttatcgtacacgagaagaaattcaggaagtaagaagtaagagggatcctataataattctccaagatagaatggtaaacagcaagctcgccactgtggaagaattaaaggaaattggggctgaggtgaggaaagaaattgatgatgctgcccagtttgctaccactgatcctgagccacatttggaagaattaggccatcacatctacagcagtgattcatcttttgaagttcgtggtgcaaatccatggatcaagtttaagtccgtcagttaaagggaggctacgtgtgaatttatcatcagtctctcaatggaatgttcatggtcaaatttaagaaactgtgttctcaactcaaggaggaataaaactcataaaacaaaagccttgtaagcatttattaaaagagattattaaaagagattgaaagaca

SEQ ID NO: 172762 - DNA, 1527 bp, Homo sapiens
  Payload ID: 13960
  Gene Symbol: PDHB
  Gene Name: pyruvate dehydrogenase (lipoamide) beta
  Uniprot ID: P11177
  ENST ID: ENST00000302746
  CDS Start-End: 44-1123
cccctctgttgtcgtttggcagcggatagaggacacgaccaagatggcggcggtgtctggcttggtgcggagaccccttcgggaggtctccgggctgctgaagaggcgctttcactggaccgcgccggctgcgctgcaggtgacagttcgtgatgctataaatcagggtatggatgaggagctggaaagagatgagaaggtatttctgcttggagaagaagttgcccagtatgatggggcatacaaggttagtcgagggctgtggaagaaatatggagacaagaggattattgacactcccatatcagagatgggctttgctggaattgctgtaggtgcagctatggctgggttgcggcccatttgtgaatttatgaccttcaatttctccatgcaagccattgaccaggttataaactcagctgccaagacctactacatgtctggtggccttcagcctgtgcctatagtcttcagagggcccaatggtgcctcagcaggtgtagctgcccagcactcacagtgctttgctgcctggtatgggcactgcccaggcttaaaggtggtcagtccctggaattcagaggatgctaaaggacttattaaatcagccattcgggataacaatccagtggtggtgctagagaatgaattgatgtatggggttccttttgaatttcctccggaagctcagtcaaaagattttctgattcctattggaaaagccaaaatagaaaggcaaggaacacatataactgtggtttcccattcaagacctgtgggccactgcttagaagctgcagcagtgctatctaaagaaggagttgaatgtgaggtgataaatatgcgtaccattagaccaatggacatggaaaccatagaagccagtgtcatgaagacaaatcatcttgtaactgtggaaggaggctggccacagtttggagtaggagctgaaatctgtgccaggatcatggaaggtcctgcgttcaatttcctggatgctcctgctgttcgtgtcactggtgctgatgtccctatgccttatgcaaagattctagaggacaactctatacctcaggtcaaagacatcatatttgcaataaagaaaacattaaatatttagtttggacttgaatatcaagtcgttgaaatttatttgaaatacttgctggcactgcacctggatttgtactgcaagacctgactattcataacggaaaacgatttctaaagcaacagcaggtatttttgtacagggaagtttaaatgtgtttgtgtatggaaaactctccactctcctcccctagatgccatgcttccttttgtctgttacggttgccatgttctttgaataacaaattatataacattttatcctctctcaccacaaggacaaagtatggatgtggcagagtcctcatgaaagatgtatccaaacaagataacttatatgtataaaattaaagcatataatatacatttactgttagtttgttttgataaggaataaaggaatttctaacatga

SEQ ID NO: 172763 - DNA, 1478 bp, Homo sapiens
  Payload ID: 13960
  Gene Symbol: PDHB
  Gene Name: pyruvate dehydrogenase (lipoamide) beta
  Uniprot ID: P11177
  ENST ID: ENST00000383714
  CDS Start-End: 49-1074
gccggcccctctgttgtcgtttggcagcggatagaggacacgaccaagatggcggcggtgtctggcttggtgcggagaccccttcgggaggtgacagttcgtgatgctataaatcagggtatggatgaggagctggaaagagatgagaaggtatttctgcttggagaagaagttgcccagtatgatggggcatacaaggttagtcgagggctgtggaagaaatatggagacaagaggattattgacactcccatatcagagatgggctttgctggaattgctgtaggtgcagctatggctgggttgcggcccatttgtgaatttatgaccttcaatttctccatgcaagccattgaccaggttataaactcagctgccaagacctactacatgtctggtggccttcagcctgtgcctatagtcttcagagggcccaatggtgcctcagcaggtgtagctgcccagcactcacagtgctttgctgcctggtatgggcactgcccaggcttaaaggtggtcagtccctggaattcagaggatgctaaaggacttattaaatcagccattcgggataacaatccagtggtggtgctagagaatgaattgatgtatggggttccttttgaatttcctccggaagctcagtcaaaagattttctgattcctattggaaaagccaaaatagaaaggcaaggaacacatataactgtggtttcccattcaagacctgtgggccactgcttagaagctgcagcagtgctatctaaagaaggagttgaatgtgaggtgataaatatgcgtaccattagaccaatggacatggaaaccatagaagccagtgtcatgaagacaaatcatcttgtaactgtggaaggaggctggccacagtttggagtaggagctgaaatctgtgccaggatcatggaaggtcctgcgttcaatttcctggatgctcctgctgttcgtgtcactggtgctgatgtccctatgccttatgcaaagattctagaggacaactctatacctcaggtcaaagacatcatatttgcaataaagaaaacattaaatatttagtttggacttgaatatcaagtcgttgaaatttatttgaaatacttgctggcactgcacctggatttgtactgcaagacctgactattcataacggaaaacgatttctaaagcaacagcaggtatttttgtacagggaagtttaaatgtgtttgtgtatggaaaactctccactctcctcccctagatgccatgcttccttttgtctgttacggttgccatgttctttgaataacaaattatataacattttatcctctctcaccacaaggacaaagtatggatgtggcagagtcctcatgaaagatgtatccaaacaagataacttatatgtataaaattaaagcatataatatacatttactgttagtttgttttgataaggaataaaggaatttctaacatga

SEQ ID NO: 172764 - DNA, 1397 bp, Homo sapiens
  Payload ID: 13960
  Gene Symbol: PDHB
  Gene Name: pyruvate dehydrogenase (lipoamide) beta
  Uniprot ID: P11177
  ENST ID: ENST00000485460
  CDS Start-End: 10-1035
acgaccaagatggcggcggtgtctggcttggtgcggagaccccttcgggaggtctccgggctgctgaagaggcgctttcactggaccgcgccggctgcgctgcaggtgacagttcgtgatgctataaatcagggtatggatgaggagctggaaagagatgagaaggtatttctgcttggagaagaagttgcccagtatgatggggcatacaaggttagtcgagggctgtggaagaaatatggagacaagaggattattgacactcccatatcagagatgggctttgctggaattgctgtaggtgcagctatggctgggttgcggcccatttgtgaatttatgaccttcaatttctccatgcaagccattgaccaggttataaactcagctgccaagacctactacatgtctggtgtagctgcccagcactcacagtgctttgctgcctggtatgggcactgcccaggcttaaaggtggtcagtccctggaattcagaggatgctaaaggacttattaaatcagccattcgggataacaatccagtggtggtgctagagaatgaattgatgtatggggttccttttgaatttcctccggaagctcagtcaaaagattttctgattcctattggaaaagccaaaatagaaaggcaaggaacacatataactgtggtttcccattcaagacctgtgggccactgcttagaagctgcagcagtgctatctaaagaaggagttgaatgtgaggtgataaatatgcgtaccattagaccaatggacatggaaaccatagaagccagtgtcatgaagacaaatcatcttgtaactgtggaaggaggctggccacagtttggagtaggagctgaaatctgtgccaggatcatggaaggtcctgcgttcaatttcctggatgctcctgctgttcgtgtcactggtgctgatgtccctatgccttatgcaaagattctagaggacaactctatacctcaggtcaaagacatcatatttgcaataaagaaaacattaaatatttagtttggacttgaatatcaagtcgttgaaatttatttgaaatacttgctggcactgcacctggatttgtactgcaagacctgactattcataacggaaaacgatttctaaagcaacagcaggtatttttgtacagggaagtttaaatgtgtttgtgtatggaaaactctccactctcctcccctagatgccatgcttccttttgtctgttacggttgccatgttctttgaataacaaattatataacattttatcctctctcaccacaaggacaaagtatggatgtggcagagtcctcatgaaagatgtatccaaacaagataacttatatgtataaaattaaagcatataatatacatttact

SEQ ID NO: 172765 - DNA, 1503 bp, Homo sapiens
  Payload ID: 13960
  Gene Symbol: PDHB
  Gene Name: pyruvate dehydrogenase (lipoamide) beta
  ENST ID: ENST00000474765
  CDS Start-End: 6-1058
ccaagatggcggcggtgtctggcttggtgcggagaccccttcgggaggtgacagttcgtgatgctataaatcagggtatggatgaggagctggaaagagatgagaaggtatttctgcttggagaagaagttgcccagtatgatggggcatacaaggttagtcgagggctgtggaagaaatatggagacaagaggattattgacactcccatatcagagatgggctttgctggaattgctgtaggtgcagctatggctgggttgcggcccatttgtgaatttatgaccttcaatttctccatgcaagccattgaccaggttataaactcagctgccaagacctactacatgtctggtggccttcagcctgtgcctatagtcttcagagggcccaatggtgcctcagcaggtgtagctgcccagcactcacagtgctttgctgcctggtatgggcactgcccaggcttaaaggtggtcagtccctggaattcagaggatgctaaaggacttattaaatcagccattcgggataacaatccagtggtggtgctagagaatgaattgatgtatggggttccttttgaatttcctccggaagctcagtcaaaagattttctgattcctattggaaaagccaaaatagaaaggcaaggaacacatataactgtggtttcccattcaagacctgtgggccactgcttagaagctgcagcagtgctatctaaagaaggagttgaatgtgaggtgataaatatgcgtaccattagaccaatggacatggaaaccatagaagccagtgtcatgaagacaaatcatcttgtaactgtggaaggaggctggccacagtttggagtaggagctgaaatctgtgccaggatcatggaaggtatttcaaagaaactggttctagaatacagtcaagctatagtaaacatcatgtacctgaatacgtacaggataaagagattgaaagctaggagtggccaaacgacttcaactttaaacttgtcctgcgttcaatttcctggatgctcctgctgttcgtgtcactggtgctgatgtccctatgccttatgcaaagattctagaggacaactctatacctcaggtcaaagacatcatatttgcaataaagaaaacattaaatatttagtttggacttgaatatcaagtcgttgaaatttatttgaaatacttgctggcactgcacctggatttgtactgcaagacctgactattcataacggaaaacgatttctaaagcaacagcaggtatttttgtacagggaagtttaaatgtgtttgtgtatggaaaactctccactctcctcccctagatgccatgcttccttttgtctgttacggttgccatgttctttgaataacaaattatataacattttatcctctctcaccacaaggacaaagtatggatgtggcagagtcctcatgaaagatgtatccaaacaagataacttatatgtataaaattaaagcatataat

SEQ ID NO: 172766 - DNA, 1616 bp, Homo sapiens
  Payload ID: 13960
  Gene Symbol: PDHB
  Gene Name: pyruvate dehydrogenase (lipoamide) beta
  ENST ID: ENST00000469364
  CDS Start-End: 12-767
acacgaccaagatggcggcggtgtctggcttggtgcggagaccccttcgggaggtctccgggctgctgaagaggcgctttcactggaccgcgccggctgcgctgcaggtgacagttcgtgatgctataaatcagggtatggatgaggagctggaaagagatgagaaggtatttctgcttggagaagaagttgcccagtatgatggggcatacaaggttagtcgagggctgtggaagaaatatggagacaagaggattattgacactcccatatcagagatgggctttgctggaattgctgtaggtgcagctatggctgggttgcggcccatttgtgaatttatgaccttcaatttctccatgcaagccattgaccaggttataaactcagctgccaagacctactacatgtctggtggccttcagcctgtgcctatagtcttcagagggcccaatggtgcctcagcaggtgtagctgcccagcactcacagtgctttgctgcctggtatgggcactgcccaggcttaaaggtggtcagtccctggaattcagaggatgctaaaggacttattaaatcagccattcgggataacaatccagtggtggtgctagagaatgaattgatgtatggggttccttttgaatttcctccggaagctcagtcaaaagattttctgattcctattggaaaagccaaaatagaaaggcaaggaaggctgccacattcctcagctcactggaatgaagttgaattgaagactttatgaatgaacaagagccacagctggcggcacagtggtgtagcatcttcagtttcaacctgatctctgatctgtgaccactctgttttcaggaacacatataactgtggtttcccattcaagacctgtgggccactgcttagaagctgcagcagtgctatctaaagaaggagttgaatgtgaggtgataaatatgcgtaccattagaccaatggacatggaaaccatagaagccagtgtcatgaagacaaatcatcttgtaactgtggaaggaggctggccacagtttggagtaggagctgaaatctgtgccaggatcatggaaggtcctgcgttcaatttcctggatgctcctgctgttcgtgtcactggtgctgatgtccctatgccttatgcaaagattctagaggacaactctatacctcaggtcaaagacatcatatttgcaataaagaaaacattaaatatttagtttggacttgaatatcaagtcgttgaaatttatttgaaatacttgctggcactgcacctggatttgtactgcaagacctgactattcataacggaaaacgatttctaaagcaacagcaggtatttttgtacagggaagtttaaatgtgtttgtgtatggaaaactctccactctcctcccctagatgccatgcttccttttgtctgttacggttgccatgttctttgaataacaaattatataacattttatcctctctcaccacaaggacaaagtatggatgtggcagagtcctcatgaaagatgtatccaaacaagataacttatatgtataaaattaaagcatataatatacatttactgttagtttgttttgataagga

SEQ ID NO: 172767 - DNA, 2389 bp, Homo sapiens
  Payload ID: 13961
  Gene Symbol: PDHX
  Gene Name: pyruvate dehydrogenase complex, component X
  Uniprot ID: O00330
  ENST ID: ENST00000227868
  CDS Start-End: 85-1590
gggcgtggccaaccatgcgggaggcggggccttgatgctggacatcaggctgtgctgcgggcagccagtgagaaggccgtcaagatggcggcctcctggaggctgggctgtgatccgcggctgctgcgttatcttgtgggcttccccggccgccgaagcgtagggctggtgaagggggctcttgggtggtctgtaagccgcggagctaattggagatggtttcacagcacgcagtggcttcggggtgatcccattaagatactaatgccatcactgtctcctacaatggaagaaggaaacattgtgaaatggctgaaaaaggaaggtgaagcggtgagtgctggagatgcattatgtgaaattgagactgacaaagctgtggttaccttagatgcaagtgatgatggaatcttggccaaaatcgtggttgaagaaggaagtaaaaatatacggctaggttcactaattggtttgatagtagaagaaggagaagattggaaacatgttgaaattcccaaagacgtaggtcctccaccaccagtttcaaaaccttcagagcctcgcccctcaccagaaccacagatttccatccctgtcaagaaggaacacatacccgggacactacggttccgtttaagtccagctgcccgcaatattctggaaaaacactcactggatgctagccagggcacagccactggccctcgggggatattcactaaagaggatgctctcaaacttgtccagttgaaacaaacgggcaagattaccgagtccagaccaactccagcccccacagccactcccacagcaccttcgcccctacaggccacagctggaccatcttatccccggcctgtgatcccaccagtatcaactcctggacaacccaatgcagtgggcacattcactgaaatccccgccagcaatattcgaagagttattgccaagagattaactgaatctaaaagtactgtacctcatgcatatgctactgctgactgtgaccttggagctgttttaaaagttaggcaagatctggtcaaagatgacattaaagtatcagtaaatgattttatcatcaaggcagcagctgttacccttaaacaaatgccagatgttaatgtaagctgggatggagagggcccaaagcaactgccatttattgacatttcagtggctgtggcaacagataaaggcttacttactccaatcataaaagatgctgctgctaaaggtatccaggaaattgctgactctgtaaaggctctatcaaagaaagcaagagatggaaaattgttgcctgaagaataccaaggaggatcttttagtatttccaacttggggatgtttggcatcgacgaatttactgcagtgattaaccctcctcaggcctgcattttggcggttgggaggttccgacctgtgctgaagctcactgaggatgaagagggaaatgccaaactgcagcagcgccagctcataacagtcacaatgtcaagtgacagtcgagtggttgatgacgaactggcaaccaggtttcttaaaagttttaaagcaaacctagagaatcctatccgacttgcctagtcctcaaagataagaagttggtgttcagcttagttgattcagtagttgttaccaagaaacatatgttataggaaaacaacttggtatttaagtatgaagtggatgaaatgtttatttatttaaggtgaaagcatttgacccagggtgtcttcatcttcaatttgggtttaatgttatagaaataaatgatgataaactctaactaataaaggaaagagaatatttggttactcagatccatttttaacctctggtgctgtataaagggaatattaaactagatgtaaatcaaagtatatgtttggctcatttgagcattttggaatatttgagaatgtatgatacatgtaaaattaaaaaaactattagaactgtaccataattatgttgaaggtagaagtgatcttcaaagagatggccattaacttagcagtgggacctcacttttacaagcactgctctagatatacttgaagaatttaataggtacagaagtttattctggataataaataaataaggatcacactgtattaggggttatggcaacattattgaattttttatgtacataaagccatatgtttagggtggtttctatctgtcttgtttttcacttatataacactgtgaacttctaaagcaagaggataaaagaagcatgaatgaaaagaatgacatttcaaaaaaatggttcaatgaaaaactatagctaaaatatgtaaacctttctaggtaaaccgcttgccttcatcttgagtcggaatatatttaaataaattgtgttatctcttgccaa

SEQ ID NO: 172768 - DNA, 2653 bp, Homo sapiens
  Payload ID: 13961
  Gene Symbol: PDHX
  Gene Name: pyruvate dehydrogenase complex, component X
  Uniprot ID: O00330
  ENST ID: ENST00000448838
  CDS Start-End: 243-1703
aaacgcccggcccgctaccctgcgcccagctccagccgccgggtcccgcctgggcctctcctcctgggaataccgggcaccggtggccccgcccctacctgcgcgccgcatctccgggaacaacagtctccctcccgagcatcacagccagacatggcccagaccagggacccgcgcggcctccaatctccgcacggctttgcgcgcggcgcttagcctgggatacggcagcgaggccgcaaatgcaatcaggcggcgctgagggcagcccgggggcggggcgaacggggcgggggccggggtctggtaaggccccgccggctgagatatccagcggcgcacctgacttcccgggaggtgatcccattaagatactaatgccatcactgtctcctacaatggaagaaggaaacattgtgaaatggctgaaaaaggaaggtgaagcggtgagtgctggagatgcattatgtgaaattgagactgacaaagctgtggttaccttagatgcaagtgatgatggaatcttggccaaaatcgtggttgaagaaggaagtaaaaatatacggctaggttcactaattggtttgatagtagaagaaggagaagattggaaacatgttgaaattcccaaagacgtaggtcctccaccaccagtttcaaaaccttcagagcctcgcccctcaccagaaccacagatttccatccctgtcaagaaggaacacatacccgggacactacggttccgtttaagtccagctgcccgcaatattctggaaaaacactcactggatgctagccagggcacagccactggccctcgggggatattcactaaagaggatgctctcaaacttgtccagttgaaacaaacgggcaagattaccgagtccagaccaactccagcccccacagccactcccacagcaccttcgcccctacaggccacagctggaccatcttatccccggcctgtgatcccaccagtatcaactcctggacaacccaatgcagtgggcacattcactgaaatccccgccagcaatattcgaagagttattgccaagagattaactgaatctaaaagtactgtacctcatgcatatgctactgctgactgtgaccttggagctgttttaaaagttaggcaagatctggtcaaagatgacattaaagtatcagtaaatgattttatcatcaaggcagcagctgttacccttaaacaaatgccagatgttaatgtaagctgggatggagagggcccaaagcaactgccatttattgacatttcagtggctgtggcaacagataaaggcttacttactccaatcataaaagatgctgctgctaaaggtatccaggaaattgctgactctgtaaaggctctatcaaagaaagcaagagatggaaaattgttgcctgaagaataccaaggaggatcttttagtatttccaacttggggatgtttggcatcgacgaatttactgcagtgattaaccctcctcaggcctgcattttggcggttgggaggttccgacctgtgctgaagctcactgaggatgaagagggaaatgccaaactgcagcagcgccagctcataacagtcacaatgtcaagtgacagtcgagtggttgatgacgaactggcaaccaggtttcttaaaagttttaaagcaaacctagagaatcctatccgacttgcctagtcctcaaagataagaagttggtgttcagcttagttgattcagtagttgttaccaagaaacatatgttataggaaaacaacttggtatttaagtatgaagtggatgaaatgtttatttatttaaggtgaaagcatttgacccagggtgtcttcatcttcaatttgggtttaatgttatagaaataaatgatgataaactctaactaataaaggaaagagaatatttggttactcagatccatttttaacctctggtgctgtataaagggaatattaaactagatgtaaatcaaagtatatgtttggctcatttgagcattttggaatatttgagaatgtatgatacatgtaaaattaaaaaaactattagaactgtaccataattatgttgaaggtagaagtgatcttcaaagagatggccattaacttagcagtgggacctcacttttacaagcactgctctagatatacttgaagaatttaataggtacagaagtttattctggataataaataaataaggatcacactgtattaggggttatggcaacattattgaattttttatgtacataaagccatatgtttagggtggtttctatctgtcttgtttttcacttatataacactgtgaacttctaaagcaagaggataaaagaagcatgaatgaaaagaatgacatttcaaaaaaatggttcaatgaaaaactatagctaaaatatgtaaacctttctaggtaaaccgcttgccttcatcttgagtcggaatatatttaaataaattgtgttatctcttgccaaacattttgttagtgtttatttaaaaacaaaatgttgtttcttaatgcatttaaatcagttttgtattgtgcagtaaaatgtgagaaaatataaacatttctattgtattttaaatgttaaaacacaaaagttcaataaaccttgaagttga

SEQ ID NO: 172769 - DNA, 952 bp, Homo sapiens
  Payload ID: 13961
  Gene Symbol: PDHX
  Gene Name: pyruvate dehydrogenase complex, component X
  Uniprot ID: O00330
  ENST ID: ENST00000430469
  CDS Start-End: 25-849
gcagccagtgagaaggccgtcaagatggcggcctcctggaggctgggctgtgatccgcggctgctgcgttatcttgtgggcttccccggccgccgaagcgtagggctggtgaagggggctcttgggtggtctgtaagccgcggagctaattggagatggtttcacagcacgcagtggcttcggggtgatcccattaagatactaatgccatcactgtctcctacaatggaagaaggaaacattgtgaaatggctgaaaaaggaaggtgaagcggtgagtgctggagatgcattatgtgaaattgagactgacaaagctgtggttaccttagatgcaagtgatgatggaatcttggccaaaatcgtgcaaatgccagatgttaatgtaagctgggatggagagggcccaaagcaactgccatttattgacatttcagtggctgtggcaacagataaaggcttacttactccaatcataaaagatgctgctgctaaaggtatccaggaaattgctgactctgtaaaggctctatcaaagaaagcaagagatggaaaattgttgcctgaagaataccaaggaggatcttttagtatttccaacttggggatgtttggcatcgacgaatttactgcagtgattaaccctcctcaggcctgcattttggcggttgggaggttccgacctgtgctgaagctcactgaggatgaagagggaaatgccaaactgcagcagcgccagctcataacagtcacaatgtcaagtgacagtcgagtggttgatgacgaactggcaaccaggtttcttaaaagttttaaagcaaacctagagaatcctatccgacttgcctagtcctcaaagataagaagttggtgttcagcttagttgattcagtagttgttaccaagaaacatatgttataggaaaacaacttggtatttaagtatgaagtgga

SEQ ID NO: 172770 - DNA, 584 bp, Homo sapiens
  Payload ID: 13961
  Gene Symbol: PDHX
  Gene Name: pyruvate dehydrogenase complex, component X
  ENST ID: ENST00000533550
  CDS Start-End: 131-584
aactggtcgtcagggcgcagaaaagaagcttggggggcgcggtcttcgccccagctccacttcggtgcttcacgattccttctctggcctgccttcctgataaatacccggtgatcccattaagatactaatgccatcactgtctcctacaatggaagaaggaaacattgtgaaatggctgaaaaaggaaggtgaagcggtgagtgctggagatgcattatgtgaaattgagactgacaaagctgtggttaccttagatgcaagtgatgatggaatcttggccaaaatcgtggttgaagaaggaagtaaaaatatacggctaggttcactaattggtttgatagtagaagaaggagaagattggaaacatgttgaaattcccaaagacgtaggtcctccaccaccagtttcaaaaccttcagagcctcgcccctcaccagaaccacagatttccatccctgtcaagaaggaacacatacccgggacactacggttccgtttaagtccagctgcccgcaatattctggaaaaacactcactggatgctagccagggcacagccactggccctcgggggatattca

SEQ ID NO: 172771 - DNA, 561 bp, Homo sapiens
  Payload ID: 13961
  Gene Symbol: PDHX
  Gene Name: pyruvate dehydrogenase complex, component X
  ENST ID: ENST00000533262
  CDS Start-End: 16-561
gagaaggccgtcaagatggcggcctcctggaggctgggctgtgatccgcggctgctgcgttatcttgtgggcttccccggccgccgaagcgtagggctggtgaagggggctcttgggtggtctgtaagccgcggagctaattggagatggtttcacagcacgcagtggcttcggggtgaagcggtgagtgctggagatgcattatgtgaaattgagactgacaaagctgtggttaccttagatgcaagtgatgatggaatcttggccaaaatcgtggttgaagaaggaagtaaaaatatacggctaggttcactaattggtttgatagtagaagaaggagaagattggaaacatgttgaaattcccaaagacgtaggtcctccaccaccagtttcaaaaccttcagagcctcgcccctcaccagaaccacagatttccatccctgtcaagaaggaacacatacccgggacactacggttccgtttaagtccagctgcccgcaatattctggaaaaacactcactggatgctagccagggcacagccactggccctcggggg

SEQ ID NO: 172772 - DNA, 574 bp, Homo sapiens
  Payload ID: 13961
  Gene Symbol: PDHX
  Gene Name: pyruvate dehydrogenase complex, component X
  ENST ID: ENST00000526309
  CDS Start-End: 1-569
atcatttgtctttttcgagacataggaatgacattaaagtatcagtaaatgattttatcatcaaggcagcagctgttacccttaaacaaatgccagatgttaatgtaagctgggatggagagggcccaaagcaactgccatttattgacatttcagtggctgtggcaacagataaaggcttacttactccaatcataaaagatgctgctgctaaaggtatccaggaaattgctgactctgtaaaggctctatcaaagaaagcaagagatggaaaattgttgcctgaagaataccaaggaggatcttttagtatttccaacttggggatgtttggcatcgacgaatttactgcagtgattaaccctcctcaggcctgcattttggcggttgggaggttccgacctgtgctgaagctcactgaggatgaagagggaaatgccaaactgcagcagcgccagctcataacagtcacaatgtcaagtgacagtcgagtggttgatgacgaactggcaaccaggtttcttaaaagttttaaagcaaacctagagaatcctatccgacttgcctagtcctc

SEQ ID NO: 172773 - DNA, 14193 bp, Homo sapiens
  Payload ID: 13962
  Gene Symbol: PDK1
  Gene Name: pyruvate dehydrogenase kinase, isozyme 1
  Uniprot ID: Q15118
  ENST ID: ENST00000282077
  CDS Start-End: 183-1493
ctccttcccgctccgcgtcccgcccagcggcgcagggggccgggctccggctaggagggtgggggccgcgccggtgacagccgatccccgcccctgctgcccgccacgtccctcacgtaccactcggcagaggcgcggggaaacctggcgtactggctgtggcttctctagcgggactcggcatgaggctggcgcggctgcttcgcggagccgccttggccggcccgggcccggggctgcgcgccgccggcttcagccgcagcttcagctcggactcgggctccagcccggcgtccgagcgcggcgttccgggccaggtggacttctacgcgcgcttctcgccgtccccgctctccatgaagcagttcctggacttcggatcagtgaatgcttgtgaaaagacctcatttatgtttctgcggcaagagttgcctgtcagactggcaaatataatgaaagaaataagtctccttccagataatcttctcaggacaccatccgttcaattggtacaaagctggtatatccagagtcttcaggagcttcttgattttaaggacaaaagtgctgaggatgctaaagctatttatgactttacagatactgtgatacggatcagaaaccgacacaatgatgtcattcccacaatggcccagggtgtgattgaatacaaggagagctttggggtggatcctgtcaccagccagaatgttcagtactttttggatcgattctacatgagtcgcatttcaattagaatgttactcaatcagcactctttattgtttggtggaaaaggcaaaggaagtccatctcatcgaaaacacattggaagcataaatccaaactgcaatgtacttgaagttattaaagatggctatgaaaatgctaggcgtctgtgtgatttgtattatattaactctcccgaactagaacttgaagaactaaatgcaaaatcaccaggacagccaatacaagtggtttatgtaccatcccatctctatcacatggtgtttgaacttttcaagaatgcaatgagagccactatggaacaccatgccaacagaggtgtttacccccctattcaagttcatgtcacgctgggtaatgaggatttgactgtgaagatgagtgaccgaggaggtggcgttcctttgaggaaaattgacagacttttcaactacatgtattcaactgcaccaagacctcgtgttgagacctcccgcgcagtgcctctggctggttttggttatggattgcccatatcacgtctttacgcacaatacttccaaggagacctgaagctgtattccctagagggttacgggacagatgcagttatctacattaaggctctgtcaacagactcaatagaaagactcccagtgtataacaaagctgcctggaagcattacaacaccaaccacgaggctgatgactggtgcgtccccagcagagaacccaaagacatgacgacgttccgcagtgcctagacacacttgggacatcggaaaatccaaatgtggcttttgtattaaatttggaaggtatggtgttcagaactatattataccaagtactttatttatcgttttcacaaaactatttgagtagaataaatggaaactgaattccatttgtgcccgttaaacctcctaaaggatgaaattgcacctattttacacttatattttcacagttaattgaacatatttttaaacaactgtagttttgggcaacttttcactttgtggtagacttcagaagtgtggaaatcttcgggtttctataggaaactagttttttttttttaagaaatactttcatttatgtttgctagaaacattttctaaatgatagtgattagctggttagccatcttcctgttatttggaggagttctgccatcttttattcggtagtgacagctgtaatatggtcttcatgtttatcagtgacttgactacaagtaaagcagaaaacagttggcctgtaatcacagaaccagccacccttcggcgtctacatgcattgtcttagctctgaggttaatttaccatttttaaattttattgtaaagaagtgtaatgactagctctctgtggatctatgccaaaatcatgggccatcttttctaagtgtacttctgattaatgcaaggggaaatttttatactgaaaacaaacaaacaaactagcagctactaaaatagagaagaaattgagggcaaagtaatatgtctccaaaactgaactgattgcttgttgagattacctagaaagcttttggaaaaaaatagagcttttctgcatcctactccagatacactgaatcggaatccctagggctagagcctagaaatctcactttttaaaatgcttccaaggtaagtctgatgcctaccctaggttgggaaccactctttcaaagtaaacagtgatgacacagcatttgctaaagtaacatctgtaggttttggtttccacctatttaaagtcagatttatagactcgaggagacagaaactgaatcccacacctggtgcaattagaagcataattagaagcagaagaacaaaatgccacgtaaccaaagcatcagagccatcattgcacgtgtctttttttcttttttcttttttttttttcaagacagggtctcgctcttttgcccaggatggagtacagtggcatggtcaaggctcactgcagcttcaatcttctgggctcaagtaatccttccacctcagcctcccatatagctggaactacagttgtgcactaccacacccagctaattttttgatttcttgtggagatgaggtctcagtatgttcccaggctagtgttgaactcctgagctcaagaaatcctcctgcctgagtctctgaaagtgctgggattacaggcgtgagccaccacacatggcctattgcacaagtcttgacaaacaacatatattttctaaaactatccagatttcattatcagggaaaagtttgcttaggtttattacagcagtccttggcatttgtatggtaatttgtactttacaaatactttgatatattataactctattggtctttgaaacaaagcgatacagtgtaggtggtatcattctctttctcactcagtgtggcccagagttgctcagaattggagcagagcctgagacgtatctgcagatcctgtcatcagctggcaagtccaggagactgtgtcatttagagactgtgttgttagttatccctcaacatcttctaaggtggcaggaaataatattggaaataacattttaaagtaaaaattttaaagtttaaagaagagttttgccacttaaacaggggagctttgtctggaaaatacactgagttgaaacacttcatccttggaaggattatataagatgaacagttgtgataaatgtgtagattagagggatgtgaatgggcagttagtccagtgccctcatttaagaggccaagatcctgattcagaggaggcatcctttgcccagagctgcttagctaatctgaccaaatgttgggaaaaatgtctcacctaacccactattccttaattatggattttgtgaaaaacaatagaacatgttaatgagtaatttatattagttcgatgtattacaattttttagctttaaattacagttttcttataatgttgaaatgttttagaatcctttgaatctaagtatttgtttcctaaatgaaacatttgtacaacatttgatgtttttacttatgaaatattctcctcccccaagaaaatttaaactttttctctctatttaaaagctaagaaatgttttaaaggaaaaatgaaattatcttcctttagcttatttttaaggtaaaacagctttttactctgttattgtggtaatggacagaatattacatacaaaaatattctgggagagctttttcctagttggttttaaatcattgtgccacctgaaaggtttttagattttataggagctaatttgtccaccagcattaatgtaacacagtgtagttatgaaaatatattgaaggacaggaagtggacacgaagtgatttttgtaacctgagcagttaatgaatgtgccaacattttctaggaagggacagcaagaatattctgctctgtagttaaaatactggctggcttttgatgtcttcatgcttaattgtgatcactttcttgcactgtgatgtttttacgtgaatatgttgaagtagaagtctaccatattattttataaaatgttttctgtatggcaataaactgaaaacatggatcaacccttcttttgaaaataaactgagtcaatttagccttttaaaaatatagtcatctcttttaaatagaatcctcttccaccatcaaggctcaacattttgtaagcatccaaaaaattggtaattagggggcttgcactaaatttcactatcttcagtagagaggaactgtttggaacttagatttccaatgtgtatattctaatggagaaagcaagaggtagagtttgtatgtttgacttaccttagatttttattttccatacatactgcaaatgattgacttgttgcataaatgaagatcttctgttgtgtgcttttcaaacactgtaaataaatttgaaatttgaataactttccacagtataactgtaaaaaaaaaaaaaaaaagtcttaatttaaccagcattaccctctgcttgtaccaattgaatggcagaactactatagtcaaaaataaattcctatcctatttttaattgatgggatataggcagcacaatttcccttcattgttgaagccaacaagttccgtaacagaactccagaggtaaatagctgggaaaactgttagttttaaggtcccactgttgctctgtgaatgactaatcagaggaagccaaaaatcagccaactaatttcagtttatgtctttaattgtgatgtaagtgtgaagtttctacatatgggtaatcagggttgagttaggtagtttgcaaacatgacttttgctggaggaacttttaatcatgtcttattaatttctggtcccaataattaattttcttacagtcaaacccaatgcacttgaaaaataatataattaatactgtgtgaagaattttttgcatgttaaaaaaagcaaaccactagtttgcttagttctggcattcataaactactgtaccttctgttctattgacatgtttggaaaaaagaattgaacatatgtaccacccccctctttctagagtctccacagttctttagcaattgctaaccataggtttttaatagcaaaagacaagattgtcagtttttggtgcaaaactctactctttttggttgacttggaaaagctgttgtttatattgggaattgtgacagctgtcttttactttgttaaattagcaattatttagcaaaaatacagagtttcaccccagtaaaataaacttccacgtgagagttgtgttcattcaagggttattttttgagagtggaagtacatttcctgcatttgtcacagataatatcagaaattttgttgttttgattaaaatgttgccatctacttataagttaaaaatgctgagaaggttttttttggaaacagtttatgaggccaggacatttttaagtttgactcaaatataaaaagccacagtattcttgccatggttttgtacttagatgtctctcattatggaattcagaatgtgacagttatagtactacatgaaaatacttaatatagagttctacagttacagtattgcatgaaaatacagtatggtatgaaattatttgtccaaaactgtactccagaaatggagcccatatgattatataactataaaataggatgggacagagaaaaatatgtctgtattacagcataaacatatctggtttaatatgaactatttcttttcatctctttactctcagtatctccataatggccagtatgtagtaggcacctgtaattgtgaagcagcctcattgtctggggtaaataccaaggttcttggtctcatggccaaggagatcgaggtcgcagacacacacagtttggagcaggagtttaataggcaaaaggaaacagctctgttacagagaggggttccgagcaggttgccaagttgtagtaaaaatgtcagggtttttataaatgggctagtgaggagggggctcatgaggaggggatatcttatcctcctagggtccgaggacgctttagttgggaccaggtgtgctatctgtacagagcatagctttttatcagctcttatcccattccttgaccacataggctcttagactcttattctatgttgtcttcgtccagcttatctggaagggagagtttctctgtctgttcccatacatcttgcagctgcaggcatccccccggtctgcttttagcttccttatcttagtgcccctaaagggaaaggaatgtgcttattaagggccactgttttactggggttaactgcatgaggtcaaaaagagctatatttgagctgctgtttgttaaaagaaaagttttctgccggggactcgctttaccctgtctacctaaattctttctgccttctataacaattgtatgctcagtaaatacataaggaataatgaacttaataacatttttttccattctcaaaatgatacttaaatgactcagtacaacaaagaaactgagtagtaaccagtgcaaaactagcaaaaggatgaaatacacaagaaaatgagagaatttaagaggagtagcaaaacagcactgctaaagttacgggtttattttaaagtttaaaatagaagtaaacaagcaaacatactgataatggttaggctttctgtccccaccgcacaaatctcatcttgaattataatctcaacatgttaagggagagaccagatgaaagtaattggatcatggggttggtttctcccatgctgttctcgtgatagttcccatgagatctgatggttttataagtatttggtagttcctcctgcattcattcttcctgctgccctgtgaagaggtgccttccaccatgattgtgagtttctggaggcttctgcagccttgcggaactgtgagtcaatcctttttattataaattaccccgtctcaggcagttctttatagcagtgtggggatggactaatactcgctgggttagctggggtaggtaaagccacagctgtggcagcaaccagctagtgggtgtcccttgatggaggctttgcaggctgcagcagaagggacccttcagataaacctccagtcaggaaaggaaaaggcccaaataaacagtatttagatttttttttaaaggacataactaccaatagagatttaaaataatcataagaataccattaactttatgataaaaattttgtaagtggagaagaaatggatatatttctaggaaaacagtagaagatccatctaagattttgacaatttaaatcaaccactaaggaagtggaatcagtaatcacaagtccacctcgccaaaagacaatttttgaaagatgaatgttaccaaaacatcaagaaactgataattcctgtcttatagaaactttgaaatgagagaaagctacccaacccatttcagaaagttagtaaaatctcaaagctacacttgagcaaagactgtgaaatattaatagaccaatcttgtttatgaacatagatggaaaaattgctgatgaaatattggcacattgaatgtagcagtgcataaaatattgtatcatgagcaaaaggagaatctttcccaggaacaggaggatgttttaataaaaatatgtaatttacctctctacagattaaaggagaaaaactatatgatcacatcaacagaaacaggaaattcagtttctttgggggatagttgtaattaaaagtgcttaactcacttatataagccattagtggatgttacaataaacctcgtatagtgtcagatgtaagacagacatactggaattgtctatgaggttggatccatgggcctgccatggaaaatttgttgagtaatacgtccaaggcgtcaccatttgccaggcgttgcaagtatcaccatttgcaaggtgttaacaaaaagttacctgcctatggattctcctttctaactctgacctaatattttggagcatagaggaaagaaacatcttatgtttctgtgtttgggtaaacattagacttataaaagggcctagggtttttttgtttggtaaaccattgcctttcctgctttggtgtggcaaatcttcctttggagaaaaaggtccctttaatcttaaaaccaactctcagtgaccaacaaaagcaacaaataggaacaaccacccattaagaaccatcaggtgatgcctcatttgctgtggtgcacagctgaacttgattgttactcttggatcagggttggcttgataaggactcacttaaccaatggaaagtaaggttaaatctttgtaagcaatgctcctgatgcgaatcacctggagatcttgagcaaatgcagactggttcagcagatctggagtggggcctgagattctgcatttctaacaagtttcctggtgatattaatgctgctggtctgtgagccatactttgagtagcaaaggactaaaggttgtgagataaactgcttttagcagcccaaagggccagctggaaagacgagaccagttacagagcaaatggcaagacagatctggtaatctgattcttagagtacttaaaaaagataagaaggatctattcctgatatacagggtacttggtggatgtgtccatgacctcgagatcgaaaacccattagttaatctttgtgacatctgaattttaaggatcttacccagtgaacatataactagtggaaatcctgataattggctaatgcaaggaagtgatacccatgtgtaatgcttatctttgtatccatttcatggggaaggtcatggaagacgacagcaaacttgagtggttaatgagagcttcactaatgttgtctgctgcaggcaataagtgaagtctctggcagtgggaagcatggacccaagaccgaaagctctggcactttatagcagtggtggggggtagataggacttagtgtggccccttaaagagcaaggtccaagtgattttctctggtgaatgtcgatgtggatctagtctccagggttagatccaggcaggtaacatcaaagtcagttgataagacctcttatgcctgtgaatggaaggccctgataaaacttcattattaatgttctgcattaatttagcggatgactatagtcatttcacataatctaatacatgaatgtcctgtatgggtgactgctgagggtttaacaaaggagagtccatttatatttggctggtaagatcgatgcttctgtcactactgatgggcaaggatattaacatcaatatctaaaaaaattctgagatttggattgtgatgtgttaaatttctagaccaatttgaggagaatttaacaatagcttttcaatttatgaacatggcgtatatcttttttggcggggggtgaggacagagtcttgctctgagattacccaggctggagtttagtagcatgatcttggctcactgcaacctctgcctcctgagttgaagcaattctcctgcctcagcctccccagtagctgggattacaggcgagcgccatcatgcctgactaattttcgtatttttagcagagacagggtgtcgccacctcaagggatccacctgccttggcctcccaaagtgctgggatttataagcgtgagtcaccgtacctggccagacatagcatatatcttcctttacatagattgcctttgatttctttcattgttactttgtagttttcagcttacagattccgcgcatattttgttagacttaaatctaagtatttgctttttttttaacttacaaatttttttaaaaaaacgtttttcctctccaatgttcattgctaatacatttcacgtttgaatctccagttcagaaaaatcatggcctctggagttttactgaggactagagatagctaagtaacatagttccaccttattcacttggtctttgatgtggtgtccataattgagtaaatggcagtatgtccaatggcaacaccatgaacttgactttgccctcttgtctagccctctccatttagacttggaagggtcagcagtaaaatttcactggcccagtccagggctgcttgagtgttactgttttgtgccacaatatgatgtggccagactacttttctagtttcgagattattttggagctttatattgggtatgttcttatccaactatcattaggggcattgatctctgatgcccttttctttcttatcttccaaatggcaggcagtaaatggcttattaagcaagtataagattcaagatctcagccccaaagatacatttgtagatgccaggcttaacattcctgaggctctcagagaaaacttttccctctatagactccccattttaagaaggaggcacagggcttggttggcccatttagttagtgacacacctatattactctccttggcatcttaccccagcccatccattgggttgtgtcagtcttttatttctaagtgaggatccagtcaacaggaggcacaagagatagaaccaaataccataatgcctccttctattccactatgaacagtcaaggacactggaggcctctgggtgggacacataggcgttcaagagcctctgagcttaaagatatgtgagtggagctaactagactgtccaggtttggtctacactgtaattttttttttttttttttttttttggaagcagagtcttgctcttttgcccaggccagagtgtagtggtgtgatctcagctcagtgcagcgtctgcttcctgggttcaagtgattctcctgcctcagcctccaagtagctgggactacaggtgcctgccaccatgcccagctaatttttgtatttttagtagagacggggtttcaccgtgttggccaggctggtctcgaactcctgagctcaagtgatcctcctgccttggcctcccaaagtgttgggatagcaggcatgaaccaccgtgctcagcctctctgtaaatcttgagtcggcactgagctcatgaaagctgtgctgagtgggtttctttagattttcattttcatgtttgccccatttatgctaatattaattattggaaaataattcacctactttgcttctctctgaccaacataggggcaggatctgtggaaagacatttaccacctgtttgaaaaggtcagcgtgctgatattcactaactactacccccacaactccccctcccccaaacctgatagatgctataatttctgcagtccaatcactattcttcccaaactccatgagccagattttatacatactttgcgtgaccataaaactctgtactattatagacataaaaccatttaatttcatagataccttcagtggtggcatcactgggtcctctcttggatagcatagtcctatgaccaaatgggtcagtcgttgatcaggcttcatgagaatatgatcgctgggagaaatatacagctaatttaacaacaaatgactgtcctaattctggagacctgggaagtattgatgagagtatagtgatcataagcagacattgggtgctttagcaaagccaatttgcctgcatcctctggaaggtaaagaagatctcctctctcttagaacttaatcaaactcttggcatccacagaaggctaggaggatgtaatgaatacttaccatttttgtggaagcccacaaccttttgaatggcctttctatactttagtgaacctccatgttatgaaccttacttcctcaagtctcttttgctgctaggaggcagacagtaacttcggtaattagaaacatctgcactcagcaacatgaagcacaagttctgtgcagttgtccatatgctgtcatgagttttgccatatgtatcatctggctttcagaggacctttcatggttgtcaggttaagttcctgatacagaagtggcatcagtgctggtgttaatggctgcagtaaagtcaaattcctagattttagtgctctgtggtagcagagagaatggtggtagtttattttttctttccttttttttttaaaaaaaaaaaaaaacctttttcatgttgaagttcacatgacctacaactaaccattttaaagtgtaattcagtgtcattcagtacatccacaatgtgcaatcaccacctctgtctagttccaaaacatttttatcaccctaaaaggaaaccttgcacccattaaacagtggtagtttctctatcatgccacttttgtagcatgctttggggtcttattcctgggatctttctctacagtggtatgattatataagggtggaaatataaaagagtaagcctttagaaacagtttgtgtctaaattagctctcaggcatattgtcttcaaaggaatgttttaaaccagccaaagactaacatcaacatgcttacattttgagtccaaaattaaaatccaaaatagccaagcatggtggctcacgcctataatcccaactactccagaggctgaggtgtgatagaatttcttgaacctaggcgttccaggctgcagtgagctatgattgtgctgctgcactccagcctgggtgacagagcgaggttgcttctaaaacaaaaatttgaaatagtaagtgctttgattttttttaatatagaatcaaacaattgtgaaaatataattggctaagtttcatatacagttctttctaaaactccttctgttctctaagatgtagtttgaaccagccaaggatgatggcttcaacatgtctccagttgttttgccactccagggcctgactcaaaccaaaataagacttgctgttaccctgagacaagccaactgtcattgctttagcaaccactacggctacaggttgttgcatcatgccaagctctgtgttctttctaactagtagaatggagtgggatggtatcgtgatggtgaacccaaaacaatggtactaggaaggaggttggccaaactcagagtggaggctgaccctgtatctggttgtagcagagtcggtcctaggggaacaggctcagcagcagcaaggatgcaaggaccagaaggcagcaggggaaggaaaaggagcaggggataggggaactttaggagcagagtagtgttgataactggcatctggaacctacagtttccagttcagagcagtacaccatactcagtgtatacttacactccaagacatttcctgggcagtgatctagaaatgatatttttaaaaggagctgtgtttcagtgttagactgtagttatccaagcagtatcagatagtgtgcagtttttgtagtaaaaggtaaaaatctgaataataaagtttattaataacagttttagttaatacttgactgacattgagacccttgatgcaaaaaggtaagtagaagagaaggctgtaaacacaagaccatcataccctgtggggaatttacaatctaaatataacaaacatatagagtgagataggagaaaagaaatgggatgataatgatattgctgtactaaagtctatttaggaaatggaaatatatagcaagaggagtcagctacttgggcattgatcaaagaaaaataaacatatagaaggaaagaaaggtcgttttagtttataacattttccttccgattctaggtgattatatagctagtttactcttccacccccaagattctggggtattttggctaatgttatttgcaatgtccataaactcagaagaagttagtattaacggggatatgaaagaacctccagttactatgcaagaaattttaaatttccatcatgttaaattgtacaactgtttatcattcactctgctgtaagtctatgtgaaaccaaatccgtggatttaccaatggccattttatcacctccaaactatcttttatttttttgaattgtatctctctccttattccattttcttctgtttgattaaaatcctgcatgttctcctgca

SEQ ID NO: 172774 - DNA, 1515 bp, Homo sapiens
  Payload ID: 13962
  Gene Symbol: PDK1
  Gene Name: pyruvate dehydrogenase kinase, isozyme 1
  Uniprot ID: Q15118
  ENST ID: ENST00000392571
  CDS Start-End: 145-1515
gccgggctccggctaggagggtgggggccgcgccggtgacagccgatccccgcccctgctgcccgccacgtccctcacgtaccactcggcagaggcgcggggaaacctggcgtactggctgtggcttctctagcgggactcggcatgaggctggcgcggctgcttcgcggagccgccttggccggcccgggcccggggctgcgcgccgccggcttcagccgcagcttcagctcggactcgggctccagcccggcgtccgagcgcggcgttccgggccaggtggacttctacgcgcgcttctcgccgtccccgctctccatgaagcagttcctggacttcggatcagtgaatgcttgtgaaaagacctcatttatgtttctgcggcaagagttgcctgtcagactggcaaatataatgaaagaaataagtctccttccagataatcttctcaggacaccatccgttcaattggtacaaagctggtatatccagagtcttcaggagcttcttgattttaaggacaaaagtgctgaggatgctaaagctatttatgaaaggcctagaagaacatggttgcaggtctctagtttatgctgtatggcctgcaagatgatctttacagatactgtgatacggatcagaaaccgacacaatgatgtcattcccacaatggcccagggtgtgattgaatacaaggagagctttggggtggatcctgtcaccagccagaatgttcagtactttttggatcgattctacatgagtcgcatttcaattagaatgttactcaatcagcactctttattgtttggtggaaaaggcaaaggaagtccatctcatcgaaaacacattggaagcataaatccaaactgcaatgtacttgaagttattaaagatggctatgaaaatgctaggcgtctgtgtgatttgtattatattaactctcccgaactagaacttgaagaactaaatgcaaaatcaccaggacagccaatacaagtggtttatgtaccatcccatctctatcacatggtgtttgaacttttcaagaatgcaatgagagccactatggaacaccatgccaacagaggtgtttacccccctattcaagttcatgtcacgctgggtaatgaggatttgactgtgaagatgagtgaccgaggaggtggcgttcctttgaggaaaattgacagacttttcaactacatgtattcaactgcaccaagacctcgtgttgagacctcccgcgcagtgcctctggctggttttggttatggattgcccatatcacgtctttacgcacaatacttccaaggagacctgaagctgtattccctagagggttacgggacagatgcagttatctacattaaggctctgtcaacagactcaatagaaagactcccagtgtataacaaagctgcctggaagcattacaacaccaaccacgaggctgatgactggtgcgtccccagcagagaacccaaagacatgacgacgttccgcagtgcctag

SEQ ID NO: 172775 - DNA, 2990 bp, Homo sapiens
  Payload ID: 13962
  Gene Symbol: PDK1
  Gene Name: pyruvate dehydrogenase kinase, isozyme 1
  Uniprot ID: Q15118
  ENST ID: ENST00000410055
  CDS Start-End: 101-1411
gatccccgcccctgctgcccgccacgtccctcacgtaccactcggcagaggcgcggggaaacctggcgtactggctgtggcttctctagcgggactcggcatgaggctggcgcggctgcttcgcggagccgccttggccggcccgggcccggggctgcgcgccgccggcttcagccgcagcttcagctcggactcgggctccagcccggcgtccgagcgcggcgttccgggccaggtggacttctacgcgcgcttctcgccgtccccgctctccatgaagcagttcctggacttcggatcagtgaatgcttgtgaaaagacctcatttatgtttctgcggcaagagttgcctgtcagactggcaaatataatgaaagaaataagtctccttccagataatcttctcaggacaccatccgttcaattggtacaaagctggtatatccagagtcttcaggagcttcttgattttaaggacaaaagtgctgaggatgctaaagctatttatgactttacagatactgtgatacggatcagaaaccgacacaatgatgtcattcccacaatggcccagggtgtgattgaatacaaggagagctttggggtggatcctgtcaccagccagaatgttcagtactttttggatcgattctacatgagtcgcatttcaattagaatgttactcaatcagcactctttattgtttggtggaaaaggcaaaggaagtccatctcatcgaaaacacattggaagcataaatccaaactgcaatgtacttgaagttattaaagatggctatgaaaatgctaggcgtctgtgtgatttgtattatattaactctcccgaactagaacttgaagaactaaatgcaaaatcaccaggacagccaatacaagtggtttatgtaccatcccatctctatcacatggtgtttgaacttttcaagaatgcaatgagagccactatggaacaccatgccaacagaggtgtttacccccctattcaagttcatgtcacgctgggtaatgaggatttgactgtgaagatgagtgaccgaggaggtggcgttcctttgaggaaaattgacagacttttcaactacatgtattcaactgcaccaagacctcgtgttgagacctcccgcgcagtgcctctggctggttttggttatggattgcccatatcacgtctttacgcacaatacttccaaggagacctgaagctgtattccctagagggttacgggacagatgcagttatctacattaaggctctgtcaacagactcaatagaaagactcccagtgtataacaaagctgcctggaagcattacaacaccaaccacgaggctgatgactggtgcgtccccagcagagaacccaaagacatgacgacgttccgcagtgcctagacacacttgggacatcggaaaatccaaatgtggcttttgtattaaatttggaagtgtggcccagagttgctcagaattggagcagagcctgagacgtatctgcagatcctgtcatcagctggcaagtccaggagactgtgtcatttagagactgtgttgttagttatccctcaacatcttctaaggtggcaggaaataatattggaaataacattttaaagtaaaaattttaaagtttaaagaagagttttgccacttaaacaggggagctttgtctggaaaatacactgagttgaaacacttcatccttggaaggattatataagatgaacagttgtgataaatgtgtagattagagggatgtgaatgggcagttagtccagtgccctcatttaagaggccaagatcctgattcagaggaggcatcctttgcccagagctgcttagctaatctgaccaaatgttgggaaaaatgtctcacctaacccactattccttaattatggattttgtgaaaaacaatagaacatgttaatgagtaatttatattagttcgatgtattacaattttttagctttaaattacagttttcttataatgttgaaatgttttagaatcctttgaatctaagtatttgtttcctaaatgaaacatttgtacaacatttgatgtttttacttatgaaatattctcctcccccaagaaaatttaaactttttctctctatttaaaagctaagaaatgttttaaaggaaaaatgaaattatcttcctttagcttatttttaaggtaaaacagctttttactctgttattgtggtaatggacagaatattacatacaaaaatattctgggagagctttttcctagttggttttaaatcattgtgccacctgaaaggtttttagattttataggagctaatttgtccaccagcattaatgtaacacagtgtagttatgaaaatatattgaaggacaggaagtggacacgaagtgatttttgtaacctgagcagttaatgaatgtgccaacattttctaggaagggacagcaagaatattctgctctgtagttaaaatactggctggcttttgatgtcttcatgcttaattgtgatcactttcttgcactgtgatgtttttacgtgaatatgttgaagtagaagtctaccatattattttataaaatgttttctgtatggcaataaactgaaaacatggatcaacccttcttttgaaaataaactgagtcaatttagccttttaaaaatatagtcatctcttttaaatagaatcctcttccaccatcaaggctcaacattttgtaagcatccaaaaaattggtaattagggggcttgcactaaatttcactatcttcagtagagaggaactgtttggaacttagatttccaatgtgtatattctaatggagaaagcaagaggtagagtttgtatgtttgacttaccttagatttttattttccatacatactgcaaatgattgacttgttgcataaatgaagatcttctgttgtgtgcttttcaaacactgtaaataaatttgaaatttgaataa

SEQ ID NO: 172776 - DNA, 558 bp, Homo sapiens
  Payload ID: 13962
  Gene Symbol: PDK1
  Gene Name: pyruvate dehydrogenase kinase, isozyme 1
  ENST ID: ENST00000439519
  CDS Start-End: 96-558
attgttgaaaacaaaccagctgggccgcgggacgacctcccgcctcccggcgcacgtgtgcaggatcagtgaatgcttgtgaaaagacctcatttatgtttctgcggcaagagttgcctgtcagactggcaaatataatgaaagaaataagtctccttccagataatcttctcaggacaccatccgttcaattggtacaaagctggtatatccagagtcttcaggagcttcttgattttaaggacaaaagtgctgaggatgctaaagctatttatgactttacagatactgtgatacggatcagaaaccgacacaatgatgtcattcccacaatggcccagggtgtgattgaatacaaggagagctttggggtggatcctgtcaccagccagaatgttcagtactttttggatcgattctacatgagtcgcatttcaattagaatgttactcaatcagcactctttattgtttggtggaaaaggcaaaggaagtccatctcatcgaaaacacattggaagcataaatccaaactgcaatgtacttgaagttattaaag

SEQ ID NO: 172777 - DNA, 699 bp, Homo sapiens
  Payload ID: 13962
  Gene Symbol: PDK1
  Gene Name: pyruvate dehydrogenase kinase, isozyme 1
  ENST ID: ENST00000416991
  CDS Start-End: 13-699
tccccgctctccatgaagcagttcctggacttcggatcagtgaatgcttgtgaaaagacctcatttatgtttctgcggcaagagttgcctgtcagactggcaaatataatgaaagaaataagtctccttccagataatcttctcaggacaccatccgttcaattggtacaaagctgctttacagatactgtgatacggatcagaaaccgacacaatgatgtcattcccacaatggcccagggtgtgattgaatacaaggagagctttggggtggatcctgtcaccagccagaatgttcagtactttttggatcgattctacatgagtcgcatttcaattagaatgttactcaatcagcactctttattgtttggtggaaaaggcaaaggaagtccatctcatcgaaaacacattggaagcataaatccaaactgcaatgtacttgaagttattaaagatggctatgaaaatgctaggcgtctgtgtgatttgtattatattaactctcccgaactagaacttgaagaactaaatgcaaaatcaccaggacagccaatacaagtggtttatgtaccatcccatctctatcacatggtgtttgaacttttcaagaatgcaatgagagccactatggaacaccatgccaacagaggtgtttacccccctattcaagttcatgtcacgctgggtaatgaggat

SEQ ID NO: 172778 - DNA, 842 bp, Homo sapiens
  Payload ID: 13962
  Gene Symbol: PDK1
  Gene Name: pyruvate dehydrogenase kinase, isozyme 1
  ENST ID: ENST00000443353
  CDS Start-End: 380-842
ataatatgctcctttttcaggtaaagagacggaggctcagagaggttaaacagctcactcaaaggcacagagccagtacatggcagtacatctcttctcccggggccgccgtcgcggtgatactatttagggccacacgtcccagtgttcagctttcgtatttacgtactactgtttggcaagcggggactcctgaagctctctgaccctggaaaatgcgtggcttgcgtcacagaggagcgtttctggaacgcgctcgcagcacgacaccgcggtgtgtgcaagcggaacgccgccctgtccttgagccttttggctgagattgggagggcagaggaagcaggaaggatcagtgaatgcttgtgaaaagacctcatttatgtttctgcggcaagagttgcctgtcagactggcaaatataatgaaagaaataagtctccttccagataatcttctcaggacaccatccgttcaattggtacaaagctggtatatccagagtcttcaggagcttcttgattttaaggacaaaagtgctgaggatgctaaagctatttatgactttacagatactgtgatacggatcagaaaccgacacaatgatgtcattcccacaatggcccagggtgtgattgaatacaaggagagctttggggtggatcctgtcaccagccagaatgttcagtactttttggatcgattctacatgagtcgcatttcaattagaatgttactcaatcagcactctttattgtttggtggaaaaggcaaaggaagtccatctcatcgaaaacacattggaagcataaatccaaactgcaatgtacttgaagttattaaag

SEQ ID NO: 172779 - DNA, 571 bp, Homo sapiens
  Payload ID: 13962
  Gene Symbol: PDK1
  Gene Name: pyruvate dehydrogenase kinase, isozyme 1
  ENST ID: ENST00000436490
  CDS Start-End: 126-314
gctcgcagcacgacaccgcggtgtgtgcaagcggaacgccgccctgtccttgagccttttggctgagattgggagggcagaggaagcaggaaggatcagtgaatgcttgtgaaaagacctcatttatgtttctgcggcaagagttgcctgtcagactggcaaatataatgaaagaaataagtctccttccagataatcttctcaggacaccatccgttcaattggtacaaagctggtatatccagagtcttcaggagcttcttgattttaaggacaaaagtgctgaggatgctaaagctatttatgaggaataggtccaaaacaggcaggctttattggctcattcatcttgattccttgcagagcagagcaggtgttctctagagctttacagatactgtgatacggatcagaaaccgacacaatgatgtcattcccacaatggcccagggtgtgattgaatacaaggagagctttggggtggatcctgtcaccagccagaatgttcagtactttttggatcgattctacatgagtcgcatttcaattagaatgttactcaatcagcact

SEQ ID NO: 172780 - DNA, 728 bp, Homo sapiens
  Payload ID: 13962
  Gene Symbol: PDK1
  Gene Name: pyruvate dehydrogenase kinase, isozyme 1
  ENST ID: ENST00000431718
  CDS Start-End: 50-544
cgcggggaaacctggcgtactggctgtggcttctctagcgggactcggcatgaggctggcgcggctgcttcgcggagccgccttggccggcccgggcccggggctgcgcgccgccggcttcagccgcagcttcagctcggactcgggctccagcccggcgtccgagcgcggcgttccgggccaggtggacttctacgcgcgcttctcgccgtccccgctctccatgaagcagttcctggacttcggatcagtgaatgcttgtgaaaagacctcatttatgtttctgcggcaagagttgcctgtcagactggcaaatataatgaaagaaataagtctccttccagataatcttctcaggacaccatccgttcaattggtacaaagctggtatatccagagtcttcaggagcttcttgattttaaggacaaaagtgctgaggatgctaaagctatttatgactttattgtttggtggaaaaggcaaaggaagtccatctcatcgaaaacacattggaagcataaatccaaactgcaatgtacttgaagttattaaagatggctatgaaaatgctaggcgtctgtgtgatttgtattatattaactctcccgaactagaacttgaagaactaaatgaatgcaatgagagccactatggaacaccatgccaacagaggtgtttacccccctattcaagttcatgtcacgctgggtaatgaggatttgactgt

SEQ ID NO: 172781 - DNA, 2384 bp, Homo sapiens
  Payload ID: 13963
  Gene Symbol: PDK2
  Gene Name: pyruvate dehydrogenase kinase, isozyme 2
  Uniprot ID: Q15119
  ENST ID: ENST00000007708
  CDS Start-End: 392-1423
cttttcctgagccgcttggatctttgtggaagcgggtgggctgcatatatacaggacggattcgtataggcttgcaccctggttccgaattttgcaaatattcgcagtctgggtcactgtcatccggactgggaatccccaagacccgttaagggaggatagaaggagctggaccctagctgccccagtgggcaaggacacttgaagatcaaatctgttccggcctggcagcctctccccagctgggcaggggccccaggcaccgtgatgtggagtcaagccgcctatacctcccttggctgccccagggctgctaggatccagcaatgcctgtgagaaaacctccttcaccttcctcaggcaggagctgcctgtgcgcctggccaacatcatgaaagagatcaacctgcttcccgaccgagtgctgagcacaccctccgtgcagctggtgcagagctggtatgtccagagcctcctggacatcatggagttcctggacaaggatcccgaggaccatcgcaccctgagccagttcactgacgccctggtcaccatccggaaccggcacaacgacgtggtgcccaccatggcacaaggcgtgcttgagtacaaggacacctacggcgatgaccccgtctccaaccagaacatccagtacttcctggaccgcttctacctcagccgcatctccatccgcatgctcatcaaccagcacaccctcatctttgatggcagcaccaacccagcccatcccaaacacatcggcagcatcgaccccaactgcaacgtctctgaggtggtcaaagatgcctacgacatggctaagctcctgtgtgacaagtattacatggcctcacctgacctggagatccaggagatcaatgcagccaactccaaacagccgattcacatggtctacgtcccctcccacctctaccacatgctctttgagctcttcaagaatgccatgagggcgactgtggaaagccatgagtccagcctcattctcccacccatcaaggtcatggtggccttgggtgaggaagatctgtccatcaagatgagtgaccgaggtgggggtgttcccttgaggaagattgagcgactcttcagctacatgtactccacagcacccaccccccagcctggcaccgggggaacgccgctggctggctttggttatgggctccccatttcccgcctctacgccaagtacttccagggagacctgcagctcttctccatggaaggctttgggaccgatgctgtcatctatctcaaggccctgtccacggactcggtggagcgcctgcctgtctacaacaagtcagcctggcgccactaccagaccatccaggaggccggcgactggtgtgtgcccagcacggagcccaagaacacgtccacgtaccgcgtcagctaagggccgccgtgcatctgcacctgagaggacggactgccgcctctgggtccccccaccgtggtgcccctcaccatcctcctgggggagcagggggtgggttctccctgatgaccaggttctgtctctatggaagtcactgcggtgataggtctgtgatggtccctaagtgccagtccatctctgtggagacccctcggtggcctccctatctctgtgggcgatgcctgagggttagggatgtctccaccctgatggggtgtcccagagacattttcccatggcagtcctcctctctgagaccagggctgtcacttttctgccaggggtactgggtccccctcagcaccctccacagcacaggccttccaagtggatgtcccgttgccttattcccccagcccacaaaggcaccctggccttggcctgctgaagtgttaggaagagggtgggtgccctccagacctggggactgagtggggaaaggagttacacccgtgagtggggaatgaggctggtcctgcagcctctccctccgctcagggcttgaaggtcggtggcggagggggtggctctcacagggcccaactctaaagtggaagaaccttgttagaccgagagcttgccatccagccaagctgctcgaggccctgcagtggccttggcaatgtctgtgccacctcctgagccctcccagcatgtcctcacatgctcatgcccacccgctcctccacaagcctagtccatcctgcctgagctccagcccccagcccccactgtgcccagacatgtgtgctcagggtggctttctccctaggaccttctgtgtatatagttagttttataaccctgaatgcccccacccttcccctaagcacacaggggttaaagctgtgtgtccctcccagtggctgtggcagtgacagtgacacccacacccacagtaaagaggagactgaatgag

SEQ ID NO: 172782 - DNA, 3440 bp, Homo sapiens
  Payload ID: 13963
  Gene Symbol: PDK2
  Gene Name: pyruvate dehydrogenase kinase, isozyme 2
  Uniprot ID: Q15119
  ENST ID: ENST00000503176
  CDS Start-End: 162-1385
attggcgacgtcgaggcgccatgacgagccgattggctgggcgttggaatgcccgccagggcaagggtagggaggaggcggccgaaccgcgtcgctgggccgaaaggtgcgcgagcgctgcccgcgcggggaccacaaccaaagtcgcggccgccgcagccatgcgctgggtgtgggcgctgctgaagaatgcgtccctggcaggggcgcccaagtacatagagcacttcagcaagttctccccgtccccgctgtccatgaagcagtttctggacttcggatccagcaatgcctgtgagaaaacctccttcaccttcctcaggcaggagctgcctgtgcgcctggccaacatcatgaaagagatcaacctgcttcccgaccgagtgctgagcacaccctccgtgcagctggtgcagagctggtatgtccagagcctcctggacatcatggagttcctggacaaggatcccgaggaccatcgcaccctgagccagttcactgacgccctggtcaccatccggaaccggcacaacgacgtggtgcccaccatggcacaaggcgtgcttgagtacaaggacacctacggcgatgaccccgtctccaaccagaacatccagtacttcctggaccgcttctacctcagccgcatctccatccgcatgctcatcaaccagcacaccctcatctttgatggcagcaccaacccagcccatcccaaacacatcggcagcatcgaccccaactgcaacgtctctgaggtggtcaaagatgcctacgacatggctaagctcctgtgtgacaagtattacatggcctcacctgacctggagatccaggagatcaatgcagccaactccaaacagccgattcacatggtctacgtcccctcccacctctaccacatgctctttgagctcttcaagaatgccatgagggcgactgtggaaagccatgagtccagcctcattctcccacccatcaaggtcatggtggccttgggtgaggaagatctgtccatcaagatgagtgaccgaggtgggggtgttcccttgaggaagattgagcgactcttcagctacatgtactccacagcacccaccccccagcctggcaccgggggaacgccgctggctggctttggttatgggctccccatttcccgcctctacgccaagtacttccagggagacctgcagctcttctccatggaaggctttgggaccgatgctgtcatctatctcaaggccctgtccacggactcggtggagcgcctgcctgtctacaacaagtcagcctggcgccactaccagaccatccaggaggccggcgactggtgtgtgcccagcacggagcccaagaacacgtccacgtaccgcgtcagctaagggccgccgtgcatctgcacctgagaggacggactgccgcctctgggtccccccaccgtggtgcccctcaccatcctcctgggggagcagggggtgggttctccctgatgaccaggttctgtctctatggaagtcactgcggtgataggtctgtgatggtccctaagtgccagtccatctctgtggagacccctcggtggcctccctatctctgtgggcgatgcctgagggttagggatgtctccaccctgatggggtgtcccagagacattttcccatggcagtcctcctctctgagaccagggctgtcacttttctgccaggggtactgggtccccctcagcaccctccacagcacaggccttccaagtggatgtcccgttgccttattcccccagcccacaaaggcaccctggccttggcctgctgaagtgttaggaagagggtgggtgccctccagacctggggactgagtggggaaaggagttacacccgtgagtggggaatgaggctggtcctgcagcctctccctccgctcagggcttgaaggtcggtggcggagggggtggctctcacagggcccaactctaaagtggaagaaccttgttagaccgagagcttgccatccagccaagctgctcgaggccctgcagtggccttggcaatgtctgtgccacctcctgagccctcccagcatgtcctcacatgctcatgcccacccgctcctccacaagcctagtccatcctgcctgagctccagcccccagcccccactgtgcccagacatgtgtgctcagggtggctttctccctaggaccttctgtgtatatagttagttttataaccctgaatgcccccacccttcccctaagcacacaggggttaaagctgtgtgtccctcccagtggctgtggcagtgacagtgacacccacacccacagtaaagaggagactgaatgagactggcctggctgcatccctgggggaggggacccacacgtgcgcacgtacacacgcacactgcggtgccctgtgaccaccacatgacgcaccggggacgtccggcccagctcaggactgtgagtaaaacactgggcaaagccatctgttcagaacgccggatggcccagcacctggtgacagacctgttgtcccaccatactcagggcccagcagagtccggccaacccaacaactggagcagacagaaattctggtcactggcacatcataaggatttattgaaataaattgagaactgcctccccttcacatgcaggtgggcacccactatagctactgatggctttaaggatgtgggtgccttccaacctcccatggccctgccaccaggcccagatggtgccagtgtcctcatatctgtttccctccgaagcccctctcccagcacagatagcagaggggggataagggctgagtcccaggtacagggtgctggccgtaagccacagcccctgggcaggaatgagggagccagcatgcattggtgccatctgccgctctgtctgggcagatgggaggagctggaggggtttccaagcgggagcccccaggcctcatcggtaactctgaccagtgtcctggaagcgggactagctgctgaccagcgccacacatgaacacttcctccaaggacatttcctaaaaaggacacatgctgtccccaggctgctggtaaactccacccccatccagggagctggccccagccctcagtgtggcccagggaagcagagcttgcaccgcctgccagttctgagcccactgattccctgacaatgcctggggcagatgggggagggctgatgaacctttccaatctcgtagctgccggggacccccaggttttgcctctctgcctggctggggtgagggctgaccaggtcagcagctcctaggccttggctggtggaagtggtgtcctctgtccctatcagttcctgtttgctcagctcccaaagaggacttaggtgccctctgaggaagcagcaggaagtgaagggagtcctggcttggagaatgggtcaaagacca

SEQ ID NO: 172783 - DNA, 590 bp, Homo sapiens
  Payload ID: 13963
  Gene Symbol: PDK2
  Gene Name: pyruvate dehydrogenase kinase, isozyme 2
  ENST ID: ENST00000512238
  CDS Start-End: 296-590
agaggtgcagccatctgtagagagacctggactgggcatgaagggtcagacacccctgggcagaggaaggagctggaccctagctgccccagtgggcaaggacacttgaagatcaaatctgttccggcctggcagcctctccccagctgggcaggggccccaggcaccgtgatgtggagtcaagccgcctatacctcccttggctgccccagggctgctaggatccagcaatgcctgtgagaaaacctccttcaccttcctcaggcaggagctgcctgtgcgcctggccaacatcatgaaagagatcaacctgcttcccgaccgagtgctgagcacaccctccgtgcagctggtgcagagctggtatgtccagagcctcctggacatcatggagttcctggacaaggatcccgaggaccatcgcaccctgagccagttcactgacgccctggtcaccatccggaaccggcacaacgacgtggtgcccaccatggcacaaggcgtgcttgagtacaaggacacctacggcgatgaccccgtctccaaccagaacatccagtacttcctggaccgcttctacctcagccgca

SEQ ID NO: 172784 - DNA, 576 bp, Homo sapiens
  Payload ID: 13963
  Gene Symbol: PDK2
  Gene Name: pyruvate dehydrogenase kinase, isozyme 2
  ENST ID: ENST00000510219
  CDS Start-End: 96-576
cactgcaaccattgcctcccaggttcaagcgattctcctacctcagcctcccgagtagctgggattacaggtatgtccagagcctcctggacatcatggagttcctggacaaggatcccgaggaccatcgcaccctgagccagttcactgacgccctggtcaccatccggaaccggcacaacgacgtggtgcccaccatggcacaaggcgtgcttgagtacaaggacacctacggcgatgaccccgtctccaaccagaacatccagtacttcctggaccgcttctacctcagccgcatctccatccgcatgctcatcaaccagcacaccctcatctttgatggcagcaccaacccagcccatcccaaacacatcggcagcatcgaccccaactgcaacgtctctgaggtggtcaaagatgcctacgacatggctaagctcctgtgtgacaagtattacatggcctcacctgacctggagatccaggagatcaatgcagccaactccaaacagccgattcacatggtctacgtcccctcccacctctaccacatgctctttgagctcttcaagaatg

SEQ ID NO: 172785 - DNA, 947 bp, Homo sapiens
  Payload ID: 13963
  Gene Symbol: PDK2
  Gene Name: pyruvate dehydrogenase kinase, isozyme 2
  ENST ID: ENST00000503614
  CDS Start-End: 171-947
tcgaggcgccatgacgagccgattggctgggcgttggaatgcccgccagggcaagggtagggaggaggcggccgaaccgcgtcgctgggccgaaaggatccagcaatgcctgtgagaaaacctccttcaccttcctcaggcaggagctgcctgtgcgcctggccaacatcatgaaagagatcaacctgcttcccgaccgagtgctgagcacaccctccgtgcagctggtgcagagctggtatgtccagagcctcctggacatcatggagttcctggacaaggatcccgaggaccatcgcaccctgagccagttcactgacgccctggtcaccatccggaaccggcacaacgacgtggtgcccaccatggcacaaggcgtgcttgagtacaaggacacctacggcgatgaccccgtctccaaccagaacatccagtacttcctggaccgcttctacctcagccgcatctccatccgcatgctcatcaaccagcacaccctcatctttgatggcagcaccaacccagcccatcccaaacacatcggcagcatcgaccccaactgcaacgtctctgaggtggtcaaagatgcctacgacatggctaagctcctgtgtgacaagtattacatggcctcacctgacctggagatccaggagatcaatgcagccaactccaaacagccgattcacatggtctacgtcccctcccacctctaccacatgctctttgagctcttcaagaatgccatgagggcgactgtggaaagccatgagtccagcctcattctcccacccatcaaggtcatggtggccttgggtgaggaagatctgtccatcaagatgagtgaccgaggtgggggtgttcccttgaggaagattgagcgactcttcagctacatgtactccacagcacccaccccccagcctggcaccgggggaacgccgctg

SEQ ID NO: 172786 - DNA, 615 bp, Homo sapiens
  Payload ID: 13963
  Gene Symbol: PDK2
  Gene Name: pyruvate dehydrogenase kinase, isozyme 2
  ENST ID: ENST00000505440
  CDS Start-End: 191-615
taatggggaagcaggaaccggccggggcctctcgacggggctgctgatgggaatggggggcatttacaaggacggtcccgaggtttcttcgtgggcctcatgaagggtcttgaagagatccagcaatgcctgtgagaaaacctccttcaccttcctcaggcaggagctgcctgtgcgcctggccaacatcatgaaagagatcaacctgcttcccgaccgagtgctgagcacaccctccgtgcagctggtgcagagctggtatgtccagagcctcctggacatcatggagttcctggacaaggatcccgaggaccatcgcaccctgagccagttcactgacgccctggtcaccatccggaaccggcacaacgacgtggtgcccaccatggcacaaggcgtgcttgagtacaaggacacctacggcgatgaccccgtctccaaccagaacatccagtacttcctggaccgcttctacctcagccgcatctccatccgcatgctcatcaaccagcacaccctcatctttgatggcagcaccaacccagcccatcccaaacacatcggcagcatcgaccccaactgcaacgtctctgaggtggtcaaagatgcctacga

SEQ ID NO: 172787 - DNA, 578 bp, Homo sapiens
  Payload ID: 13963
  Gene Symbol: PDK2
  Gene Name: pyruvate dehydrogenase kinase, isozyme 2
  ENST ID: ENST00000508030
  CDS Start-End: 190-578
tatacaggacggattcgtataggcttgcaccctggttccgaattttgcaaatattcgcagtctgggtcactgtcatccggactgggaatccccaagacccgttaagggaggataggatccagcaatgcctgtgagaaaacctccttcaccttcctcaggcaggagctgcctgtgcgcctggccaacatcatgaaagagatcaacctgcttcccgaccgagtgctgagcacaccctccgtgcagctggtgcagagctggtatgtccagagcctcctggacatcatggagttcctggacaaggatcccgaggaccatcgcaccctgagccagttcactgacgccctggtcaccatccggaaccggcacaacgacgtggtgcccaccatggcacaaggcgtgcttgagtacaaggacacctacggcgatgaccccgtctccaaccagaacatccagtacttcctggaccgcttctacctcagccgcatctccatccgcatgctcatcaaccagcacaccctcatctttgatggcagcaccaacccagcccatcccaaacacatcggcagcatcgaccccaa

SEQ ID NO: 172788 - DNA, 2493 bp, Homo sapiens
  Payload ID: 13963
  Gene Symbol: PDK2
  Gene Name: pyruvate dehydrogenase kinase, isozyme 2
  Uniprot ID: Q15119
  ENST ID: ENST00000614357
  CDS Start-End: 191-1222
taatggggaagcaggaaccggccggggcctctcgacggggctgctgatgggaatggggggcatttacaaggacggtcccgaggtttcttcgtgggcctcatgaagggtcttgaagagatccagcaatgcctgtgagaaaacctccttcaccttcctcaggcaggagctgcctgtgcgcctggccaacatcatgaaagagatcaacctgcttcccgaccgagtgctgagcacaccctccgtgcagctggtgcagagctggtatgtccagagcctcctggacatcatggagttcctggacaaggatcccgaggaccatcgcaccctgagccagttcactgacgccctggtcaccatccggaaccggcacaacgacgtggtgcccaccatggcacaaggcgtgcttgagtacaaggacacctacggcgatgaccccgtctccaaccagaacatccagtacttcctggaccgcttctacctcagccgcatctccatccgcatgctcatcaaccagcacaccctcatctttgatggcagcaccaacccagcccatcccaaacacatcggcagcatcgaccccaactgcaacgtctctgaggtggtcaaagatgcctacgacatggctaagctcctgtgtgacaagtattacatggcctcacctgacctggagatccaggagatcaatgcagccaactccaaacagccgattcacatggtctacgtcccctcccacctctaccacatgctctttgagctcttcaagaatgccatgagggcgactgtggaaagccatgagtccagcctcattctcccacccatcaaggtcatggtggccttgggtgaggaagatctgtccatcaagatgagtgaccgaggtgggggtgttcccttgaggaagattgagcgactcttcagctacatgtactccacagcacccaccccccagcctggcaccgggggaacgccgctggctggctttggttatgggctccccatttcccgcctctacgccaagtacttccagggagacctgcagctcttctccatggaaggctttgggaccgatgctgtcatctatctcaaggccctgtccacggactcggtggagcgcctgcctgtctacaacaagtcagcctggcgccactaccagaccatccaggaggccggcgactggtgtgtgcccagcacggagcccaagaacacgtccacgtaccgcgtcagctaagggccgccgtgcatctgcacctgagaggacggactgccgcctctgggtccccccaccgtggtgcccctcaccatcctcctgggggagcagggggtgggttctccctgatgaccaggttctgtctctatggaagtcactgcggtgataggtctgtgatggtccctaagtgccagtccatctctgtggagacccctcggtggcctccctatctctgtgggcgatgcctgagggttagggatgtctccaccctgatggggtgtcccagagacattttcccatggcagtcctcctctctgagaccagggctgtcacttttctgccaggggtactgggtccccctcagcaccctccacagcacaggccttccaagtggatgtcccgttgccttattcccccagcccacaaaggcaccctggccttggcctgctgaagtgttaggaagagggtgggtgccctccagacctggggactgagtggggaaaggagttacacccgtgagtggggaatgaggctggtcctgcagcctctccctccgctcagggcttgaaggtcggtggcggagggggtggctctcacagggcccaactctaaagtggaagaaccttgttagaccgagagcttgccatccagccaagctgctcgaggccctgcagtggccttggcaatgtctgtgccacctcctgagccctcccagcatgtcctcacatgctcatgcccacccgctcctccacaagcctagtccatcctgcctgagctccagcccccagcccccactgtgcccagacatgtgtgctcagggtggctttctccctaggaccttctgtgtatatagttagttttataaccctgaatgcccccacccttcccctaagcacacaggggttaaagctgtgtgtccctcccagtggctgtggcagtgacagtgacacccacacccacagtaaagaggagactgaatgagactggcctggctgcatccctgggggaggggacccacacgtgcgcacgtacacacgcacactgcggtgccctgtgaccaccacatgacgcaccggggacgtccggcccagctcaggactgtgagtaaaacactgggcaaagccatctgttcagaacgccggatggcccagcacctggtgacagacctgttgtcccaccatactcagggcccagcagagtccggccaacccaacaactggagcagacagaaattctggtcactggcacatcataaggatttattgaaataaattgagaactgcctccccttc

SEQ ID NO: 172789 - DNA, 1809 bp, Homo sapiens
  Payload ID: 13964
  Gene Symbol: PDK3
  Gene Name: pyruvate dehydrogenase kinase, isozyme 3
  Uniprot ID: Q15120
  ENST ID: ENST00000379162
  CDS Start-End: 236-1456
gcgtacgtgcagcaaccgactccgcccagcgaggcggagcctagggaagccgcgggcggcccgccgctgtcctggagctgctgctgctgctgcggcggctgcaccggcggcgccgaggccgagatcgaggccggggtgcgcgcttcgcaaacgtgccctatccgtgcggcttggctgcgccagcccttgcggccacccgggcgtctaggcgggtctgtgcgccgcccgggcgaggatgcggctgttccggtggctgctgaagcagccggtgcccaagcagatcgagcgctactcgcgcttttcgccgtcgccgctctccatcaaacaattcctggacttcgggagagataatgcatgtgagaaaacttcatatatgtttctacgaaaggaacttcctgtgcggctggctaacacaatgagagaagttaatcttctgccggataatttacttaaccgcccttcagtgggattggttcagagttggtatatgcagagttttcttgaacttttagaatatgaaaataagagccctgaggatccacaggtcttggataactttctacaagttctgattaaagtcagaaatagacacaatgatgtggttcctacaatggcacaaggagtgattgaatacaaggagaagtttgggtttgatcctttcattagcactaacatccaatattttctggatcggttttataccaaccgcatctctttccgcatgcttattaatcagcacacacttctgtttgggggtgacactaatcctgttcatcctaaacacataggaagtatcgatcccacctgtaacgtggcggatgtggtgaaagatgcatatgaaacagccaagatgctgtgtgaacagtattacctggtagctccagagctggaagttgaagaattcaatgccaaagcgccagacaaacctattcaggtggtttatgtgccctcacatctgtttcatatgctatttgagttgttcaagaactcaatgagagcgacagttgaactctatgaagacagaaaagagggctaccctgctgttaaaaccctcgttactttgggtaaagaagacttatccattaagatcagtgacctaggtggtggtgtcccacttcgaaaaatagatcgtctttttaactacatgtattctactgctcctagacccagcctggagcctaccagagctgcccctttggctggatttggttatggtttgccaatttcccgtctgtatgctagatattttcaaggagatctgaaactgtattccatggaaggagtgggtactgatgctgtcatttatttgaaggctctttcaagtgagtcatttgagagacttccagtttttaataagtccgcatggcgccattacaagaccacgcctgaagccgatgattggagcaatcccagcagtgaacccagggatgcttcaaaatacaaagcaaaacagtaatataccaccttgatttccattacaaagtatctgatttgtctgaataaaggtgtcccactcactgttccaggaattcttgcagtgtagaggtattcacaacagcaagcagggatttggcctgccatcaattttatttaaaaagcaattaagtttgcagtttgtcctcataaacgttgtaggttgaaactgaaaaataagttaaaatgatcaatcaagataaaaggtgatctatccatccaatggaatattatttggccttaaaaaggaaggacattctgatatgtgctgcaacatgggtgaatcttgaagtcattatgctaagtgaaataaaccagacataaaaggacaaatac

SEQ ID NO: 172790 - DNA, 1921 bp, Homo sapiens
  Payload ID: 13964
  Gene Symbol: PDK3
  Gene Name: pyruvate dehydrogenase kinase, isozyme 3
  Uniprot ID: Q15120
  ENST ID: ENST00000441463
  CDS Start-End: 1-1248
atgcggctgttccggtggctgctgaagcagccggtgcccaagcagatcgagcgctactcgcgcttttcgccgtcgccgctctccatcaaacaattcctggacttcgggagagataatgcatgtgagaaaacttcatatatgtttctacgaaaggaacttcctgtgcggctggctaacacaatgagagaagttaatcttctgccggataatttacttaaccgcccttcagtgggattggttcagagttggtatatgcagagttttcttgaacttttagaatatgaaaataagagccctgaggatccacaggtcttggataactttctacaagttctgattaaagtcagaaatagacacaatgatgtggttcctacaatggcacaaggagtgattgaatacaaggagaagtttgggtttgatcctttcattagcactaacatccaatattttctggatcggttttataccaaccgcatctctttccgcatgcttattaatcagcacacacttctgtttgggggtgacactaatcctgttcatcctaaacacataggaagtatcgatcccacctgtaacgtggcggatgtggtgaaagatgcatatgaaacagccaagatgctgtgtgaacagtattacctggtagctccagagctggaagttgaagaattcaatgccaaagcgccagacaaacctattcaggtggtttatgtgccctcacatctgtttcatatgctatttgagttgttcaagaactcaatgagagcgacagttgaactctatgaagacagaaaagagggctaccctgctgttaaaaccctcgttactttgggtaaagaagacttatccattaagatcagtgacctaggtggtggtgtcccacttcgaaaaatagatcgtctttttaactacatgtattctactgctcctagacccagcctggagcctaccagagctgcccctttggctggatttggttatggtttgccaatttcccgtctgtatgctagatattttcaaggagatctgaaactgtattccatggaaggagtgggtactgatgctgtcatttatttgaaggctctttcaagtgagtcatttgagagacttccagtttttaataagtccgcatggcgccattacaagaccacgcctgaagccgatgattggagcaatcccagcagtgaacccagggatgcttcaaaatacaaagcaaaacaagacaagatcaagactaatagaactttctagaggactgaatgctgtggtcctctctgtgaagaaagattgccttctgcaagtcaaacagagagaactgctttctcccacctgctctgagcgtggcatcacagttattcctagtgcttaaatgtgtattttctctctaccacctggactttcccaaagagtttttcctgtagctactccagatcttccactaaagtagtaactttttaatgacatcttgctgtggtgtgattgatgcctgtcaccgaagagcacagagcctccttacagctcttgtgccctcgtactctccatcttgttatcatagcatctgatgtcttcagtccttccaggattctgtgcgcctttcccattccagatacagcagatcgtactgttgctccttgtgaccaaataccatatttgtcccaaacctccacctagggccctgggaccctgaaagtggaagacatcaggtggccatgccctgatgatttagtcccagagccctccgtctctcccgtgcctccctccgccactctatgatttagacttttgccttcttccatctgatcggattctcattgtgagatgtggtgactttcatgttagatcttcttcattgatgccttggttttattttaaaattcatttgtatatgtctgttgattaaagcattcgaaatgttatcttagaa

SEQ ID NO: 172791 - DNA, 3576 bp, Homo sapiens
  Payload ID: 13965
  Gene Symbol: PDK4
  Gene Name: pyruvate dehydrogenase kinase, isozyme 4
  Uniprot ID: Q16654
  ENST ID: ENST00000005178
  CDS Start-End: 199-1434
actgcatctccgactctgcccagactcttcactccgcggcaccctcaaaccccagcccaggccggggcgcacaagccagccagcgcacctgcagtcctcgcccggacgcgccgcgccccctcggaaccaggctctgctccgagcagccttcgcccctcaagccagccacagtccccgccaggccgggtgggcgtcaagatgaaggcggcccgcttcgtgctgcgcagcgctggctcgctcaacggcgccggcctggtgccccgagaggtggagcatttctcgcgctacagcccgtccccgctgtccatgaagcagctactggactttggttcagaaaatgcatgtgaaagaacttcttttgcatttttgcgacaagaattgcctgtgagactcgccaacattctgaaggaaattgatatcctcccgacccaattagtaaatacctcttcagtgcaattggttaaaagctggtatatacagagcctgatggatttggtggaattccatgagaaaagcccagatgaccagaaagcattatcagactttgtagatacactcatcaaagttcgaaatagacaccataatgtagtccctacaatggcacaaggaatcatagagtataaagatgcctgtacagttgacccagtcaccaatcaaaatcttcaatatttcttggatcgattttacatgaaccgtatttctactcggatgctgatgaaccagcacattcttatatttagtgactcacagacaggaaacccaagccacattggaagcattgatcctaactgtgatgtggtagcagtggtccaagatgcctttgagtgttcaaggatgctctgtgatcagtattatttatcatctccagaattaaagcttacacaagtgaatggaaaatttccagaccaaccaattcacatcgtgtatgttccttctcacctccatcatatgctctttgaactatttaagaatgcaatgcgggcaacagttgaacaccaggaaaatcagccttcccttacaccaatagaggttattgttgtcttgggaaaagaagaccttaccattaagatttcagacagaggaggtggtgttcccctgagaattattgaccgcctctttagttatacatactccactgcaccaacgcctgtgatggataattcccggaatgctcctttggctggttttggttacggcttgccaatttctcgtctgtatgcaaagtactttcaaggagatctgaatctctactctttatcaggatatggaacagatgctatcatctacttaaaggctttgtcttctgagtctatagaaaaacttccagtttttaacaagtcagccttcaaacattatcagatgagctctgaggctgatgactggtgtatcccaagcagggaaccaaagaacctggcaaaagaagtggccatgtgaagagggacactcaggacactttacgggatcaaagtgggtctacaccagtgctgcttcctgaatgtttgtgtgtgaacccttgtttcctccaaaacaaacgacagcaacgaaaactccttaatcagaacactgatccaatgaggaatggagcttgtttctgtgacccaggagaacttagtgcaagactacaggagttaacagatggccagctccttattttttaatgtagaataactcctgagtttatatcaaatcctgaagaaataagcctcagttttccatctgtttttgataagaataagaaagggagtgagtgtgaagatggtggttagcagtttcactaagactgatattttaggcctcttgttcacatcaaaagatattggtgtcagaataccagcattttcctgccatgcaaaggattaaaacttagtttacactatgtggttacaaatatatgtcaatgtacattttgaacatatttatgtgctatggaaggaaatgctggtgactaaaataaggtttactctgaaagaggaggaattttattcaaagcattcaaacattttattcaagtgtttcaaaattcaaagcattgtattcaaagttgcagtgaaggcatcaacttatgtaaaaactcagaaggaaggctcctctgataaaaacacagctcctttattatgctgcttttcttgttcactttacacactaagtaaacacttattgtcaggtgcctagtcttgagtgaattgttagatgtgcactgaactcgggatgttggggattggagagagagaattgccaaagtaacagcaaaaatatctcttactttgctttgtttataaataaattagtagattggaaaaactagtgttagggaaagaaatcacatgttcagagcctaattcagtaggaagggcttttctctaccctgaaatgaaggtaatccaaaggcatccattttctaggcttaaaagatatatttttgatatatttaattatattctctacactccagcattaatatgtctgtttaaaaattactaattctcaaatggctcaagaacattagaatttaagtaccttttagagtaattattttaagcaaatagcctggacgtaagagattctcatgccagcatgctttcatttgtcagttgttgtgactgagagataatgaatgacacctgaaatgcatatggtatttttgggagagttaaggtataatttgaaggttggcagaccagttgcgctgattactcttagagaagaagaaatggaaaaatgaaagaaggcaggaaggaaagaaaggatataggaagagagggaagcagaaggcaggcatttttctattttccccacaaattatttcaaaaaaaatctgtattttctgggatatgtcattggcaagaggaagaactggtgttttgaaagcagtatggattctttaaatgcctctcactcttacaagatagtaggctttgagataataaacttacccgtgtcaattaacatttaaactggcatatagaaaaaaaggaggatttttctgcattgtaaaataatcagtatggtttatatgttgaatttgacatttgtgtgtaatttcatggtggcctagtgttgtggtgcttctggtaatggtaatagaagctcaactatttttttgtggatttcagtttttatcatcagaagtcctagacagtgacatttcttaatggtgggagtccagctcatgcatttctgattatacaaaacagtttgcagtaggttatttgtcatttcagttttttactgaaatttgagctaaacatttttacatgtaaatacttgtatttaccaaagatttaaatcagttgattaattaattaactcaaatactgtgaactatctctaaaacactagaaaaaagaaatgttagtatctcaattacaccaactgtgcaaatgaactttgataaaatagaaataatctacattggcctttgtgaaatctggggaagagctttaggattctagtagatggatactgaatactcaggcccacttaaattattaatgtatacattgtgtttttgtctttatgctatgtacagagaaatgtgataattttttataataaatattttttatgatgataaaa

SEQ ID NO: 172792 - DNA, 9255 bp, Homo sapiens
  Payload ID: 13966
  Gene Symbol: PDPR
  Gene Name: pyruvate dehydrogenase phosphatase regulatory subunit
  Uniprot ID: Q8NCN5
  ENST ID: ENST00000288050
  CDS Start-End: 958-3597
cagtgatgagttctagaaggaaagaaaaggctgatgtgacagtgaggaagggatgagtggagacttctctgagacttcagtgattcctcttcctctgagctgagccaagctgagaagctgagaagagtaagatagggccgggaactcaggtccgttagtccgtcctccgaggtggggcgggccagcagaatggatttccgatctactctgtgagagcctcgcccaagaaagcccagagccacttccaagatccgcgctcccacggcgatgagaagcgttttcccccgggactgcttggcttaggactggggacccactggctttggagtaagccctggcacgggcctcgagggaagaaagaactcccgcgctccccacactccacagggcctgcgatcatctcagatgttccggttccacgtgcagaaaccccgccggtccgaggccccggttctaaaacggccctaagagtcaaggcttccacagctcgcctctgagggtggcaaagaggccgcgggggcggtgcctcgcgagacccaaacaagcccacgtggcaggggcggggctccgcgaaggcgtcacggcgcgctcgtgcgctgctgaggtcacgcgccggcagtacccttgcccgggggccgtaaagcgcggaaggtcgcggtctcggcttccccggaactttttgctcgcttcgccccgcccccttcccatccccgaaccccgctttccggcccgcggcgaccccaggcaactgttgtggctgccgcattgctcccgccgggctgtagctgagcgcggagcccgtggggaccggtgagatggaactgttttcccgcgttgagacgtgcggtccgcttgtgcttttagaactaaagactgctgcagagtccggaggaagaagtcacctagaaaaatctgggacagggcatttgagttcctgagatctagttggtgagagacatgatgttctaccggttgctgtcgattgttggaagacaaagagccagcccaggatggcagaactggtcctctgcaagaaacagcacgtcagctgccgaggcgcgttccatggccctgcccacccaggcacaggtggtcatctgtggaggtggaatcacgggcacttctgtggcctatcacctctccaaaatggggtggaaggatattgtccttttggagcagggcaggctggctgctggctctaccaggttctgtgctggcatcctgagcactgccaggcacttgaccattgagcagaagatggcagactactcaaacaaactctactatcagttagagcaagaaacagggatccaaacaggttacacaaggacaggctcaatctttctggcccaaactcaggaccgactgatctccctgaagcgcatcaacgcagggctgaatgttataggtatcccttctgagatcatctcccccaagaaagtggccgagcttcaccatctcctcaacgtgcacgacctggtgggggccatgcatgttcccgaggatgcagtggtgtcttccgctgacgtggctcttgccctggcaagtgctgcctcccaaaatggtgttcagatctatgaccggacatctgttcttcatgtaatggtcaaaaaaggtcaagttactggagtggagaccgataaaggacagattgaatgccagtattttgtcaactgtgctggccagtgggcatacgagctgggtctgtccaacgaggagccggttagtatcccgctacatgcctgcgaacacttctacctcctgactcgccccttggagacccctctgcagagcagcacaccaactattgtggatgctgatggaagaatttatattcggaactggcagggtggcatcctgtctgggggctttgagaagaacccgaaaccaattttcactgagggcaagaaccagctggagattcagaatctacaggaagactgggatcactttgagcctctgttgagttcccttctgaggaggatgccagaattagagactctggagatcatgaagttggtgaactgcccagagaccttcacaccagacatgaggtgcatcatgggcgagtctcctgcagtgcagggctactttgtcctggcaggaatgaactctgctggcctttcatttggtggaggagccggaaagtaccttgccgaatggatggtacatggttatccctcagaaaacgtttgggaattggacctgaaacgttttggagccctccagagcagccgcacctttctgcgccaccgggtcatggaagtcatgcctttgatgtatgatctgaaggttccccgctgggacttccagaccggtaggcagttacgcacctctcctctctacgaccggctggatgcacagggagccaggtggatggagaaacatggatttgagaggccaaagtactttgttccccccgacaaggacctcctggcattggagcagagcaagactttctataagccagattggtttgacatcgtggagtctgaagtcaagtgctgtaaggaagctgtgtgtgtcattgacatgtcctctttcacaaagtttgagataacatccactggggatcaggcattagaagttctacagtacctcttctccaatgacctggatgtgcctgtgggccacattgtgcatactggcatgctcaacgagggtggagggtatgaaaatgactgcagcatagcacgactgaacaagcgcagtttcttcatgatctctccaaccgaccagcaggtccactgttgggcctggcttaagaaacacatgccgaaagacagcaacctgctcctggaggacgtcacctggaagtacacagccctcaatctgattggccctcgagctgtggatgtgctgtctgagttgtcctatgcccctatgactccagaccacttcccaagcctcttttgcaaggagatgagtgtgggctatgcaaatgggatccgggtgatgagcatgacgcacacaggagagccaggattcatgctctacatccccatagagtacgccctgcatgtatacaatgaagtgatgagtgttggccagaaatacggaatccggaatgctgggtattacgctcttcgcagtctccgaattgagaagttttttgccttctggggtcaggatataaataacctcaccacgcccctggaatgtggacgagagtctcgggtgaaattagagaagggcatggatttcattggtcgcgacgccctcctgcagcagaagcagaatggagtgtataaacgcctcaccatgttcatcctggacgaccatgattcagacctagacctttggccttggtggggagagcccatttaccggaatgggcagtatgttggcaagaccaccagcagtgcctacagctacagcctggagcgccacgtttgcctgggctttgtgcacaatttttctgaggacacgggggaagagcaagtggtgacagcagatttcatcaaccggggagagtatgagattgacatcgcgggataccgcttccaggccaaggccaagctctaccctgtcgcctccctcttcacccagaagcgccgaaaggatgacatggagctgagtgacttacatgggaagtgatgccaccagggcagcctcacctcctccccatcatcttgtcctagagtgggcgtcaccttggagcttctcttccttccgcctctgttcctcttctggagcctttgcctcccatctcttatctccttgatataattttgaacttgacctactttaaacttttttgctctgcagccttccttgcccttccacctcctcctcctaatattcactctgggctcttcttcccttcccacccctcactcagcttctcgtggtggcaggaggtatgtctgacaggacagaagcaagctccactgtggacatgagtgatggtgacagctgctttcaaattctgcatctcaaggcagggcaagccggggtggtgcaggtctcagggcacgagtccctctcccttgggttccattttcttggagcagcctattagttctggtggggttgccgtgtgtcggatgcagccctgaggggcagctcgtgcctgcagcccggcagctcgttctcctgttctgctgtgctgtgggctggcactcgatacctctggcaagaggatgattatctacctcactgataagaggcatcgcatggacgttctctggtctgtagtggagacaagcagttaacctagcaccatcctcatcctccctgcagaagccattagcagacctttgggccagggcagcctccctataattttcttcatctcttgctaatctctataataaggttgctttttctttcttagttgagtaaacaagtaagccacagtgtttgaaagggaaaaaccatattgccttgtgtgttgcttttcccagtcaaaagggtctgaccttagaaagtccccaccagtgatgctgagtgttctgctatggaaacaatgctgcttttctctcagctgtccaaagttcagccgttcctccttccccttctcccagtgcgtttgactttgtcaggtcagcctcacttgtccctttcacagttggcccataaagtcatgtttctctccctttagaatagggaggggaagggatcaggtgtgttgtcctgggcctttcaaccttgcgggctgtgctgagttccagagagctgccggaattccaggtttgactctccagcacagagcagagctacacagaggtgacccacgttagtccactgagagttctgagtccaaagggtgtacgttgcataaggctagagaccgcttttcctcctttccccccaggctctttgtttccctccacccacccttccatatcctctggagcaggagacaatgtgggtgcccagaagtgccctgcgctttcaggcagtgtctctgttttcccaaggtgaaacttagatatcatggactgttgtccagcctcaatgcttcattttccccttgcatatcaactgccctaatctgactttttttaagtgcaaataaactgctataagacattttggttagtaaaactctagcctttggcgtgttggtatcttggaagcattagctctgataggtctataagtgtattaagggacatccttccatttcattagagcagcttaaaatgctcaggtgtctgccttctctggtgtttctttgggatctctgtttacccacttacgctggctccttctagacatttcttgccacttccccaactagaccactcctagtgattactgactttagtgcctaaacctttttggaaggttctggttggcttgttagaggagcatatgattagaattctgtttgggggtctagttgtcttggagcaagtatgtacttaactagccgagagatgctgcctctaggcagagaggaggagaggtgttgccggctggagggccaaccagtgaacaccagctgtgaaggccttgggagaggaggaacaggcccttgggcagatgcaggcattaccagcagggagcagacttacctccgaagatggagacaggtgactgagagctgcaggcctcctctgctcttccaaacacgtagcatttgcacccctccaaagccatctttgtaaaggaaaacgtatttgtaattgaatccagaagaatttagttacacatagacataactcttcaaccttaactatggcaatacatttgtgctttaactgttacatagcagtatcaccacttaccaggatccaaatcgaaataataaaagctgtctccatagtttaaaatcgaatagtgccatcatcacagtatattagtcaaatagaagcttcatcagaaatgtatcccacatagagttttaagacttggattctcttctgcccttgttaatctccaactaattactacagattgacacgtttttaattagctgtcctttgtaagaagtcaggaaatctgatgctgtgtccaaaattatgcactgtttgttgaagtagaaccagaaatcctgacctcctgttaaatgacatcagtttccccctctgagcaacagactgcttgtcttgctaggagaggaggatggggggctgagcactcaggctgtccattgaaaccccttgtccatgaatagggtcatactcctaagactgatggggtgttgatcttctaggacatcacttgtttattcagtgccccaaacacagatttctcttctagcactttagagttgatccttgaagtctctcctggttcattcaaatacaagctgtgtgagtctggtggttttctgtgattggtctaatgtgagctctttgaacagacagatctgacagtgaatgactctcccctgcttctggcataactgctttgcctctgtctagtgtccaagcatcttagctgttcaagaggagagggcagcataacttcctgaccaccggtgtcagatatcagagcattctggactcctgagaggcagtggcctcttgagtgaacaggggaggccagtagatgccccagatccagagccgtggctgcaaatccagcaggaataaggagggacaaccacagcctcctcatccatgtgtcatttccaagggtttgccttgtgtctcagctcattctgggcagcacgtttgtcttctgtccctagagatttgaaggattttggactcttgtgaatgggtgactggacttggctttacagagttgggtgcttttttctctctgcaattacctgtcatagcattttgtgctcaccacgaaggatggtctctgccttctcttgtcggtgtatgccatctgaacctaggaacacaaagtatattggcctcaaacggagacccagggttgccagttttccgtgggccttcccctcccttgaaatgtctttaattacctccccttcatcgtcaggccacgtgtgacttctgttcttagcactgccagggtcattgacttccatctaagcttgcatcaggaagatgttccttctgtgatcattggtactgaagccagaaaagctctcattcaggaactctgaagagcaaaaagggacaaacactaactgctgagctgggccatttgatctcctttcaccttgcattgctgtcacagcaccttgtatgatggcaggacaggctccagcagagagaactgcacagtgaccactgtatttttcacgctcttccagggatccctgtcccccgacattgaagagatctcattcaggccagagacacagagaccacatagcccagtgattaaaccccggtttcactctggccccaggagtggagcctggccactcctgtttggttctcactgggaggcccactggccttggatcatctcctcatgcacacccggagttttacctgcttgcttgctttcctggactgctgtttgcaagaaagtaactaaaacatgaaaagtaaacctccagcttccacagtatattacctgccgttgcatgcatttgaaagttagcctcctcccttgccaccgtcttggtggcagtagcgatgcaagaatgatgggagctttccgagagcgttcagtgtttcactgaagacaggacccatagccttcatttctggctctgtgtctcctctggcatatggacacatttcctggcatttgcctgagtctacaccactttttgagaacctgaaatagaagggaatcttctgtggcccacagtctccatattggcactagaagactggcctggcggaggaatttgcgttggcttgctttcaggggttagctacaagattcagctttatatctctgttgcttcttggccagtgtagtcaataagggtcttctttaacatctaagatagaggtttggttggccgggcgtggtcgcttactcctgtaatcccagcactttgggaggcccagtgaggtgggagaattgcttgaacccaggaggcagaggttgcagtgagctgagattgcaccactgcactccagcctgggtaacagagtgagactcttgtctcaaaaaaaaaaaaaaaaaaatctaagatagaggtttggtcaacagtgcttaataataaataagaacctcctgccattctaattttcctgctgcaccccatcccccacacacccctcacgaacattgatataagcagtattaacacagtataaagaatgttcaccttgcatatgtcatttcaggcacatggattcaggagaagcacagttgagtggaagaaatggtagacttgtgaggcttgccccaggccttgtgtacacgcaataagtggtgagccatgggtctctccgtcagcgcctccctccccgccaccacttcaggccaacaatttaaggtgctgagttgtaaggctcctccattgtcagtacagggctcgcctttgtagccctgatcactaccagtacacttttcaagacaactgagtatttttgtatgcctttgccttccctttgtccatgaaacatgaagagttgtttatggttcttgacttctctgagcagagtgtctgcatctcttggagagttacacatttcttcatgagccatttttctcattcttagatgcacctgtttttatcctttgcagaccatcttctgccttcttattttcctgtctgtcaaagacagaaattacaggagatagggagggttttttagcatctctttcaaaagatgtatgtcagaatttcctttgcacaccaagaactggagcttagagccccactattctctaagccaggttctagtgccttacactccagaatgtcagatggtgggtgcagattggaagaaagagaaaagttcatctcggtgtgtgggttcccatccgccccacatagcctctccttcttcggaacaatgggcgtggggtagaaagctctttcagtgaagggtgttctagcagctcagttaacactttactctccagtcaacacttgggacatataaaaatgccattgtaactactgtagagtcctgtgactcatcgtttgtgtttgtcaatttgcagttcagcttagcccttccctgttcctgtgtagttacaatctggccctgaagacatccgaggcacttcagtaagtgggatcttttctagagatcctgggtgactttgggtgcacagggtgaccgagcatttctgcccctgtgaatgtggcactaacactgtgcactgtctccaccaagcaaggtttccactgagtttcttctcatgttactgggtttgtaaatgaataaacacattttaactactcttgca

SEQ ID NO: 172793 - DNA, 2734 bp, Homo sapiens
  Payload ID: 13966
  Gene Symbol: PDPR
  Gene Name: pyruvate dehydrogenase phosphatase regulatory subunit
  ENST ID: ENST00000398122
  CDS Start-End: 143-2482
aactgttgtggctgccgcattgctcccgccgggctgtagctgagcgcggagcccgtggggaccggtgaggctggctgctggctctaccaggttctgtgctggcatcctgagcactgccaggcacttgaccattgagcagaagatggcagactactcaaacaaactctactatcagttagagcaagaaacagggatccaaacaggttacacaaggacaggctcaatctttctggcccaaactcaggaccgactgatctccctgaagcgcatcaacgcagggctgaatgttataggtatcccttctgagatcatctcccccaagaaagtggccgagcttcaccatctcctcaacgtgcacgacctggtgggggccatgcatgttcccgaggatgcagtggtgtcttccgctgacgtggctcttgccctggcaagtgctgcctcccaaaatggtgttcagatctatgaccggacatctgttcttcatgtaatggtcaaaaaaggtcaagttactggagtggagaccgataaaggacagattgaatgccagtattttgtcaactgtgctggccagtgggcatacgagctgggtctgtccaacgaggagccggttagtatcccgctacatgcctgcgaacacttctacctcctgactcgccccttggagacccctctgcagagcagcacaccaactattgtggatgctgatggaagaatttatattcggaactggcagggtggcatcctgtctgggggctttgagaagaacccgaaaccaattttcactgagggcaagaaccagctggagattcagaatctacaggaagactgggatcactttgagcctctgttgagttcccttctgaggaggatgccagaattagagactctggagatcatgaagttggtgaactgcccagagaccttcacaccagacatgaggtgcatcatgggcgagtctcctgcagtgcagggctactttgtcctggcaggaatgaactctgctggcctttcatttggtggaggagccggaaagtaccttgccgaatggatggtacatggttatccctcagaaaacgtttgggaattggacctgaaacgttttggagccctccagagcagccgcacctttctgcgccaccgggtcatggaagtcatgcctttgatgtatgatctgaaggttccccgctgggacttccagaccggtaggcagttacgcacctctcctctctacgaccggctggatgcacagggagccaggtggatggagaaacatggatttgagaggccaaagtactttgttccccccgacaaggacctcctggcattggagcagagcaagactttctataagccagattggtttgacatcgtggagtctgaagtcaagtgctgtaaggaagctgtgtgtgtcattgacatgtcctctttcacaaagtttgagataacatccactggggatcaggcattagaagttctacagtacctcttctccaatgacctggatgtgcctgtgggccacattgtgcatactggcatgctcaacgagggtggagggtatgaaaatgactgcagcatagcacgactgaacaagcgcagtttcttcatgatctctccaaccgaccagcaggtccactgttgggcctggcttaagaaacacatgccgaaagacagcaacctgctcctggaggacgtcacctggaagtacacagccctcaatctgattggccctcgagctgtggatgtgctgtctgagttgtcctatgcccctatgactccagaccacttcccaagcctcttttgcaaggagatgagtgtgggctatgcaaatgggatccgggtgatgagcatgacgcacacaggagagccaggattcatgctctacatccccatagagtacgccctgcatgtatacaatgaagtgatgagtgttggccagaaatacggaatccggaatgctgggtattacgctcttcgcagtctccgaattgagaagttttttgccttctggggtcaggatataaataacctcaccacgcccctggaatgtggacgagagtctcgggtgaaattagagaagggcatggatttcattggtcgcgacgccctcctgcagcagaagcagaatggagtgtataaacgcctcaccatgttcatcctggacgaccatgattcagacctagacctttggccttggtggggagagcccatttaccggaatgggcagtatgttggcaagaccaccagcagtgcctacagctacagcctggagcgccacgtttgcctgggctttgtgcacaatttttctgaggacacgggggaagagcaagtggtgacagcagatttcatcaaccggggagagtatgagattgacatcgcgggataccgcttccaggccaaggccaagctctaccctgtcgcctccctcttcacccagaagcgccgaaaggatgacatggagctgagtgacttacatgggaagtgatgccaccagggcagcctcacctcctccccatcatcttgtcctagagtgggcgtcaccttggagcttctcttccttccgcctctgttcctcttctggagcctttgcctcccatctcttatctccttgatataattttgaacttgacctactttaaacttttttgctctgcagccttccttgcccttccacctcctcctcctaatattcactctgggctcttcttcccttcccacccctcactcagcttctcgt

SEQ ID NO: 172794 - DNA, 4353 bp, Homo sapiens
  Payload ID: 13966
  Gene Symbol: PDPR
  Gene Name: pyruvate dehydrogenase phosphatase regulatory subunit
  ENST ID: ENST00000565186
  CDS Start-End: 363-1838
ggtctcgaacccctgacctcgttatccactcgccgcggcctcccaaagtgctgggattacaggtgtgagccactgcgcccagcctaagtttttgaatttttagtagagacggggtttcactgtgttagccaggatggtctcgatctcctgacctcgtgatccgcccgccttggcctcccagagtgctgggattacaggtgtgaggcaccatgcccagccaccctcaaatatttgctgaatgaatggctatcgttctttgtcaaatccctttctcattaatcccatgcactgagtagaatggcatgaaatatgtttggtttctctgtctagtttgagttcctgagatctagttggtgagagacatgatgttctaccggttgctgtcgattgttggaagacaaagagccagcccaggatggcagaactggtcctctgcaagaaacagcacgtcagctgccgaggcgcgttccatggccctgcccacccaggcacaggtggtcatctgtggaggtggaatcacgggcacttctgtggcctatcacctctccaaaatggggtggaaggatattgtccttttggagcagggcaggctggctgctggctctaccaggttctgtgctggcatcctgagcactgccaggcacttgaccattgagcagaagatggcagactactcaaacaaactctactatcagttagagcaagaaacagggatccaaacaggttacacaaggacaggctcaatctttctggcccaaactcaggaccgactgatctccctgaagcgcatcaacgcagggctgaatgttataggtatcccttctgagatcatctcccccaagaaagtggccgagcttcaccatctcctcaacgtgcacgacctggtgggggccatgcatgttcccgaggatgcagtggtgtcttccgctgacgtggctcttgccctggcaagtgctgcctcccaaaatggtgttcagatctatgaccggacatctgttcttcatgtaatggtcaaaaaaggtcaagttactggagtggagaccgataaaggacagattgaatgccagtattttgtcaactgtgctggccagtgggcatacgagctgggtctgtccaacgaggagccggttagtatcccgctacatgcctgcgaacacttctacctcctgactcgccccttggagacccctctgcagagcagcacaccaactattgtggatgctgatggaagaatttatattcggaactggcagggtggcatcctgtctgggggctttgagaagaacccgaaaccaattttcactgagggcaagaaccagctggagattcagaatctacaggaagactgggatcactttgagcctctgttgagttcccttctgaggaggatgccagaattagagactctggagatcatgaagttggtgaactgcccagagaccttcacaccagacatgaggtgcatcatgggcgagtctcctgcagtgcagggctactttgtcctggcaggaatgaactctgctggcctttcatttggtggaggagccggaaagtaccttgccgaatggatggtacatggttatccctcagaaaacgtttgggaattggacctgaaacgttttggagccctccagagcagccgcacctttctgcgccaccgggtcatggaagtcatgcctttgatgtatgatctgaaggttccccgctgggacttccagaccggtaggcagttacgcacctctcctctctacgaccggctggatgcacagggagccaggtggatggagaaacatggatttgagaggccaaagtactttgttccccccgacaagggctagaatgtgttcacagaagaaaaagaaccacgtggactacactaaactctacagggccttgtgatttttccattccgtagacctcctggcattggagcagagcaagactttctataagccagattggtttgacatcgtggagtctgaagtcaagtgctgtaaggaagctgtgtgtgtcattgacatgtcctctttcacaaagtttgagataacatccactggggatcaggcattagaagttctacagtacctcttctccaatgacctggatgtgcctgtgggccacattgtgcatactggcatgctcaacgagggtggagggtatgaaaatgactgcagcatagcacgactgaacaagcgcagtttcttcatgatctctccaaccgaccagcaggtccactgttgggcctggcttaagaaacacatgccgaaagacagcaacctgctcctggaggacgtcacctggaagtacacagccctcaatctgattggccctcgagctgtggatgtgctgtctgagttgtcctatgcccctatgactccagaccacttcccaagcctcttttgcaaggagatgagtgtgggctatgcaaatgggatccgggtgatgagcatgacgcacacaggagagccaggattcatgctctacatccccatagagggcatggatttcattggtcgcgacgccctcctgcagcagaagcagaatggagtgtataaacgcctcaccatgttcatcctggacgaccatgattcagacctagacctttggccttggtggggagagcccatttaccggaatgggcagtatgttggcaagaccaccagcagtgcctacagctacagcctggagcgccacgtttgcctgggctttgtgcacaatttttctgaggacacgggggaagagcaagtggtgacagcagatttcatcaaccggggagagtatgagattgacatcgcgggataccgcttccaggccaaggccaagctctaccctgtcgcctccctcttcacccagaagcgccgaaaggatgacatggagctgagtgacttacatgggaagtgatgccaccagggcagcctcacctcctccccatcatcttgtcctagagtgggcgtcaccttggagcttctcttccttccgcctctgttcctcttctggagcctttgcctcccatctcttatctccttgatataattttgaacttgacctactttaaacttttttgctctgcagccttccttgcccttccacctcctcctcctaatattcactctgggctcttcttcccttcccacccctcactcagcttctcgtggtggcaggaggtatgtctgacaggacagaagcaagctccactgtggacatgagtgatggtgacagctgctttcaaattctgcatctcaaggcagggcaagccggggtggtgcaggtctcagggcacgagtccctctcccttgggttccattttcttggagcagcctattagttctggtggggttgccgtgtgtcggatgcagccctgaggggcagctcgtgcctgcagcccggcagctcgttctcctgttctgctgtgctgtgggctggcactcgatacctctggcaagaggatgattatctacctcactgataagaggcatcgcatggacgttctctggtctgtagtggagacaagcagttaacctagcaccatcctcatcctccctgcagaagccattagcagacctttgggccagggcagcctccctataattttcttcatctcttgctaatctctataataaggttgctttttctttcttagttgagtaaacaagtaagccacagtgtttgaaagggaaaaaccatattgccttgtgtgttgcttttcccagtcaaaagggtctgaccttagaaagtccccaccagtgatgctgagtgttctgctatggaaacaatgctgcttttctctcagctgtccaaagttcagccgttcctccttccccttctcccagtgcgtttgactttgtcaggtcagcctcacttgtccctttcacagttggcccataaagtcatgtttctctccctttagaatagggaggggaagggatcaggtgtgttgtcctgggcctttcaaccttgcgggctgtgctgagttccagagagctgccggaattccaggtttgactctccagcacagagcagagctacacagaggtgacccacgttagtccactgagagttctgagtccaaagggtgtacgttgcataaggctagagaccgcttttcctcctttccccccaggctctttgtttccctccacccacccttccatatcctctggagcaggagacaatgtgggtgcccagaagtgccctgcgctttcaggcagtgtctctgttttcccaaggtgaaacttagatatcatggactgttgtccagcctcaatgcttcattttccccttgcatatcaactgccctaatctgactttttttaagtgcaaataaactgctataagacattttggttagtaaaa

SEQ ID NO: 172795 - DNA, 2381 bp, Homo sapiens
  Payload ID: 13966
  Gene Symbol: PDPR
  Gene Name: pyruvate dehydrogenase phosphatase regulatory subunit
  ENST ID: ENST00000564563
  CDS Start-End: 99-212
aaagtctgtatactttttggttgggcagatctccaccggccctcaatctgattggccctcgagctgtggatgtgctgtctgagttgtcctatgcccctatgactccagaccacttcccaagcctcttttgcaagtggcaaccacagctgagtgaaacaaactgtaaccgaatgaaagcaatgacaacggaatcctccccaggaagctgctgattagagagggccaaacggacagacatcttggccacctgtaacgagcaacttccaggagatgagtgtgggctatgcaaatgggatccgggtgatgagcatgacgcacacaggagagccaggattcatgctctacatccccatagagtacgccctgcatgtatacaatgaagtgatgagtgttggccagaaatacggaatccggaatgctgggtattacgctcttcgcagtctccgaattgagaagttttttgccttctggggtcaggatataaataacctcaccacgcccctggaatgtggacgagagtctcgggtgaaattagagaagggcatggatttcattggtcgcgacgccctcctgcagcagaagcagaatggagtgtataaacgcctcaccatgttcatcctggacgaccatgattcagacctagacctttggccttggtggggagagcccatttaccggaatgggcagtatgttggcaagaccaccagcagtgcctacagctacagcctggagcgccacgtttgcctgggctttgtgcacaatttttctgaggacacgggggaagagcaagtggtgacagcagatttcatcaaccggggagagtatgagattgacatcgcgggataccgcttccaggccaaggccaagctctaccctgtcgcctccctcttcacccagaagcgccgaaaggatgacatggagctgagtgacttacatgggaagtgatgccaccagggcagcctcacctcctccccatcatcttgtcctagagtgggcgtcaccttggagcttctcttccttccgcctctgttcctcttctggagcctttgcctcccatctcttatctccttgatataattttgaacttgacctactttaaacttttttgctctgcagccttccttgcccttccacctcctcctcctaatattcactctgggctcttcttcccttcccacccctcactcagcttctcgtggtggcaggaggtatgtctgacaggacagaagcaagctccactgtggacatgagtgatggtgacagctgctttcaaattctgcatctcaaggcagggcaagccggggtggtgcaggtctcagggcacgagtccctctcccttgggttccattttcttggagcagcctattagttctggtggggttgccgtgtgtcggatgcagccctgaggggcagctcgtgcctgcagcccggcagctcgttctcctgttctgctgtgctgtgggctggcactcgatacctctggcaagaggatgattatctacctcactgataagaggcatcgcatggacgttctctggtctgtagtggagacaagcagttaacctagcaccatcctcatcctccctgcagaagccattagcagacctttgggccagggcagcctccctataattttcttcatctcttgctaatctctataataaggttgctttttctttcttagttgagtaaacaagtaagccacagtgtttgaaagggaaaaaccatattgccttgtgtgttgcttttcccagtcaaaagggtctgaccttagaaagtccccaccagtgatgctgagtgttctgctatggaaacaatgctgcttttctctcagctgtccaaagttcagccgttcctccttccccttctcccagtgcgtttgactttgtcaggtcagcctcacttgtccctttcacagttggcccataaagtcatgtttctctccctttagaatagggaggggaagggatcaggtgtgttgtcctgggcctttcaaccttgcgggctgtgctgagttccagagagctgccggaattccaggtttgactctccagcacagagcagagctacacagaggtgacccacgttagtccactgagagttctgagtccaaagggtgtacgttgcataaggctagagaccgcttttcctcctttccccccaggctctttgtttccctccacccacccttccatatcctctggagcaggagacaatgtgggtgcccagaagtgccctgcgctttcaggcagtgtctctgttttcccaaggtgaaacttagatatcatggactgttgtccagcctcaatgcttcattttccccttgcatatcaactgccctaatctgactttttttaagtgcaaataaactgctataagac

SEQ ID NO: 172796 - DNA, 1207 bp, Homo sapiens
  Payload ID: 13966
  Gene Symbol: PDPR
  Gene Name: pyruvate dehydrogenase phosphatase regulatory subunit
  ENST ID: ENST00000567046
  CDS Start-End: 139-852
attaggatatgtttgaagtggatttagcttctctgaatttaaagtctgtatactttttggttgggcagatctccaccggccctcaatctgattggccctcgagctgtggatgtgctgtctgagttgtcctatgcccctatgactccagaccacttcccaagcctcttttgcaaggagatgagtgtgggctatgcaaatgggatccgggtgatgagcatgacgcacacaggagagccaggattcatgctctacatccccatagagtacgccctgcatgtatacaatgaagtgatgagtgttggccagaaatacggaatccggaatgctgggtattacgctcttcgcagtctccgaattgagaagttttttgccttctggggtcaggatataaataacctcaccacgcccctggaatgtggacgagagtctcgggtgaaattagagaagggcatggatttcattggtcgcgacgccctcctgcagcagaagcagaatggagtgtataaacgcctcaccatgttcatcctggacgaccatgattcagacctagacctttggccttggtggggagagcccatttaccggaatgggcagtatgttggcaagaccaccagcagtgcctacagctacagcctggagcgccacgtttgcctgggctttgtgcacaatttttctgaggacacgggggaagagcaagtggtgacagcagatttcatcaaccggggagagtatgagattgacatcgcgggataccgcttccaggccaaggccaagctctaccctgtcgcctccctcttcacccagaagcgccgaaaggatgacatggagctgagtgacttacatgggaagtgatgccaccagggcagcctcacctcctccccatcatcttgtcctagagtgggcgtcaccttggagcttctcttccttccgcctctgttcctcttctggagcctttgcctcccatctcttatctccttgatataattttgaacttgacctactttaaacttttttgctctgcagccttccttgcccttccacctcctcctcctaatattcactctgggctcttcttcccttcccacccctcactcagcttctcgtggtggcaggaggtatgtctgacaggacagaagcaagctccactgtggacatgagtgatggtgacagctgctttcaaattctgcatctcaaggcagggcaagcc

SEQ ID NO: 172797 - DNA, 690 bp, Homo sapiens
  Payload ID: 13966
  Gene Symbol: PDPR
  Gene Name: pyruvate dehydrogenase phosphatase regulatory subunit
  ENST ID: ENST00000567896
  CDS Start-End: 390-690
atactttttggttgggcagatctccaccgggtactgatttggggttggggcttcttccatcacatagccttgctgggaaaaggaggagaacgggaattgtgtggggtggttatggccagccctgctgcgttcagcaggccctgttggcagaggtgtattcgccagaatcggggtgcttagcatccatccttggagtgtctaagcaaagggacatattcctggtctctgcacccaggcctggctatagctgagcaagtctacagtagacctttcccattggctcagctgttcagaaggagagctggacatctcttgttcttttccatttagccctcaatctgattggccctcgagctgtggatgtgctgtctgagttgtcctatgcccctatgactccagaccacttcccaagcctcttttgcaaggagatgagtgtgggctatgcaaatgggatccgggtgatgagcatgacgcacacaggagagccaggattcatgctctacatccccatagagtacgccctgcatgtatacaatgaagtgatgagtgttggccagaaatacggaatccggaatgctgggtattacgctcttcgcagtctccgaattgagaagttttttgccttctggggtcaggatataaataacctcaccacgcccctggaatgtggacgagagtctcgggtgaaat

SEQ ID NO: 172798 - DNA, 598 bp, Homo sapiens
  Payload ID: 13966
  Gene Symbol: PDPR
  Gene Name: pyruvate dehydrogenase phosphatase regulatory subunit
  ENST ID: ENST00000569042
  CDS Start-End: 7-598
agaataatgctttccttatctaccctcaatctgattggccctcgagctgtggatgtgctgtctgagttgtcctatgcccctatgactccagaccacttcccaagcctcttttgcaaggagatgagtgtgggctatgcaaatgggatccgggtgatgagcatgacgcacacaggagagccaggattcatgctctacatccccatagagtacgccctgcatgtatacaatgaagtgatgagtgttggccagaaatacggaatccggaatgctgggtattacgctcttcgcagtctccgaattgagaagttttttgccttctggggtcaggatataaataacctcaccacgcccctggaatgtggacgagagtctcgggtgaaattagagaagggcatggatttcattggtcgcgacgccctcctgcagcagaagcagaatggagtgtataaacgcctcaccatgttcatcctggacgaccatgattcagacctagacctttggccttggtggggagagcccatttaccggaatgggcagtatgttggcaagaccaccagcagtgcctacagctacagcctggagcgccacgtttgcctgg

SEQ ID NO: 172799 - DNA, 7223 bp, Homo sapiens
  Payload ID: 13966
  Gene Symbol: PDPR
  Gene Name: pyruvate dehydrogenase phosphatase regulatory subunit
  Uniprot ID: Q8NCN5
  ENST ID: ENST00000568530
  CDS Start-End: 163-2802
aactgttgtggctgccgcattgctcccgccgggctgtagctgagcgcggagcccgtggggaccggtgagaactaaagactgctgcagagtccggaggaagaagtcacctagaaaaatctgggacagggcatttgagttcctgagatctagttggtgagagacatgatgttctaccggttgctgtcgattgttggaagacaaagagccagcccaggatggcagaactggtcctctgcaagaaacagcacgtcagctgccgaggcgcgttccatggccctgcccacccaggcacaggtggtcatctgtggaggtggaatcacgggcacttctgtggcctatcacctctccaaaatggggtggaaggatattgtccttttggagcagggcaggctggctgctggctctaccaggttctgtgctggcatcctgagcactgccaggcacttgaccattgagcagaagatggcagactactcaaacaaactctactatcagttagagcaagaaacagggatccaaacaggttacacaaggacaggctcaatctttctggcccaaactcaggaccgactgatctccctgaagcgcatcaacgcagggctgaatgttataggtatcccttctgagatcatctcccccaagaaagtggccgagcttcaccatctcctcaacgtgcacgacctggtgggggccatgcatgttcccgaggatgcagtggtgtcttccgctgacgtggctcttgccctggcaagtgctgcctcccaaaatggtgttcagatctatgaccggacatctgttcttcatgtaatggtcaaaaaaggtcaagttactggagtggagaccgataaaggacagattgaatgccagtattttgtcaactgtgctggccagtgggcatacgagctgggtctgtccaacgaggagccggttagtatcccgctacatgcctgcgaacacttctacctcctgactcgccccttggagacccctctgcagagcagcacaccaactattgtggatgctgatggaagaatttatattcggaactggcagggtggcatcctgtctgggggctttgagaagaacccgaaaccaattttcactgagggcaagaaccagctggagattcagaatctacaggaagactgggatcactttgagcctctgttgagttcccttctgaggaggatgccagaattagagactctggagatcatgaagttggtgaactgcccagagaccttcacaccagacatgaggtgcatcatgggcgagtctcctgcagtgcagggctactttgtcctggcaggaatgaactctgctggcctttcatttggtggaggagccggaaagtaccttgccgaatggatggtacatggttatccctcagaaaacgtttgggaattggacctgaaacgttttggagccctccagagcagccgcacctttctgcgccaccgggtcatggaagtcatgcctttgatgtatgatctgaaggttccccgctgggacttccagaccggtaggcagttacgcacctctcctctctacgaccggctggatgcacagggagccaggtggatggagaaacatggatttgagaggccaaagtactttgttccccccgacaaggacctcctggcattggagcagagcaagactttctataagccagattggtttgacatcgtggagtctgaagtcaagtgctgtaaggaagctgtgtgtgtcattgacatgtcctctttcacaaagtttgagataacatccactggggatcaggcattagaagttctacagtacctcttctccaatgacctggatgtgcctgtgggccacattgtgcatactggcatgctcaacgagggtggagggtatgaaaatgactgcagcatagcacgactgaacaagcgcagtttcttcatgatctctccaaccgaccagcaggtccactgttgggcctggcttaagaaacacatgccgaaagacagcaacctgctcctggaggacgtcacctggaagtacacagccctcaatctgattggccctcgagctgtggatgtgctgtctgagttgtcctatgcccctatgactccagaccacttcccaagcctcttttgcaaggagatgagtgtgggctatgcaaatgggatccgggtgatgagcatgacgcacacaggagagccaggattcatgctctacatccccatagagtacgccctgcatgtatacaatgaagtgatgagtgttggccagaaatacggaatccggaatgctgggtattacgctcttcgcagtctccgaattgagaagttttttgccttctggggtcaggatataaataacctcaccacgcccctggaatgtggacgagagtctcgggtgaaattagagaagggcatggatttcattggtcgcgacgccctcctgcagcagaagcagaatggagtgtataaacgcctcaccatgttcatcctggacgaccatgattcagacctagacctttggccttggtggggagagcccatttaccggaatgggcagtatgttggcaagaccaccagcagtgcctacagctacagcctggagcgccacgtttgcctgggctttgtgcacaatttttctgaggacacgggggaagagcaagtggtgacagcagatttcatcaaccggggagagtatgagattgacatcgcgggataccgcttccaggccaaggccaagctctaccctgtcgcctccctcttcacccagaagcgccgaaaggatgacatggagctgagtgacttacatgggaagtgatgccaccagggcagcctcacctcctccccatcatcttgtcctagagtgggcgtcaccttggagcttctcttccttccgcctctgttcctcttctggagcctttgcctcccatctcttatctccttgatataattttgaacttgacctactttaaacttttttgctctgcagccttccttgcccttccacctcctcctcctaatattcactctgggctcttcttcccttcccacccctcactcagcttctcgtggtggcaggaggtatgtctgacaggacagaagcaagctccactgtggacatgagtgatggtgacagctgctttcaaattctgcatctcaaggcagggcaagccggggtggtgcaggtctcagggcacgagtccctctcccttgggttccattttcttggagcagcctattagttctggtggggttgccgtgtgtcggatgcagccctgaggggcagctcgtgcctgcagcccggcagctcgttctcctgttctgctgtgctgtgggctggcactcgatacctctggcaagaggatgattatctacctcactgataagaggcatcgcatggacgttctctggtctgtagtggagacaagcagttaacctagcaccatcctcatcctccctgcagaagccattagcagacctttgggccagggcagcctccctataattttcttcatctcttgctaatctctataataaggttgctttttctttcttagttgagtaaacaagtaagccacagtgtttgaaagggaaaaaccatattgccttgtgtgttgcttttcccagtcaaaagggtctgaccttagaaagtccccaccagtgatgctgagtgttctgctatggaaacaatgctgcttttctctcagctgtccaaagttcagccgttcctccttccccttctcccagtgcgtttgactttgtcaggtcagcctcacttgtccctttcacagttggcccataaagtcatgtttctctccctttagaatagggaggggaagggatcaggtgtgttgtcctgggcctttcaaccttgcgggctgtgctgagttccagagagctgccggaattccaggtttgactctccagcacagagcagagctacacagaggtgacccacgttagtccactgagagttctgagtccaaagggtgtacgttgcataaggctagagaccgcttttcctcctttccccccaggctctttgtttccctccacccacccttccatatcctctggagcaggagacaatgtgggtgcccagaagtgccctgcgctttcaggcagtgtctctgttttcccaaggtgaaacttagatatcatggactgttgtccagcctcaatgcttcattttccccttgcatatcaactgccctaatctgactttttttaagtgcaaataaactgctataagacattttggttagtaaaactctagcctttggcgtgttggtatcttggaagcattagctctgataggtctataagtgtattaagggacatccttccatttcattagagcagcttaaaatgctcaggtgtctgccttctctggtgtttctttgggatctctgtttacccacttacgctggctccttctagacatttcttgccacttccccaactagaccactcctagtgattactgactttagtgcctaaacctttttggaaggttctggttggcttgttagaggagcatatgattagaattctgtttgggggtctagttgtcttggagcaagtatgtacttaactagccgagagatgctgcctctaggcagagaggaggagaggtgttgccggctggagggccaaccagtgaacaccagctgtgaaggccttgggagaggaggaacaggcccttgggcagatgcaggcattaccagcagggagcagacttacctccgaagatggagacaggtgactgagagctgcaggcctcctctgctcttccaaacacgtagcatttgcacccctccaaagccatctttgtaaaggaaaacgtatttgtaattgaatccagaagaatttagttacacatagacataactcttcaaccttaactatggcaatacatttgtgctttaactgttacatagcagtatcaccacttaccaggatccaaatcgaaataataaaagctgtctccatagtttaaaatcgaatagtgccatcatcacagtatattagtcaaatagaagcttcatcagaaatgtatcccacatagagttttaagacttggattctcttctgcccttgttaatctccaactaattactacagattgacacgtttttaattagctgtcctttgtaagaagtcaggaaatctgatgctgtgtccaaaattatgcactgtttgttgaagtagaaccagaaatcctgacctcctgttaaatgacatcagtttccccctctgagcaacagactgcttgtcttgctaggagaggaggatggggggctgagcactcaggctgtccattgaaaccccttgtccatgaatagggtcatactcctaagactgatggggtgttgatcttctaggacatcacttgtttattcagtgccccaaacacagatttctcttctagcactttagagttgatccttgaagtctctcctggttcattcaaatacaagctgtgtgagtctggtggttttctgtgattggtctaatgtgagctctttgaacagacagatctgacagtgaatgactctcccctgcttctggcataactgctttgcctctgtctagtgtccaagcatcttagctgttcaagaggagagggcagcataacttcctgaccaccggtgtcagatatcagagcattctggactcctgagaggcagtggcctcttgagtgaacaggggaggccagtagatgccccagatccagagccgtggctgcaaatccagcaggaataaggagggacaaccacagcctcctcatccatgtgtcatttccaagggtttgccttgtgtctcagctcattctgggcagcacgtttgtcttctgtccctagagatttgaaggattttggactcttgtgaatgggtgactggacttggctttacagagttgggtgcttttttctctctgcaattacctgtcatagcattttgtgctcaccacgaaggatggtctctgccttctcttgtcggtgtatgccatctgaacctaggaacacaaagtatattggcctcaaacggagacccagggttgccagttttccgtgggccttcccctcccttgaaatgtctttaattacctccccttcatcgtcaggccacgtgtgacttctgttcttagcactgccagggtcattgacttccatctaagcttgcatcaggaagatgttccttctgtgatcattggtactgaagccagaaaagctctcattcaggaactctgaagagcaaaaagggacaaacactaactgctgagctgggccatttgatctcctttcaccttgcattgctgtcacagcaccttgtatgatggcaggacaggctccagcagagagaactgcacagtgaccactgtatttttcacgctcttccagggatccctgtcccccgacattgaagagatctcattcaggccagagacacagagaccacatagcccagtgattaaaccccggtttcactctggccccaggagtggagcctggccactcctgtttggttctcactgggaggcccactggccttggatcatctcctcatgcacacccggagttttacctgcttgcttgctttcctggactgctgtttgcaagaaagtaactaaaacatgaaaagtaaacctccagcttccacagtatattacctgccgttgcatgcatttgaaagttagcctcctcccttgccaccgtcttggtggcagtagcgatgcaagaatgatgggagctttccgagagcgttcagtgtttcactgaagacaggacccatagccttcatttctggctctgtgtctcctctggcatatggacacatttcctggcatttgcctgagtctacaccactttttgagaacctgaaatagaagggaatcttctgtggcccacagtctccatattggcactagaagactggcctggcggaggaatttgcgttggcttgctttcaggggttagctacaagattcagctttatatctctgttgcttcttggccagtgtagtcaataagggtcttctttaacatctaagatagaggtttggttggccgggcgtggtcgcttactcctgtaatcccagcactttgggaggcccagtgaggtgggagaattgcttgaacccaggaggcagaggttgcagtgagctgagattgcaccactgcactccagcctgggtaacagagtgagactcttgtctcaaaaaaaaaaaaaaaaaaa

SEQ ID NO: 172800 - DNA, 551 bp, Homo sapiens
  Payload ID: 13966
  Gene Symbol: PDPR
  Gene Name: pyruvate dehydrogenase phosphatase regulatory subunit
  ENST ID: ENST00000563930
  CDS Start-End: 103-551
attaggatatgtttgaagtggatttagcttctctgaatttaaaccctcaatctgattggccctcgagctgtggatgtgctgtctgagttgtcctatgcccctatgactccagaccacttcccaagcctcttttgcaaggagatgagtgtgggctatgcaaatgggatccgggtgatgagcatgacgcacacaggagagccaggattcatgctctacatccccatagagtacgccctgcatgtatacaatgaagtgatgagtgttggccagaaatacggaatccggaatgctgggtattacgctcttcgcagtctccgaattgagaagttttttgccttctggggtcaggatataaataacctcaccacgcccctggaatgtggacgagagtctcgggtgaaattagagaagggcatggatttcattggtcgcgacgccctcctgcagcagaagcagaatggagtgtataaacgcctcaccatgttcatcctggacgaccatgattcagacctagacctttggccttggtggggagagcccatttaccggaa

SEQ ID NO: 172801 - DNA, 4272 bp, Homo sapiens
  Payload ID: 13967
  Gene Symbol: PDP1
  Gene Name: pyruvate dehyrogenase phosphatase catalytic subunit 1
  Uniprot ID: Q9P0J1
  ENST ID: ENST00000297598
  CDS Start-End: 270-1883
actcgtcactgcgcagccaatcggcaggcgggaagcactccggcccgaacgtgcgggcggggcagggtggcggccccgcacggtaggggagcagagtgggcaggccgggggtgagggctcgcgctccgggagctgcacggggctgcgtggaaagagcgccgagcggtggcgtcgttgtcgccccctcctcgtcgggaagaatcgtttggtctcctgccgtgcccggaatcccagtcagaagttccagcctgccactgttctctgatgccatgccagcaccaactcaactgttttttcctctcatccgtaactgtgaactgagcaggatctatggcactgcatgttactgccaccacaaacatctctgttgttcctcatcgtacattcctcagagtcgactgagatacacacctcatccagcatatgctaccttttgcaggccaaaggagaactggtggcagtacacccaaggaaggagatatgcttccacaccacagaaattttacctcacacctccacaagtcaatagcatccttaaagctaatgaatacagtttcaaagtgccagaatttgacggcaaaaatgtcagttctatccttggatttgacagcaatcagctgcctgcaaatgcacccattgaggaccggagaagtgcagcaacctgcttgcagaccagagggatgcttttgggggtttttgatggccatgcaggttgtgcttgttcccaggcagtcagtgaaagactcttttattatattgctgtctctttgttaccccatgagactttgctagagattgaaaatgcagtggagagcggccgggcactgctacccattctccagtggcacaagcaccccaatgattactttagtaaggaggcatccaaattgtactttaacagcttgaggacttactggcaagagcttatagacctcaacactggtgagtcgactgatattgatgttaaggaggctctaattaatgccttcaagaggcttgataatgacatctccttggaggcgcaagttggtgatcctaattcttttctcaactacctggtgcttcgagtggcattttctggagccactgcttgtgtggcccatgtggatggtgttgaccttcatgtggccaatactggcgatagcagagccatgctgggtgtgcaggaagaggacggctcatggtcagcagtcacgctgtctaatgaccacaatgctcaaaatgaaagagaactagaacggctgaaattggaacatccaaagagtgaggccaagagtgtcgtgaaacaggatcggctgcttggcttgctgatgccatttagggcatttggagatgtaaagttcaaatggagcattgaccttcaaaagagagtgatagaatctggcccagaccagttgaatgacaatgaatataccaagtttattcctcctaattatcacacacctccttatctcactgctgagccagaggtaacttaccaccgattaaggccacaggataagtttctggtgttggctactgatgggttgtgggagactatgcataggcaggatgtggttaggattgtgggtgagtacctaactggcatgcatcaccaacagccaatagctgttggtggctacaaggtgactctgggacagatgcatggccttttaacagaaaggagaaccaaaatgtcctcggtatttgaggatcagaacgcagcaacccatctcattcgccacgctgtgggcaacaacgagtttgggactgttgatcatgagcgcctctctaaaatgcttagtcttcctgaagagcttgctcgaatgtacagagatgacattacaatcattgtagttcagttcaattctcatgttgtaggggcgtatcaaaaccaagaatagtgagtggctctttcactggcaattctcaaatgatatacatttaaagggcagattttttaaaaagatactactataataaacatttccagttggtcattctaagcatttacccttttgatactctagctagtcaggtactccaaattgactttgcagcagggtggcagggtcaggagagtctggtcctgcctagctcagatttcatggcacctgcacttgaagcaagtcacttctttatcacaggtgtcttgaaacattagcttcttttaccaacctgagaaaattaggatgacctggcaaataagatcttgaataggccaaaagcaagtatcttgctgtgtgtagtctcttggttaaagtgaagaaacagtactgttcacacctttcttcactgagattccagtgtacatgagaacatatatttattgcatgattttctagatacacagtctatgcattattcatatacatttattttagcctaaagtggttttcaaatccagttcttcaagccataaatgaccaagatccaagcaatctgaatttgtttttgtgattatttgactggaatgcttcttaagtggaataactatactccgttatccacccgatttcctaatgtaattgaaagattttctattttgccacacacttggagacaataagggtttttagttttatctactcttctattgaagttaaagaaagaaaaaaagatttttttatttgtattaatgaaaagctttagtttaaaataaggagatccagaataaaaagaagagactgatctcttcaattattgtcatctgtagccaccagcacatcactcttatgtaatccccaaaggcttggcatgccgtaagtgtgtggtgggtagactgctgccggggaatcgtacttcttatttagtaatgataagacttttcattatttttggaattttaaagatgacataaataagtttaaatatcaatttggggagtaaggtttaatattgccatcgggtattgagacaggaggaagtttctgtttttctccatttagacataggtcaattaaaatatttgggtttaaaatgactaaatgctttaaacatattgtagcttaagatatatgtgttaagatatatacatgagaaactttaaaaggtaactactgtgcatgcctgatgcttaatagaatacttagtggcatcaaatgtttgcagcagtctccataattatattcagtcccttctaatactgtatcaatgtaaatgaaataaatatattcaaattggctttttgatatgcatcaagtggcattttgttcctgtgtttaatagtgatctgtatacagctgtgcacatattgtcatcacttattctagcatcactgttaaggctgtgattatgtttgatattcacctggattttaatacaagccaatatcagcttcccattgtgtaataacttgggtgtttaggagtcttttcacattttttggggatatgaactagatgttcaagaactccttctggactgtggatactgaatcagtgtactattggctgcagaatttgtttcaattgaaaatagactcaggaagattgctgctcagaatatcatataatgtttattttttgaggtgtttttgtttttatttgtgtgtttttttttttttaagtcagcttggaacttttttcctgggtagtatttgggagagggaaaggctgtactatatatttatttctaaatgttttgactgggcatttttcttttaatgaaatatgtggactgctctagcaaaccctattttcagctactatttgaatattcttgaacaccaccactgaagagtttcatatacaccaaataatgtctcatctctatagtacagggaatataaaattggtttcctgtggtcatgatcaagatagtagtattattacacaagaaacttggtctgcagtctggaagcttgtctgctctatagaaatgaaaatgcagcatgaagttgacattgtggaaatgaaagtaattgggtattagaaatctgaaagtactgtcatctaaaagcaattgtgattttattgtaattggttgtcactgttgtacggtgtctagaattaaagaatacatgtaaactttcatggtatttagcctttcttaaatttttttaaaatttaaactttctaacctatgtattcaacttctgtatttatatttaatcagtggttcatgttatataatacacccttaactagttaaatggaatgttggtatggtacagagtaccatattgctaagaaaactgtcttataaaagatgtatatgtgtgaagacatgaaagtttaatgtacagaatggttggagaaatgcctatggtgaattaaagcttcatatctgctt

SEQ ID NO: 172802 - DNA, 4358 bp, Homo sapiens
  Payload ID: 13967
  Gene Symbol: PDP1
  Gene Name: pyruvate dehyrogenase phosphatase catalytic subunit 1
  Uniprot ID: Q9P0J1
  ENST ID: ENST00000396200
  CDS Start-End: 277-1965
agagtgggcaggccgggggtgagggctcgcgctccgggagctgcacggggctgcgtggaaagagcgccgagcggtggcgtcgttgtcgccccctcctcgtcgggaagaatcgtttggtctcctgccgtgcccggttcgtattccctactccctgccacgagccgccccgtccgggatcctccacccgtccaaagttgtgagggggcgccgggcgtgctcgcggatcggcggccgcgggcgtgcggagggctggacgagccctggagcgccaggagaatgtgtgtgtgtcccgggcccagacgaattggaatcccagtcagaagttccagcctgccactgttctctgatgccatgccagcaccaactcaactgttttttcctctcatccgtaactgtgaactgagcaggatctatggcactgcatgttactgccaccacaaacatctctgttgttcctcatcgtacattcctcagagtcgactgagatacacacctcatccagcatatgctaccttttgcaggccaaaggagaactggtggcagtacacccaaggaaggagatatgcttccacaccacagaaattttacctcacacctccacaagtcaatagcatccttaaagctaatgaatacagtttcaaagtgccagaatttgacggcaaaaatgtcagttctatccttggatttgacagcaatcagctgcctgcaaatgcacccattgaggaccggagaagtgcagcaacctgcttgcagaccagagggatgcttttgggggtttttgatggccatgcaggttgtgcttgttcccaggcagtcagtgaaagactcttttattatattgctgtctctttgttaccccatgagactttgctagagattgaaaatgcagtggagagcggccgggcactgctacccattctccagtggcacaagcaccccaatgattactttagtaaggaggcatccaaattgtactttaacagcttgaggacttactggcaagagcttatagacctcaacactggtgagtcgactgatattgatgttaaggaggctctaattaatgccttcaagaggcttgataatgacatctccttggaggcgcaagttggtgatcctaattcttttctcaactacctggtgcttcgagtggcattttctggagccactgcttgtgtggcccatgtggatggtgttgaccttcatgtggccaatactggcgatagcagagccatgctgggtgtgcaggaagaggacggctcatggtcagcagtcacgctgtctaatgaccacaatgctcaaaatgaaagagaactagaacggctgaaattggaacatccaaagagtgaggccaagagtgtcgtgaaacaggatcggctgcttggcttgctgatgccatttagggcatttggagatgtaaagttcaaatggagcattgaccttcaaaagagagtgatagaatctggcccagaccagttgaatgacaatgaatataccaagtttattcctcctaattatcacacacctccttatctcactgctgagccagaggtaacttaccaccgattaaggccacaggataagtttctggtgttggctactgatgggttgtgggagactatgcataggcaggatgtggttaggattgtgggtgagtacctaactggcatgcatcaccaacagccaatagctgttggtggctacaaggtgactctgggacagatgcatggccttttaacagaaaggagaaccaaaatgtcctcggtatttgaggatcagaacgcagcaacccatctcattcgccacgctgtgggcaacaacgagtttgggactgttgatcatgagcgcctctctaaaatgcttagtcttcctgaagagcttgctcgaatgtacagagatgacattacaatcattgtagttcagttcaattctcatgttgtaggggcgtatcaaaaccaagaatagtgagtggctctttcactggcaattctcaaatgatatacatttaaagggcagattttttaaaaagatactactataataaacatttccagttggtcattctaagcatttacccttttgatactctagctagtcaggtactccaaattgactttgcagcagggtggcagggtcaggagagtctggtcctgcctagctcagatttcatggcacctgcacttgaagcaagtcacttctttatcacaggtgtcttgaaacattagcttcttttaccaacctgagaaaattaggatgacctggcaaataagatcttgaataggccaaaagcaagtatcttgctgtgtgtagtctcttggttaaagtgaagaaacagtactgttcacacctttcttcactgagattccagtgtacatgagaacatatatttattgcatgattttctagatacacagtctatgcattattcatatacatttattttagcctaaagtggttttcaaatccagttcttcaagccataaatgaccaagatccaagcaatctgaatttgtttttgtgattatttgactggaatgcttcttaagtggaataactatactccgttatccacccgatttcctaatgtaattgaaagattttctattttgccacacacttggagacaataagggtttttagttttatctactcttctattgaagttaaagaaagaaaaaaagatttttttatttgtattaatgaaaagctttagtttaaaataaggagatccagaataaaaagaagagactgatctcttcaattattgtcatctgtagccaccagcacatcactcttatgtaatccccaaaggcttggcatgccgtaagtgtgtggtgggtagactgctgccggggaatcgtacttcttatttagtaatgataagacttttcattatttttggaattttaaagatgacataaataagtttaaatatcaatttggggagtaaggtttaatattgccatcgggtattgagacaggaggaagtttctgtttttctccatttagacataggtcaattaaaatatttgggtttaaaatgactaaatgctttaaacatattgtagcttaagatatatgtgttaagatatatacatgagaaactttaaaaggtaactactgtgcatgcctgatgcttaatagaatacttagtggcatcaaatgtttgcagcagtctccataattatattcagtcccttctaatactgtatcaatgtaaatgaaataaatatattcaaattggctttttgatatgcatcaagtggcattttgttcctgtgtttaatagtgatctgtatacagctgtgcacatattgtcatcacttattctagcatcactgttaaggctgtgattatgtttgatattcacctggattttaatacaagccaatatcagcttcccattgtgtaataacttgggtgtttaggagtcttttcacattttttggggatatgaactagatgttcaagaactccttctggactgtggatactgaatcagtgtactattggctgcagaatttgtttcaattgaaaatagactcaggaagattgctgctcagaatatcatataatgtttattttttgaggtgtttttgtttttatttgtgtgtttttttttttttaagtcagcttggaacttttttcctgggtagtatttgggagagggaaaggctgtactatatatttatttctaaatgttttgactgggcatttttcttttaatgaaatatgtggactgctctagcaaaccctattttcagctactatttgaatattcttgaacaccaccactgaagagtttcatatacaccaaataatgtctcatctctatagtacagggaatataaaattggtttcctgtggtcatgatcaagatagtagtattattacacaagaaacttggtctgcagtctggaagcttgtctgctctatagaaatgaaaatgcagcatgaagttgacattgtggaaatgaaagtaattgggtattagaaatctgaaagtactgtcatctaaaagcaattgtgattttattgtaattggttgtcactgttgtacggtgtctagaattaaagaatacatgtaaactttcatggtatttagcctttcttaaatttttttaaaatttaaactttctaacctatgtattcaacttctgtatttatatttaatcagtggttcatgttatataatacacccttaactagttaaatggaatgttggtatggtacagagtaccatattgctaagaaaactgtcttataaaagatgtatatgtgtgaagacatgaaagtttaatgtacagaatggttggagaaatgcctatggtgaattaaagcttcatatctgctttctg

SEQ ID NO: 172803 - DNA, 2554 bp, Homo sapiens
  Payload ID: 13967
  Gene Symbol: PDP1
  Gene Name: pyruvate dehyrogenase phosphatase catalytic subunit 1
  Uniprot ID: Q9P0J1
  ENST ID: ENST00000520728
  CDS Start-End: 226-1839
acggtaggggagcagagtgggcaggccgggggtgagggctcgcgctccgggagctgcacggggctgcgtggaaagagcgccgagcggtggcgtcgttgtcgccccctcctcgtcgggaagaatcgtttggtctcctgccgtgcccggagaatgtgtgtgtgtcccgggcccagacgaattggaatcccagtcagaagttccagcctgccactgttctctgatgccatgccagcaccaactcaactgttttttcctctcatccgtaactgtgaactgagcaggatctatggcactgcatgttactgccaccacaaacatctctgttgttcctcatcgtacattcctcagagtcgactgagatacacacctcatccagcatatgctaccttttgcaggccaaaggagaactggtggcagtacacccaaggaaggagatatgcttccacaccacagaaattttacctcacacctccacaagtcaatagcatccttaaagctaatgaatacagtttcaaagtgccagaatttgacggcaaaaatgtcagttctatccttggatttgacagcaatcagctgcctgcaaatgcacccattgaggaccggagaagtgcagcaacctgcttgcagaccagagggatgcttttgggggtttttgatggccatgcaggttgtgcttgttcccaggcagtcagtgaaagactcttttattatattgctgtctctttgttaccccatgagactttgctagagattgaaaatgcagtggagagcggccgggcactgctacccattctccagtggcacaagcaccccaatgattactttagtaaggaggcatccaaattgtactttaacagcttgaggacttactggcaagagcttatagacctcaacactggtgagtcgactgatattgatgttaaggaggctctaattaatgccttcaagaggcttgataatgacatctccttggaggcgcaagttggtgatcctaattcttttctcaactacctggtgcttcgagtggcattttctggagccactgcttgtgtggcccatgtggatggtgttgaccttcatgtggccaatactggcgatagcagagccatgctgggtgtgcaggaagaggacggctcatggtcagcagtcacgctgtctaatgaccacaatgctcaaaatgaaagagaactagaacggctgaaattggaacatccaaagagtgaggccaagagtgtcgtgaaacaggatcggctgcttggcttgctgatgccatttagggcatttggagatgtaaagttcaaatggagcattgaccttcaaaagagagtgatagaatctggcccagaccagttgaatgacaatgaatataccaagtttattcctcctaattatcacacacctccttatctcactgctgagccagaggtaacttaccaccgattaaggccacaggataagtttctggtgttggctactgatgggttgtgggagactatgcataggcaggatgtggttaggattgtgggtgagtacctaactggcatgcatcaccaacagccaatagctgttggtggctacaaggtgactctgggacagatgcatggccttttaacagaaaggagaaccaaaatgtcctcggtatttgaggatcagaacgcagcaacccatctcattcgccacgctgtgggcaacaacgagtttgggactgttgatcatgagcgcctctctaaaatgcttagtcttcctgaagagcttgctcgaatgtacagagatgacattacaatcattgtagttcagttcaattctcatgttgtaggggcgtatcaaaaccaagaatagtgagtggctctttcactggcaattctcaaatgatatacatttaaagggcagattttttaaaaagatactactataataaacatttccagttggtcattctaagcatttacccttttgatactctagctagtcaggtactccaaattgactttgcagcagggtggcagggtcaggagagtctggtcctgcctagctcagatttcatggcacctgcacttgaagcaagtcacttctttatcacaggtgtcttgaaacattagcttcttttaccaacctgagaaaattaggatgacctggcaaataagatcttgaataggccaaaagcaagtatcttgctgtgtgtagtctcttggttaaagtgaagaaacagtactgttcacacctttcttcactgagattccagtgtacatgagaacatatatttattgcatgattttctagatacacagtctatgcattattcatatacatttattttagcctaaagtggttttcaaatccagttcttcaagccataaatgaccaagatccaagcaatctgaatttgtttttgtgattatttgactggaatgcttcttaagtggaataactatactccgttatccacccgatttcctaatgtaattgaaagattttctattttgccacacacttggagacaataagggtttttagttttatctactcttctattgaagttaaagaaagaaaaaaa

SEQ ID NO: 172804 - DNA, 596 bp, Homo sapiens
  Payload ID: 13967
  Gene Symbol: PDP1
  Gene Name: pyruvate dehyrogenase phosphatase catalytic subunit 1
  ENST ID: ENST00000518573
  CDS Start-End: 213-596
aagaatcgtttggtctcctgccgtgcccggttcgtattccctactccctgccacgagccgccccgtccgggatcctccacccgtccaaagttgtgagggggcgccgggcgtgctcgcggatcggcggccgcgggcgtgcggagggctggacgagccctggagcgccaggaatcccagtcagaagttccagcctgccactgttctctgatgccatgccagcaccaactcaactgttttttcctctcatccgtaactgtgaactgagcaggatctatggcactgcatgttactgccaccacaaacatctctgttgttcctcatcgtacattcctcagagtcgactgagatacacacctcatccagcatatgctaccttttgcaggccaaaggagaactggtggcagtacacccaaggaaggagatatgcttccacaccacagaaattttacctcacacctccacaagtcaatagcatccttaaagctaatgaatacagtttcaaagtgccagaatttgacggcaaaaatgtcagttctatccttggatttgacagcaatcagctgcctgcaaatgcacccattgaggaccggagaagt

SEQ ID NO: 172805 - DNA, 544 bp, Homo sapiens
  Payload ID: 13967
  Gene Symbol: PDP1
  Gene Name: pyruvate dehyrogenase phosphatase catalytic subunit 1
  ENST ID: ENST00000521144
  CDS Start-End: 104-544
aacatttgagcacatcttctggctcagtcatgtacacttaacctctggatgactttcaggaatcccagtcagaagttccagcctgccactgttctctgatgccatgccagcaccaactcaactgttttttcctctcatccgtaactgtgaactgagcaggatctatggcactgcatgttactgccaccacaaacatctctgttgttcctcatcgtacattcctcagagtcgactgagatacacacctcatccagcatatgctaccttttgcaggccaaaggagaactggtggcagtacacccaaggaaggagatatgcttccacaccacagaaattttacctcacacctccacaagtcaatagcatccttaaagctaatgaatacagtttcaaagtgccagaatttgacggcaaaaatgtcagttctatccttggatttgacagcaatcagctgcctgcaaatgcacccattgaggaccggagaagtgcagcaacctgcttgcagaccagagggatgcttttgggggtttttgatggccatgca

SEQ ID NO: 172806 - DNA, 581 bp, Homo sapiens
  Payload ID: 13967
  Gene Symbol: PDP1
  Gene Name: pyruvate dehyrogenase phosphatase catalytic subunit 1
  ENST ID: ENST00000518107
  CDS Start-End: 352-581
agagtgggcaggccgggggtgagggctcgcgctccgggagctgcacggggctgcgtggaaagagcgccgagcggtggcgtcgttgtcgccccctcctcgtcgggaagaatcgtttggtctcctgccgtgcccggttcgtattccctactccctgccacgagccgccccgtccgggatcctccacccgtccaaagttgtgagggggcgccgggcgtgctcgcggatcggcggccgcgggcgtgcggagggctggacgagccctggagcgccaggagaatgtgtgtgtgtcccgggcccagacgaattggaatcccagtcagaagttccagcctgccactgttctctgatgccatgccagcaccaactcaactgttttttcctctcatccgtaactgtgaactgagcaggatctatggcactgcatgttactgccaccacaaacatctctgttgttcctcatcgtacattcctcagagtcgactgagatacacacctcatccagcatatgctaccttttgcaggccaaaggagaactggtggcagtacacccaaggaaggagatatgcttccacaccacagaa

SEQ ID NO: 172807 - DNA, 2140 bp, Homo sapiens
  Payload ID: 13967
  Gene Symbol: PDP1
  Gene Name: pyruvate dehyrogenase phosphatase catalytic subunit 1
  Uniprot ID: Q9P0J1
  ENST ID: ENST00000517764
  CDS Start-End: 244-1857
attcaccgggctggagcgagacctcgcccctcctccgctcccgcctccccgccgccgcctcctctaatgagcatctctgccttgctttcaatgggccggtgctgctgtcgctgctgctgcccgcgcgggttgtggatgttgtcggctccgtgttgtgatgacaggagaatgtgtgtgtgtcccgggcccagacgaattggaatcccagtcagaagttccagcctgccactgttctctgatgccatgccagcaccaactcaactgttttttcctctcatccgtaactgtgaactgagcaggatctatggcactgcatgttactgccaccacaaacatctctgttgttcctcatcgtacattcctcagagtcgactgagatacacacctcatccagcatatgctaccttttgcaggccaaaggagaactggtggcagtacacccaaggaaggagatatgcttccacaccacagaaattttacctcacacctccacaagtcaatagcatccttaaagctaatgaatacagtttcaaagtgccagaatttgacggcaaaaatgtcagttctatccttggatttgacagcaatcagctgcctgcaaatgcacccattgaggaccggagaagtgcagcaacctgcttgcagaccagagggatgcttttgggggtttttgatggccatgcaggttgtgcttgttcccaggcagtcagtgaaagactcttttattatattgctgtctctttgttaccccatgagactttgctagagattgaaaatgcagtggagagcggccgggcactgctacccattctccagtggcacaagcaccccaatgattactttagtaaggaggcatccaaattgtactttaacagcttgaggacttactggcaagagcttatagacctcaacactggtgagtcgactgatattgatgttaaggaggctctaattaatgccttcaagaggcttgataatgacatctccttggaggcgcaagttggtgatcctaattcttttctcaactacctggtgcttcgagtggcattttctggagccactgcttgtgtggcccatgtggatggtgttgaccttcatgtggccaatactggcgatagcagagccatgctgggtgtgcaggaagaggacggctcatggtcagcagtcacgctgtctaatgaccacaatgctcaaaatgaaagagaactagaacggctgaaattggaacatccaaagagtgaggccaagagtgtcgtgaaacaggatcggctgcttggcttgctgatgccatttagggcatttggagatgtaaagttcaaatggagcattgaccttcaaaagagagtgatagaatctggcccagaccagttgaatgacaatgaatataccaagtttattcctcctaattatcacacacctccttatctcactgctgagccagaggtaacttaccaccgattaaggccacaggataagtttctggtgttggctactgatgggttgtgggagactatgcataggcaggatgtggttaggattgtgggtgagtacctaactggcatgcatcaccaacagccaatagctgttggtggctacaaggtgactctgggacagatgcatggccttttaacagaaaggagaaccaaaatgtcctcggtatttgaggatcagaacgcagcaacccatctcattcgccacgctgtgggcaacaacgagtttgggactgttgatcatgagcgcctctctaaaatgcttagtcttcctgaagagcttgctcgaatgtacagagatgacattacaatcattgtagttcagttcaattctcatgttgtaggggcgtatcaaaaccaagaatagtgagtggctctttcactggcaattctcaaatgatatacatttaaagggcagattttttaaaaagatactactataataaacatttccagttggtcattctaagcatttacccttttgatactctagctagtcaggtactccaaattgactttgcagcagggtggcagggtcaggagagtctggtcctgcctagctcagatttcatggcacctgcacttgaagcaagtcacttctttatcacaggtgtcttgaaacattagcttcttttaccaacctgagaaaa

SEQ ID NO: 172808 - DNA, 1284 bp, Homo sapiens
  Payload ID: 13967
  Gene Symbol: PDP1
  Gene Name: pyruvate dehyrogenase phosphatase catalytic subunit 1
  ENST ID: ENST00000518827
  CDS Start-End: 587-1284
atagaacgctcattaattacagcacagttttcataaattccaacttccctaggaattttgtcttttgaaggcatgttggaagttggggcattaggatataatctcagtccatgtactaagcctctgcataactgaaagatagagtcaataaaattcactctctcattttttgtttttaatctcaagaatttttgccttgaaggaaaaatgtagtggagaatttgatgtttgaacgttagaagagtgagactcaaagatgtgagctgacttttccaagattatttgggagttggtggcagacctatgcccgttagcctggcaaattgccacagtggactagagaagcaagttttgcaagaccatctactgggctttccccagccaaatctgttgtacattctgcacagtttgtactgcacaaaggacgacaaagaaaagagaaaattgaagtttgagtataggagccaggagttcagtcgtggttccacgaatgattgggagttgtgcctgccagaatataccctgtagaaatagtacatgatgaatcccagtcagaagttccagcctgccactgttctctgatgccatgccagcaccaactcaactgttttttcctctcatccgtaactgtgaactgagcaggatctatggcactgcatgttactgccaccacaaacatctctgttgttcctcatcgtacattcctcagagtcgactgagatacacacctcatccagcatatgctaccttttgcaggccaaaggagaactggtggcagtacacccaaggaaggagatatgcttccacaccacagaaattttacctcacacctccacaagtcaatagcatccttaaagctaatgaatacagtttcaaagtgccagaatttgacggcaaaaatgtcagttctatccttggatttgacagcaatcagctgcctgcaaatgcacccattgaggaccggagaagtgcagcaacctgcttgcagaccagagggatgcttttgggggtttttgatggccatgcaggttgtgcttgttcccaggcagtcagtgaaagactcttttattatattgctgtctctttgttaccccatgagactttgctagagattgaaaatgcagtggagagcggccgggcactgctacccattctccagtggcacaagcaccccaatgattactttagtaaggaggcatccaaattgtactttaacagcttgaggacttactggcaagagcttatagacctcaacactggtgagtcgactgatattgatgttaa

SEQ ID NO: 172809 - DNA, 341 bp, Homo sapiens
  Payload ID: 13967
  Gene Symbol: PDP1
  Gene Name: pyruvate dehyrogenase phosphatase catalytic subunit 1
  ENST ID: ENST00000520614
  CDS Start-End: 126-341
ctcgtcactgcgcagccaatcggcaggcgggaagcactccggcccgaacgtgcgggcggggcagggtggcggccccgcacggaatcccagtcagaagttccagcctgccactgttctctgatgccatgccagcaccaactcaactgttttttcctctcatccgtaactgtgaactgagcaggatctatggcactgcatgttactgccaccacaaacatctctgttgttcctcatcgtacattcctcagagtcgactgagatacacacctcatccagcatatgctaccttttgcaggccaaaggagaactggtggcagtacacccaaggaaggagatatgct

SEQ ID NO: 172810 - DNA, 7146 bp, Homo sapiens
  Payload ID: 13968
  Gene Symbol: PDP2
  Gene Name: pyruvate dehyrogenase phosphatase catalytic subunit 2
  Uniprot ID: Q9P2J9
  ENST ID: ENST00000311765
  CDS Start-End: 335-1924
agcacccaggcagggggtaaggggcggtgttgccccctcccgggtcccgcctttctgcccgcctctcatcctctttagccattgggcaatacctctgtccatcaagggcccgcctccgcaattgagccaaccagggctggcgggagggcgcttccttctggagctgggtcctgactagggaccgcctgggtgaggtgaggacctggtggccgcagttgtggcactgtgcgcaggcgctgaactgaccggacggagcgggcggctgtggcctcgccagctggtttaaaaatatccttttttgctgaaggaacacatttgctggtatagtttcagaatgtcaagtactgtgtcctactggatcttaaattctacaaggaacagcattgccacattgcaagggggtagacgcttatactccaggtatgtctcaaataggaataaattaaaatggaggctcttttcccgggtgccacccaccctaaacagttccccatgtggtggctttactctgtgcaaagcctacagacacacatcaacagaggaagatgattttcacttgcaactcagccctgagcagataaatgaagtgcttcgagctggcgagacaacccacaagattcttgaccttgaaagcagagtcccaaattcagtgttgcggtttgagagcaaccagctggctgccaattccccagtggaggaccggcgaggtgtagcctcctgcctgcaaaccaatggactgatgtttggcatcttcgatggacatggtggtcatgcatgtgcccaagcagtgagcgagaggctcttctactatgtggcagtgtccctgatgtcccaccagaccctggagcacatggagggagctatggaaagcatgaaacccttgctgcccatcctgcattggctcaagcacccaggggacagtatctacaaggatgtcacatctgtgcatcttgaccacctccgtgtctattggcaggaactgcttgatttgcacatggaaatgggactaagcattgaagaagcattaatgtactccttccagagactggattctgacatctcgctggaaatccaggcccccctggaagatgaggtgacaaggaacctgtcactccaggttgctttctctggggcaacagcttgcatggcccatgttgatggaattcacttgcacgtggcaaatgctggtgactgccgagccatccttggtgtccaagaggacaatggcatgtggtcttgtctgccccttacacgtgaccacaatgcctggaaccaggccgagctgtcccggctaaagagggagcaccctgagtcagaggacaggacgatcatcatggaggacaggctactgggcgtcctcatcccctgcagggcctttggggatgttcagctgaagtggagtaaagagttgcagcgcagcattctggagaggggcttcaataccgaggccctcaacatttaccagttcacacccccacactactacactccaccctacctgactgctgagcctgaggtcacataccacaggctgaggccccaggataagttccttgtgctggcctcagatggcctgtgggacatgctgagcaatgaggacgtggtaaggctggtggtggggcacctggctgaggcagattggcacaagacagacctggcccagagacccgccaacttggggctcatgcagagcctgctgctgcagaggaaagccagcgggctccacgaggctgaccaaaatgcagccacgcggctgatcagacatgccatcgggaacaatgagtatggggagatggaggcagagcggctggcggcgatgctgacattgccagaggacttggcgaggatgtacagggatgatatcactgtcactgtggtgtattttaactcagaatcaatcggtgcatattacaaggggggttaagaatctcccatcctattgtcaaggttaacataaatgctcttctaaaatgtttcacttactcctaaactagctatccaaaccttactattaaaagcgcaggcagatttaatttgctaaatagactaacaggaggaaaaaaacaaacagcctagctttaaaaaacagtgaaatagcagtgatttcatgtccctgtatgttctgattaagtcttatatgcagagaggacagagcataaagtctatagaattggcttgggcttgtgtagccccagtcatttgataaagatgttgttaaactgtgtcagcctgagccttcaaagggtaaatttaatcatgattctgagaataaagaacttcaggagcttcttaggtcttgccacaaaaatctgcaaatttgataattctcctgaattcacaatcatggacttgtagactatgaagagatattttatttgtttgtcttttatttaaattactaaggtctaggtttacaaagcatactacaggacccttttctatgcaatatcctaacttttttttttgtgattatgcttgtgagaaattttgtaatactacattctagttctgttttcgtttattttaaaactgaatccttaaacttgcaaacacgcctactgtaagcatgcttggaatgacttgttttggttttcagctgataggatctatgcctctggaccagctgaacttactggtgcagctttttgtgccctctactgagtcccattccagaaactttgagccatgctaggaggtaactagtctatgccttaactcctgacctttcctgcattagtaaaatttcctcctgggctgagcctttgggggttgattcacagcatttaagctttctgattatacctctcaaacattcttctgtcaattccacacaatccttctacctctgctatgctgaacccctcattcaccctgcacctgccaactgcaaaatattgtctgaaagaatctttcacatgttcctgcttcctatggctgcaggaaaggagaaaatgtgattgcatgtggtagttgtggtgatagacgtttagacaggacaggttaatttagcggattgtggacttaagattcaacctctatctggagaggtgaaaacacaaaggcttaaggacaacagtttctaaccaagtttctctgaatcctttcctgagaggtggtgggcaggagggaggagtgagacttatcagatgggacgcttgccccaagactgtgggataaaccaccattgctagtcctcaggaattagaccatatttagtataggagttggggcaaaaataaaagtgtaatttgtaatggtttctgtgggctgtagactctttgtatttacttggaaattcagttatgtggatccattttggagatgaatttcatctcatgagttgctgtggcatttaaacaacaggaaatgtgtccctaaatggaaacaaatataatcccacaaaaccaacaattttatttgcctctactacgtcaggcagaattcttcaattaagttgaactacatttgttgatcccttttctcatcttacccctttatgccacctactgaaaagaaaaacaaatagctaggtttggtttcctgttttttgtctatgtcccagctgacattcagtcaaatgttgggatacttctaatttggtggtgtttctttgtacatttttcagtgcaactgtttagtcatgtgttttcatctaagaaattatcttttgaatatttaagccttgatccttttattctgaaaccattaatattccttcttggctgggtgcagtagtttacgcctgtaatcccagcactgtgggaggccgaggcggatggatcacctgaggtcgggaattcgagaccagcctgaccaacatggagaaactccatctctactaaaaatacaaaattagccaggtgtggtggtgcatgcctgtaatcccagctactcgggaggctgaggcaggaaaatcacttgaacccgggaggcggaggttgcggtgagccaagatcgcaccattgcactccagcctgggcaacaagagtgaaactctgtctcaaaaaaaaaaaaaaaaaatccatcttatctcttagtccgtccttccttccttccttccttccttccttccttccttccttccttccttccttccttccttccttcctctctctctctttctttctttctttccttcttgacagggtctccctgtagccaggctggagtgcaatggcatgatcttggctcactgcaacctctgcagcccaggctcaaacgatcctcctgcctcagcctcccgagtagctgggactatgcaccaccatgcctggctaatttttttaattttttgtagagacagggttttgccatgttgcccaggctggtctcaaactcctagactcaagcaatctgcccacctcggcctcccaaggtgctgggatgataggcatgagccaccgcacccagcctatctcctagatcttgaatcaaaaataaaatgtaaatcacttccattctgctagcatgagggtttgttgctaaaattgaggattctatctgacgtttactttttgttgttttttgagacaaggtcttgctttgtcgcccatgctggagtgcagtggcatcattataactcactgtcaaactcctggactccaatgttccctccccttttagcctcccaagtagctgggtctacaggcatgaaccatcaggcccagataattaaaaaaactttttttggtgaaaacatgatcttgctatgttgctcaggctggttgtctggcattttctttgtcctttattctttatactagctaaaccctggagtatccttgaagcctttactggcatacagagtacctgaatcttactttggagcctagcatgggtcataaatatatctgattcattaacctgtgagacagctgagagaacacagactccttacctgtatctccaggcatatctggtttttctctgcctaatagattttcctgctttctagttagtaatattgagaaagaagaaaggcttatttatcatttgctttttttccactgtgaatcatctgttctttccatgaacattctggggagcacctcctgattaaactcctgtctccctgaccactatcctgctgtcattggacttcttgaagcacatgggctactgccccaggacactgggatttgagaggagtttagtggtaattgtcaggtctttcaaagcatttattattccttttatacggagatttcagtattgagacttaaaatgaactgaaaaatgagattgaacatttaatattttggatgtaacttttgaagaaagtatgctttggtgcttaaaattgtatatgattttaggtaagaaactttgataatattggcataatttagatttattttctttcttttttttgagacagtctcactcagtcgcccaggctgaagtgcagtgacacagtctcagctcactgcaacgtctgcctcccagattgaagtgactctcgtgcctctgccacagagtagctgggattacaggcatgcaccaccacacaccgctaattttttgtatttttagtagagacagagtttcaccatgttggccaggctgcgaactcctgagctcaagtgatcctcccacctcagcttcccaaagtgctagcattacaggcatgagccaccacacctcaccagatttttaaaaaatatataactgcatctctcttgattctggggcttggtaaaaatggatagataagatagtattctaaattcaaattcgtggctaggcacagtggcccacacctgtaatcccagcactttgggattccaagacagaagactcacttgagtacagtatgagaccagcctgggcaacatagatcttgcctctacaaaaaaaaaaaaaaatagccaggtgtggcacatgcctgtagtctcagctgcttggaaggctgaaatgagaggatctcttgagcccaggaggtctaggccagagtgagctgtgatcgtgccattgcactccagactgagtgacagagtgagactgtgtctaaaaaaaaagtttgaattaaaaaaaaaaaaaaaaaagtcggctgtgcacggtggctcatgcctgtgatcccagcactttcggaggccaaagtgggtggattacctgaggtcaggagtttgagaccagcctgaccaacatggtaaaactccatctctactaaaaatacaaaaattagcctggaatagtggcgcatgcctgtaatcccagctacttgtgaggctgaggcaggagaatcccttgaacccagaaggcagaggttgcagtgagctgagattgtgccattgcactccagcctgggcaacatgagcgaaactccatctcaaaaaaacaaaaacaaaaaacaaactcaaattagcatgatagatcaggctacttagattcagctttctgagatgttatttgttaacattaaggctaatttattataatgaaaatgtaaactttgaggtatgttaatatataaacatctttttcctttggcctaaaaggtctttagtattcagcacactgggtaaagttcagtttagacacaatcaaattggcatcttttaaacataagtgaaatatagagagcttgaacttgagttacttaaagaagatacagtataattaattatacagaacaaaacaaagatgtgtttagagtgactctggcctgactcttgtccatcagcccctagtagcctatcttcagcctttgggaagtcttaacttcccaggttaaactagaatattctggaactgagctgtccaaatttcatcttaaagtggatcatttgactctgaaacacgattctcatggcagaaaaagccctggtgtttccttggagctggggataaaggccagtgagccagcctgtgatgagagctgcccctggcactatctgagtggaaagctcattgggacagccatgcagctatcagagccgactgaagccctgtcccttacccctcaggcacctgatgcttaacttgcctcctgggaaataatgatctagcatttacttggaacaatgattaatcatgttctttaataattgctgacatttgtattttaagctgtataccaatgttcgtatttgacattgattttctaaccattagagatatttaattaaaacttggaaatgaaagaaa

SEQ ID NO: 172811 - DNA, 848 bp, Homo sapiens
  Payload ID: 13968
  Gene Symbol: PDP2
  Gene Name: pyruvate dehyrogenase phosphatase catalytic subunit 2
  ENST ID: ENST00000566776
  CDS Start-End: 122-848
cggacggagcgggcggctgtggcctcgccagctggtgagaagcgggcgagggtccgaggtagggaaggtttaaaaatatccttttttgctgaaggaacacatttgctggtatagtttcagaatgtcaagtactgtgtcctactggatcttaaattctacaaggaacagcattgccacattgcaagggggtagacgcttatactccaggtatgtctcaaataggaataaattaaaatggaggctcttttcccgggtgccacccaccctaaacagttccccatgtggtggctttactctgtgcaaagcctacagacacacatcaacagaggaagatgattttcacttgcaactcagccctgagcagataaatgaagtgcttcgagctggcgagacaacccacaagattcttgaccttgaaagcagagtcccaaattcagtgttgcggtttgagagcaaccagctggctgccaattccccagtggaggaccggcgaggtgtagcctcctgcctgcaaaccaatggactgatgtttggcatcttcgatggacatggtggtcatgcatgtgcccaagcagtgagcgagaggctcttctactatgtggcagtgtccctgatgtcccaccagaccctggagcacatggagggagctatggaaagcatgaaacccttgctgcccatcctgcattggctcaagcacccaggggacagtatctacaaggatgtcacatctgtgcatcttgaccacctccgtgtctattggcaggaactgcttgatttgcacatggaaatgggactaagcattgaagaagcattaatgtactccttccagagactggattctgacatct

SEQ ID NO: 172812 - DNA, 362 bp, Homo sapiens
  Payload ID: 13968
  Gene Symbol: PDP2
  Gene Name: pyruvate dehyrogenase phosphatase catalytic subunit 2
  ENST ID: ENST00000568398
  CDS Start-End: 281-362
ctgactagggaccgcctgggtgaggtgaggacctggtggccgcagttgtggcactgtgcgcaggcgctgaactgaccggacggagcgggcggctgtggcctcgccagctggtgagaagcgggcgagggtccgaggtagggaaggtaacgagcgggggatgtggacacctctttccccgccaggcctcgccggcgcctgaccctcccggcctgcggcaccggctcaggtttaaaaatatccttttttgctgaaggaacacatttgctggtatagtttcagaatgtcaagtactgtgtcctactggatcttaaattctacaaggaacagcattgccacattgcaagggggtagacgcttatact

SEQ ID NO: 172813 - DNA, 598 bp, Homo sapiens
  Payload ID: 13968
  Gene Symbol: PDP2
  Gene Name: pyruvate dehyrogenase phosphatase catalytic subunit 2
  ENST ID: ENST00000568869
  CDS Start-End: 134-598
cttctggagctgggtcctgactagggaccgcctgggtgaggtgaggacctggtggccgcagttgtggcactgtgcgcaggcgctgaactgaccggacggagcgggcggctgtggcctcgccagctgtttcagaatgtcaagtactgtgtcctactggatcttaaattctacaaggaacagcattgccacattgcaagggggtagacgcttatactccaggtatgtctcaaataggaataaattaaaatggaggctcttttcccgggtgccacccaccctaaacagttccccatgtggtggctttactctgtgcaaagcctacagacacacatcaacagaggaagatgattttcacttgcaactcagccctgagcagataaatgaagtgcttcgagctggcgagacaacccacaagattcttgaccttgaaagcagagtcccaaattcagtgttgcggtttgagagcaaccagctggctgccaattccccagtggaggaccggcgaggtgtagcctcctgcctgcaaaccaatggactgatgtttggcatcttcgatggacatggtggtcatgcatgtgcccaagcagtgagcgagagg

SEQ ID NO: 172814 - DNA, 560 bp, Homo sapiens
  Payload ID: 13968
  Gene Symbol: PDP2
  Gene Name: pyruvate dehyrogenase phosphatase catalytic subunit 2
  ENST ID: ENST00000566543
  CDS Start-End: 106-560
gttttattgtgaccacgtccttgggtccaggaggctggccaggctgcccaggtttaaaaatatccttttttgctgaaggaacacatttgctggtatagtttcagaatgtcaagtactgtgtcctactggatcttaaattctacaaggaacagcattgccacattgcaagggggtagacgcttatactccaggtatgtctcaaataggaataaattaaaatggaggctcttttcccgggtgccacccaccctaaacagttccccatgtggtggctttactctgtgcaaagcctacagacacacatcaacagaggaagatgattttcacttgcaactcagccctgagcagataaatgaagtgcttcgagctggcgagacaacccacaagattcttgaccttgaaagcagagtcccaaattcagtgttgcggtttgagagcaaccagctggctgccaattccccagtggaggaccggcgaggtgtagcctcctgcctgcaaaccaatggactgatgtttggcatcttcgatggacatggtggtcatgcatgtgcccaagcagt

SEQ ID NO: 172815 - DNA, 574 bp, Homo sapiens
  Payload ID: 13968
  Gene Symbol: PDP2
  Gene Name: pyruvate dehyrogenase phosphatase catalytic subunit 2
  ENST ID: ENST00000561704
  CDS Start-End: 265-574
tggagctgggtcctgactagggaccgcctgggtgaggtgaggacctggtggccgcagttgtggcactgtgcgcaggcgctgaactgaccggacggagcgggcggctgtggcctcgccagctgaaaccaggtctccttatgttgcccaggctggtcttggaactcctaggctcaagtgatcctcccgcctcagcctttggagtggttacaggtttaaaaatatccttttttgctgaaggaacacatttgctggtatagtttcagaatgtcaagtactgtgtcctactggatcttaaattctacaaggaacagcattgccacattgcaagggggtagacgcttatactccaggtatgtctcaaataggaataaattaaaatggaggctcttttcccgggtgccacccaccctaaacagttccccatgtggtggctttactctgtgcaaagcctacagacacacatcaacagaggaagatgattttcacttgcaactcagccctgagcagataaatgaagtgcttcgagctggcgagacaacccacaagattcttgaccttgaaagcagagtcccaa

SEQ ID NO: 172816 - DNA, 2083 bp, Homo sapiens
  Payload ID: 13969
  Gene Symbol: PKLR
  Gene Name: pyruvate kinase, liver and RBC
  Uniprot ID: P30613
  ENST ID: ENST00000342741
  CDS Start-End: 40-1764
cattccatggtcccgcagccccaggcccacactgaaagcatgtcgatccaggagaacatatcatccctgcagcttcggtcatgggtctctaagtcccaaagagacttagcaaagtccatcctgattggggctccaggagggccagcggggtatctgcggcgggccagtgtggcccaactgacccaggagctgggcactgccttcttccagcagcagcagctgccagctgctatggcagacaccttcctggaacacctctgcctactggacattgactccgagcccgtggctgctcgcagtaccagcatcattgccaccatcgggccagcatctcgctccgtggagcgcctcaaggagatgatcaaggccgggatgaacattgcgcgactcaacttctcccacggctcccacgagtaccatgctgagtccatcgccaacgtccgggaggcggtggagagctttgcaggttccccactcagctaccggcccgtggccatcgccctggacaccaagggaccggagatccgcactgggatcctgcaggggggtccagagtcggaagtggagctggtgaagggctcccaggtgctggtgactgtggaccccgcgttccggacgcgggggaacgcgaacaccgtgtgggtggactaccccaatattgtccgggtcgtgccggtggggggccgcatctacattgacgacgggctcatctccctagtggtccagaaaatcggcccagagggactggtgacccaagtggagaacggcggcgtcctgggcagccggaagggcgtgaacttgccaggggcccaggtggacttgcccgggctgtccgagcaggacgtccgagacctgcgcttcggggtggagcatggggtggacatcgtctttgcctcctttgtgcggaaagccagcgacgtggctgccgtcagggctgctctgggtccggaaggacacggcatcaagatcatcagcaaaattgagaaccacgaaggcgtgaagaggtttgatgaaatcctggaggtgagcgacggcatcatggtggcacggggggacctaggcatcgagatcccagcagagaaggttttcctggctcagaagatgatgattgggcgctgcaacttggcgggcaagcctgttgtctgtgccacacagatgctggagagcatgattaccaagccccggccaacgagggcagagacaagcgatgtcgccaatgctgtgctggatggggctgactgcatcatgctgtcaggggagactgccaagggcaacttccctgtggaagcggtgaagatgcagcatgcgattgcccgggaggcagaggccgcagtgtaccaccggcagctgtttgaggagctacgtcgggcagcgccactaagccgtgatcccactgaggtcaccgccattggtgctgtggaggctgccttcaagtgctgtgctgctgccatcattgtgctgaccacaactggccgctcagcccagcttctgtctcggtaccgacctcgggcagcagtcattgctgtcacccgctctgcccaggctgcccgccaggtccacttatgccgaggagtcttccccttgctttaccgtgaacctccagaagccatctgggcagatgatgtagatcgccgggtgcaatttggcattgaaagtggaaagctccgtggcttcctccgtgttggagacctggtgattgtggtgacaggctggcgacctggctccggctacaccaacatcatgcgggtgctaagcatatcctgagacgcccctccctcctctggcccagcctacccttgtaccccatcccttcctccccagtctacgttctccagcccacacccctccaaagccccacctttaagtcctctcttctctattcctgaccctccctacctgaggcctatctgagactataactgtcatctagccccttcgaggttgccccttccccatctccatttcacacaggtcctgaaagtctgtgtccaattatgcactggccacccaacagcaccaattgtacattccctgcatccaatctgctcagcaggccctaagatgccttgagtctttaatccca

SEQ ID NO: 172817 - DNA, 2479 bp, Homo sapiens
  Payload ID: 13969
  Gene Symbol: PKLR
  Gene Name: pyruvate kinase, liver and RBC
  Uniprot ID: P30613
  ENST ID: ENST00000392414
  CDS Start-End: 115-1746
actttaaccagtctgcagaactgatccccagcccagctgggcctcatgcctctgacaacccaacagtgtggagcagacccacagagagggagacccagagaggtgtgcagtggcatggaagggccagcggggtatctgcggcgggccagtgtggcccaactgacccaggagctgggcactgccttcttccagcagcagcagctgccagctgctatggcagacaccttcctggaacacctctgcctactggacattgactccgagcccgtggctgctcgcagtaccagcatcattgccaccatcgggccagcatctcgctccgtggagcgcctcaaggagatgatcaaggccgggatgaacattgcgcgactcaacttctcccacggctcccacgagtaccatgctgagtccatcgccaacgtccgggaggcggtggagagctttgcaggttccccactcagctaccggcccgtggccatcgccctggacaccaagggaccggagatccgcactgggatcctgcaggggggtccagagtcggaagtggagctggtgaagggctcccaggtgctggtgactgtggaccccgcgttccggacgcgggggaacgcgaacaccgtgtgggtggactaccccaatattgtccgggtcgtgccggtggggggccgcatctacattgacgacgggctcatctccctagtggtccagaaaatcggcccagagggactggtgacccaagtggagaacggcggcgtcctgggcagccggaagggcgtgaacttgccaggggcccaggtggacttgcccgggctgtccgagcaggacgtccgagacctgcgcttcggggtggagcatggggtggacatcgtctttgcctcctttgtgcggaaagccagcgacgtggctgccgtcagggctgctctgggtccggaaggacacggcatcaagatcatcagcaaaattgagaaccacgaaggcgtgaagaggtttgatgaaatcctggaggtgagcgacggcatcatggtggcacggggggacctaggcatcgagatcccagcagagaaggttttcctggctcagaagatgatgattgggcgctgcaacttggcgggcaagcctgttgtctgtgccacacagatgctggagagcatgattaccaagccccggccaacgagggcagagacaagcgatgtcgccaatgctgtgctggatggggctgactgcatcatgctgtcaggggagactgccaagggcaacttccctgtggaagcggtgaagatgcagcatgcgattgcccgggaggcagaggccgcagtgtaccaccggcagctgtttgaggagctacgtcgggcagcgccactaagccgtgatcccactgaggtcaccgccattggtgctgtggaggctgccttcaagtgctgtgctgctgccatcattgtgctgaccacaactggccgctcagcccagcttctgtctcggtaccgacctcgggcagcagtcattgctgtcacccgctctgcccaggctgcccgccaggtccacttatgccgaggagtcttccccttgctttaccgtgaacctccagaagccatctgggcagatgatgtagatcgccgggtgcaatttggcattgaaagtggaaagctccgtggcttcctccgtgttggagacctggtgattgtggtgacaggctggcgacctggctccggctacaccaacatcatgcgggtgctaagcatatcctgagacgcccctccctcctctggcccagcctacccttgtaccccatcccttcctccccagtctacgttctccagcccacacccctccaaagccccacctttaagtcctctcttctctattcctgaccctccctacctgaggcctatctgagactataactgtcatctagccccttcgaggttgccccttccccatctccatttcacacaggtcctgaaagtctgtgtccaattatgcactggccacccaacagcaccaattgtacattccctgcatccaatctgctcagcaggccctaagatgccttgagtctttaatcccagtttggctggttaattccataaccccaggcatcccatcccttggggtgggggagaggggagacagggcaatcttgtccacagtctcccattctcatatgtagccctcatgataatctgggcatctcgtgccagggcaggctaccccttcatggtgactaacagttacatgaaagtccacgcttttgggaaaactgggtgggatggatgctggggagaagtgagggctgggcagctgattttgtcactgtcttcacaacctccgtgctgggcttgtagaccactgtcctggctgctctcatgcctgcctgataccctgcttggtcaaatccccggctgcttccttctgcacccagaaattccttcccactcatgttgttcccacacacaaaccaagagccaaaaatgagtgtgtc

SEQ ID NO: 172818 - DNA, 580 bp, Homo sapiens
  Payload ID: 13969
  Gene Symbol: PKLR
  Gene Name: pyruvate kinase, liver and RBC
  ENST ID: ENST00000434082
  CDS Start-End: 1-141
atgcctctgacaacccaacagtgtggagcagacccacagagagggagacccagagaggtgtgcagtggcatggaagcagcagcagctgccagctgctatggcagacaccttcctggaacacctctgcctactggacattgactccgagcccgtggctgctcgcagtaccagcatcattgccaccatcgggccagcatctcgctccgtggagcgcctcaaggagatgatcaaggccgggatgaacattgcgcgactcaacttctcccacggctcccacgagtaccatgctgagtccatcgccaacgtccgggaggcggtggagagctttgcaggttccccactcagctaccggcccgtggccatcgccctggacaccaagggaccggagatccgcactgggatcctgcaggggggtccagagtcggaagtggagctggtgaagggctcccaggtgctggtgactgtggaccccgcgttccggacgcgggggaacgcgaacaccgtgtgggtggactaccccaatattgtccgggtcgtgccggtggggggccgcatctacattgacgacgggctcatctcc

SEQ ID NO: 172819 - DNA, 580 bp, Homo sapiens; identical to SEQ ID NO: 172818
  Payload ID: 13969
  Gene Symbol: PKLR
  Gene Name: pyruvate kinase, liver and RBC
  ENST ID: ENST00000573938
  CDS Start-End: 1-141

SEQ ID NO: 172820 - DNA, 2083 bp, Homo sapiens; identical to SEQ ID NO: 172816
  Payload ID: 13969
  Gene Symbol: PKLR
  Gene Name: pyruvate kinase, liver and RBC
  Uniprot ID: P30613
  ENST ID: ENST00000572740
  CDS Start-End: 40-1764

SEQ ID NO: 172821 - DNA, 2479 bp, Homo sapiens; identical to SEQ ID NO: 172817
  Payload ID: 13969
  Gene Symbol: PKLR
  Gene Name: pyruvate kinase, liver and RBC
  Uniprot ID: P30613
  ENST ID: ENST00000571194
  CDS Start-End: 115-1746

SEQ ID NO: 172822 - DNA, 2717 bp, Homo sapiens
  Payload ID: 13970
  Gene Symbol: PKM
  Gene Name: pyruvate kinase, muscle
  Uniprot ID: P14618
  ENST ID: ENST00000319622
  CDS Start-End: 501-2096
agtcccaccgaaagggcaacctgcccgcgcgttccgccgccgccgccgcgcttcctcctgaaggtgactgcgcccgcggggacgcagggggcggggcccgggtcgcccggagccgggattgggcagagggcggggcggcggagggattgcggcggcccgcagcgggataaccttgaggctgaggcagtggctccttgcacagcagctgcacgcgccgtggctccggatctcttcgtctttgcagcgtagcccgagtcggtcagcgccggaggtgagcggtgcaggaggctacgccatcagtccccaccaagggccagtcgcccggctagtgcggaatcccggcgcgccggccggccccgggcacgcaggcagggcggcgcaggatccagggcgtctgggatgcagtggagctcagagagaggagaacggctcctcacgcctggggcctgctcttcagaagtccccagcgccgttccttccagatcaggacctcagcagccatgtcgaagccccatagtgaagccgggactgccttcattcagacccagcagctgcacgcagccatggctgacacattcctggagcacatgtgccgcctggacattgattcaccacccatcacagcccggaacactggcatcatctgtaccattggcccagcttcccgatcagtggagacgttgaaggagatgattaagtctggaatgaatgtggctcgtctgaacttctctcatggaactcatgagtaccatgcggagaccatcaagaatgtgcgcacagccacggaaagctttgcttctgaccccatcctctaccggcccgttgctgtggctctagacactaaaggacctgagatccgaactgggctcatcaagggcagcggcactgcagaggtggagctgaagaagggagccactctcaaaatcacgctggataacgcctacatggaaaagtgtgacgagaacatcctgtggctggactacaagaacatctgcaaggtggtggaagtgggcagcaagatctacgtggatgatgggcttatttctctccaggtgaagcagaaaggtgccgacttcctggtgacggaggtggaaaatggtggctccttgggcagcaagaagggtgtgaaccttcctggggctgctgtggacttgcctgctgtgtcggagaaggacatccaggatctgaagtttggggtcgagcaggatgttgatatggtgtttgcgtcattcatccgcaaggcatctgatgtccatgaagttaggaaggtcctgggagagaagggaaagaacatcaagattatcagcaaaatcgagaatcatgagggggttcggaggtttgatgaaatcctggaggccagtgatgggatcatggtggctcgtggtgatctaggcattgagattcctgcagagaaggtcttccttgctcagaagatgatgattggacggtgcaaccgagctgggaagcctgtcatctgtgctactcagatgctggagagcatgatcaagaagccccgccccactcgggctgaaggcagtgatgtggccaatgcagtcctggatggagccgactgcatcatgctgtctggagaaacagccaaaggggactatcctctggaggctgtgcgcatgcagcacctgatagctcgtgaggctgaggcagccatgttccaccgcaagctgtttgaagaacttgtgcgagcctcaagtcactccacagacctcatggaagccatggccatgggcagcgtggaggcttcttataagtgtttagcagcagctttgatagttctgacggagtctggcaggtctgctcaccaggtggccagataccgcccacgtgcccccatcattgctgtgacccggaatccccagacagctcgtcaggcccacctgtaccgtggcatcttccctgtgctgtgcaaggacccagtccaggaggcctgggctgaggacgtggacctccgggtgaactttgccatgaatgttggcaaggcccgaggcttcttcaagaagggagatgtggtcattgtgctgaccggatggcgccctggctccggcttcaccaacaccatgcgtgttgttcctgtgccgtgatggaccccagagcccctcctccagcccctgtcccacccccttcccccagcccatccattaggccagcaacgcttgtagaactcactctgggctgtaacgtggcactggtaggttgggacaccagggaagaagatcaacgcctcactgaaacatggctgtgtttgcagcctgctctagtgggacagcccagagcctggctgcccatcatgtggccccacccaatcaagggaagaaggaggaatgctggactggaggcccctggagccagatggcaagagggtgacagcttcctttcctgtgtgtactctgtccagttcctttagaaaaaatggatgcccagaggactcccaaccctggcttggggtcaagaaacagccagcaagagttaggggccttagggcactgggctgttgttccattgaagccgactctggccctggcccttacttgcttctctagctctctaggcctctccagtttgcacctgtccccaccctccactcagctgtcctgcagcaaacactccaccctccaccttccattttcccccactactgcagcacctccaggcctgttgctatagagcctacctgtatgtcaataaacaacagctgaagcacc

SEQ ID NO: 172823 - DNA, 2318 bp, Homo sapiens
  Payload ID: 13970
  Gene Symbol: PKM
  Gene Name: pyruvate kinase, muscle
  Uniprot ID: P14618
  ENST ID: ENST00000335181
  CDS Start-End: 105-1700
gaggcagtggctccttgcacagcagctgcacgcgccgtggctccggatctcttcgtctttgcagcgtagcccgagtcggtcagcgccggaggacctcagcagccatgtcgaagccccatagtgaagccgggactgccttcattcagacccagcagctgcacgcagccatggctgacacattcctggagcacatgtgccgcctggacattgattcaccacccatcacagcccggaacactggcatcatctgtaccattggcccagcttcccgatcagtggagacgttgaaggagatgattaagtctggaatgaatgtggctcgtctgaacttctctcatggaactcatgagtaccatgcggagaccatcaagaatgtgcgcacagccacggaaagctttgcttctgaccccatcctctaccggcccgttgctgtggctctagacactaaaggacctgagatccgaactgggctcatcaagggcagcggcactgcagaggtggagctgaagaagggagccactctcaaaatcacgctggataacgcctacatggaaaagtgtgacgagaacatcctgtggctggactacaagaacatctgcaaggtggtggaagtgggcagcaagatctacgtggatgatgggcttatttctctccaggtgaagcagaaaggtgccgacttcctggtgacggaggtggaaaatggtggctccttgggcagcaagaagggtgtgaaccttcctggggctgctgtggacttgcctgctgtgtcggagaaggacatccaggatctgaagtttggggtcgagcaggatgttgatatggtgtttgcgtcattcatccgcaaggcatctgatgtccatgaagttaggaaggtcctgggagagaagggaaagaacatcaagattatcagcaaaatcgagaatcatgagggggttcggaggtttgatgaaatcctggaggccagtgatgggatcatggtggctcgtggtgatctaggcattgagattcctgcagagaaggtcttccttgctcagaagatgatgattggacggtgcaaccgagctgggaagcctgtcatctgtgctactcagatgctggagagcatgatcaagaagccccgccccactcgggctgaaggcagtgatgtggccaatgcagtcctggatggagccgactgcatcatgctgtctggagaaacagccaaaggggactatcctctggaggctgtgcgcatgcagcacctgattgcccgtgaggcagaggctgccatctaccacttgcaattatttgaggaactccgccgcctggcgcccattaccagcgaccccacagaagccaccgccgtgggtgccgtggaggcctccttcaagtgctgcagtggggccataatcgtcctcaccaagtctggcaggtctgctcaccaggtggccagataccgcccacgtgcccccatcattgctgtgacccggaatccccagacagctcgtcaggcccacctgtaccgtggcatcttccctgtgctgtgcaaggacccagtccaggaggcctgggctgaggacgtggacctccgggtgaactttgccatgaatgttggcaaggcccgaggcttcttcaagaagggagatgtggtcattgtgctgaccggatggcgccctggctccggcttcaccaacaccatgcgtgttgttcctgtgccgtgatggaccccagagcccctcctccagcccctgtcccacccccttcccccagcccatccattaggccagcaacgcttgtagaactcactctgggctgtaacgtggcactggtaggttgggacaccagggaagaagatcaacgcctcactgaaacatggctgtgtttgcagcctgctctagtgggacagcccagagcctggctgcccatcatgtggccccacccaatcaagggaagaaggaggaatgctggactggaggcccctggagccagatggcaagagggtgacagcttcctttcctgtgtgtactctgtccagttcctttagaaaaaatggatgcccagaggactcccaaccctggcttggggtcaagaaacagccagcaagagttaggggccttagggcactgggctgttgttccattgaagccgactctggccctggcccttacttgcttctctagctctctaggcctctccagtttgcacctgtccccaccctccactcagctgtcctgcagcaaacactccaccctccaccttccattttcccccactactgcagcacctccaggcctgttgctatagagcctacctgtatgtcaataaacaacagctgaagc

SEQ ID NO: 172824 - DNA, 2279 bp, Homo sapiens
  Payload ID: 13970
  Gene Symbol: PKM
  Gene Name: pyruvate kinase, muscle
  ENST ID: ENST00000389093
  CDS Start-End: 285-1658
agtcccaccgaaagggcaacctgcccgcgcgttccgccgccgccgccgcgcttcctcctgaaggtgactgcgcccgcggggacgcagggggcggggcccgggtcgcccggagccgggattgggcagagggcggggcggcggagggattgcggcggcccgcagcgggataaccttgaggctgaggcagtggctccttgcacagcagctgcacgcgccgtggctccggatctcttcgtctttgcagcgtagcccgagtcggtcagcgccggaggacctcagcagccatgtcgaagccccatagtgaagccgggactgccttcattcagacccagcagctgcacgcagccatggctgacacattcctggagcacatgtgccgcctggacattgattcaccacccatcacagcccggaacactggcatcatctgtaccattggcccagcttcccgatcagtggagctgaagaagggagccactctcaaaatcacgctggataacgcctacatggaaaagtgtgacgagaacatcctgtggctggactacaagaacatctgcaaggtggtggaagtgggcagcaagatctacgtggatgatgggcttatttctctccaggtgaagcagaaaggtgccgacttcctggtgacggaggtggaaaatggtggctccttgggcagcaagaagggtgtgaaccttcctggggctgctgtggacttgcctgctgtgtcggagaaggacatccaggatctgaagtttggggtcgagcaggatgttgatatggtgtttgcgtcattcatccgcaaggcatctgatgtccatgaagttaggaaggtcctgggagagaagggaaagaacatcaagattatcagcaaaatcgagaatcatgagggggttcggaggtttgatgaaatcctggaggccagtgatgggatcatggtggctcgtggtgatctaggcattgagattcctgcagagaaggtcttccttgctcagaagatgatgattggacggtgcaaccgagctgggaagcctgtcatctgtgctactcagatgctggagagcatgatcaagaagccccgccccactcgggctgaaggcagtgatgtggccaatgcagtcctggatggagccgactgcatcatgctgtctggagaaacagccaaaggggactatcctctggaggctgtgcgcatgcagcacctgattgcccgtgaggcagaggctgccatctaccacttgcaattatttgaggaactccgccgcctggcgcccattaccagcgaccccacagaagccaccgccgtgggtgccgtggaggcctccttcaagtgctgcagtggggccataatcgtcctcaccaagtctggcaggtctgctcaccaggtggccagataccgcccacgtgcccccatcattgctgtgacccggaatccccagacagctcgtcaggcccacctgtaccgtggcatcttccctgtgctgtgcaaggacccagtccaggaggcctgggctgaggacgtggacctccgggtgaactttgccatgaatgttggcaaggcccgaggcttcttcaagaagggagatgtggtcattgtgctgaccggatggcgccctggctccggcttcaccaacaccatgcgtgttgttcctgtgccgtgatggaccccagagcccctcctccagcccctgtcccacccccttcccccagcccatccattaggccagcaacgcttgtagaactcactctgggctgtaacgtggcactggtaggttgggacaccagggaagaagatcaacgcctcactgaaacatggctgtgtttgcagcctgctctagtgggacagcccagagcctggctgcccatcatgtggccccacccaatcaagggaagaaggaggaatgctggactggaggcccctggagccagatggcaagagggtgacagcttcctttcctgtgtgtactctgtccagttcctttagaaaaaatggatgcccagaggactcccaaccctggcttggggtcaagaaacagccagcaagagttaggggccttagggcactgggctgttgttccattgaagccgactctggccctggcccttacttgcttctctagctctctaggcctctccagtttgcacctgtccccaccctccactcagctgtcctgcagcaaacactccaccctccaccttccattttcccccactactgcagcacctccaggcctgttgctatagagcctacctgtatgtcaataaacaacagctgaagcacc

SEQ ID NO: 172825 - DNA, 2526 bp, Homo sapiens
  Payload ID: 13970
  Gene Symbol: PKM
  Gene Name: pyruvate kinase, muscle
  Uniprot ID: P14618
  ENST ID: ENST00000449901
  CDS Start-End: 355-1905
agtcccaccgaaagggcaacctgcccgcgcgttccgccgccgccgccgcgcttcctcctgaaggtgactgcgcccgcggggacgcagggggcggggcccgggtcgcccggagccgggattgggcagagggcggggcggcggagggattgcggcggcccgcagcgggataaccttgaggctgaggcagtggctccttgcacagcagctgcacgcgccgtggctccggatctcttcgtctttgcagcgtagcccgagtcggtcagcgccggagctctccagggcacaccgtattcagctctgagcggtctttgctagtgaggccaaggagccaccctgagccaaaaggggagcattatgtcaccggaagcccaaccccagagaaccaaaggacctcagcagccatgtcgaagccccatagtgaagccgggactgccttcattcagacccagcagctgcacgcagccatggctgacacattcctggagcacatgtgccgcctggacattgattcaccacccatcacagcccggaacactggcatcatctgtaccattgtaccatgcggagaccatcaagaatgtgcgcacagccacggaaagctttgcttctgaccccatcctctaccggcccgttgctgtggctctagacactaaaggacctgagatccgaactgggctcatcaagggcagcggcactgcagaggtggagctgaagaagggagccactctcaaaatcacgctggataacgcctacatggaaaagtgtgacgagaacatcctgtggctggactacaagaacatctgcaaggtggtggaagtgggcagcaagatctacgtggatgatgggcttatttctctccaggtgaagcagaaaggtgccgacttcctggtgacggaggtggaaaatggtggctccttgggcagcaagaagggtgtgaaccttcctggggctgctgtggacttgcctgctgtgtcggagaaggacatccaggatctgaagtttggggtcgagcaggatgttgatatggtgtttgcgtcattcatccgcaaggcatctgatgtccatgaagttaggaaggtcctgggagagaagggaaagaacatcaagattatcagcaaaatcgagaatcatgagggggttcggaggtttgatgaaatcctggaggccagtgatgggatcatggtggctcgtggtgatctaggcattgagattcctgcagagaaggtcttccttgctcagaagatgatgattggacggtgcaaccgagctgggaagcctgtcatctgtgctactcagatgctggagagcatgatcaagaagccccgccccactcgggctgaaggcagtgatgtggccaatgcagtcctggatggagccgactgcatcatgctgtctggagaaacagccaaaggggactatcctctggaggctgtgcgcatgcagcacctgattgcccgtgaggcagaggctgccatctaccacttgcaattatttgaggaactccgccgcctggcgcccattaccagcgaccccacagaagccaccgccgtgggtgccgtggaggcctccttcaagtgctgcagtggggccataatcgtcctcaccaagtctggcaggtctgctcaccaggtggccagataccgcccacgtgcccccatcattgctgtgacccggaatccccagacagctcgtcaggcccacctgtaccgtggcatcttccctgtgctgtgcaaggacccagtccaggaggcctgggctgaggacgtggacctccgggtgaactttgccatgaatgttggcaaggcccgaggcttcttcaagaagggagatgtggtcattgtgctgaccggatggcgccctggctccggcttcaccaacaccatgcgtgttgttcctgtgccgtgatggaccccagagcccctcctccagcccctgtcccacccccttcccccagcccatccattaggccagcaacgcttgtagaactcactctgggctgtaacgtggcactggtaggttgggacaccagggaagaagatcaacgcctcactgaaacatggctgtgtttgcagcctgctctagtgggacagcccagagcctggctgcccatcatgtggccccacccaatcaagggaagaaggaggaatgctggactggaggcccctggagccagatggcaagagggtgacagcttcctttcctgtgtgtactctgtccagttcctttagaaaaaatggatgcccagaggactcccaaccctggcttggggtcaagaaacagccagcaagagttaggggccttagggcactgggctgttgttccattgaagccgactctggccctggcccttacttgcttctctagctctctaggcctctccagtttgcacctgtccccaccctccactcagctgtcctgcagcaaacactccaccctccaccttccattttcccccactactgcagcacctccaggcctgttgctatagagcctacctgtatgtcaataaacaacagctgaagcacc

SEQ ID NO: 172826 - DNA, 457 bp, Homo sapiens
  Payload ID: 13970
  Gene Symbol: PKM
  Gene Name: pyruvate kinase, muscle
  ENST ID: ENST00000569050
  CDS Start-End: 303-457
cacttcgcagtccctagttctccctactgccgctccagtgccagagcccctccgaaggcggccaggacctccaaccacgcacaagtctgcagctctccccaactttccgttcagctcagtctccgagggtgcgccagagcagacacccggaggagtggggagtggcagggcggggccgggagaatgctgccccggaacccataaatctgggccctgcccagaatttagtcccaccgaaagggcaacctgcccgcgcgttccgccgccgccgccgcgcttcctcctgaaggacctcagcagccatgtcgaagccccatagtgaagccgggactgccttcattcagacccagcagctgcacgcagccatggctgacacattcctggagcacatgtgccgcctggacattgattcaccacccatcacagcccggaacactggcatcatctgtaccattgg

SEQ ID NO: 172827 - DNA, 1355 bp, Homo sapiens
  Payload ID: 13970
  Gene Symbol: PKM
  Gene Name: pyruvate kinase, muscle
  ENST ID: ENST00000569857
  CDS Start-End: 124-969
gcgggataaccttgaggctgaggcagtggctccttgcacagcagctgcacgcgccgtggctccggatctcttcgtctttgcagcgtagcccgagtcggtcagcgccggaggacctcagcagccatgtcgaagccccatagtgaagccgggactgccttcattcagacccagcagctgcacgcagccatggctgacacattcctggagcacatgtgccgcctggacattgattcaccacccatcacagcccggaacactggcatcatctgtaccattggcccagcttcccgatcagtggagacgttgaaggagatgattaagtctggaatgaatgtggctcgtctgaacttctctcatggaactcatgagtaccatgcggagaccatcaagaatgtgcgcacagccacggaaagctttgcttctgaccccatcctctaccggcccgttgctgtggctctagacactaaaggacctgagatccgaactgggctcatcaagggcagcggcactgcagaggtggagctgaagaagggagccactctcaaaatcacgctggataacgcctacatggaaaagtgtgacgagaacatcctgtggctggactacaagaacatctgcaaggtggtggaagtgggcagcaagatctacgtggatgatgggcttatttctctccaggtgaagcagaaaggtgccgacttcctggtgacggaggtggaaaatggtggctccttgggcagcaagaagggtgtgaaccttcctggggctgctgtggacttgcctgctgtgtcggagaaggacatccaggatctgaagtttggggtcgagcaggatgttgatatggtgtttgcgtcattcatccgcaaggcatctgatgtccatgaagttaggaaggtcctgggagagaagggaaagaacatcaagattatcagcaaaatcgagaatcatgagggggttcggaggcaagtttgatgaaatcctggaggccagtgatgggatcatggtggctcgtggtgatctaggcattgagattcctgcagagaaggtcttccttgctcagaagatgatgattggacggtgcaaccgagctgggaagcctgtcatctgtgctactcagatgctggagagcatgatcaagaagccccgccccactcgggctgaaggcagtgatgtggccaatgcagtcctggatggagccgactgcatcatgctgtctggagaaacagccaaaggggactatcctctggaggctgtgcgcatgcagcacctgattgcccgtgaggcagaggctgccatctaccacttgcaattatttgaggaactccgccgcctggcgcccattaccagcgaccccacag

SEQ ID NO: 172828 - DNA, 2503 bp, Homo sapiens
  Payload ID: 13970
  Gene Symbol: PKM
  Gene Name: pyruvate kinase, muscle
  Uniprot ID: P14618
  ENST ID: ENST00000565184
  CDS Start-End: 290-1885
cgtggctccggatctcttcgtctttgcagcgtagcccgagtcggtcagcgccggaggtgagcggtgcaggaggctacgccatcagtccccaccaagggccagtcgcccggctagtgcggaatcccggcgcgccggccggccccgggcacgcaggcagggcggcgcaggatccagggcgtctgggatgcagtggagctcagagagaggagaacggctcctcacgcctggggcctgctcttcagaagtccccagcgccgttccttccagatcaggcgggacctcagcagccatgtcgaagccccatagtgaagccgggactgccttcattcagacccagcagctgcacgcagccatggctgacacattcctggagcacatgtgccgcctggacattgattcaccacccatcacagcccggaacactggcatcatctgtaccattggcccagcttcccgatcagtggagacgttgaaggagatgattaagtctggaatgaatgtggctcgtctgaacttctctcatggaactcatgagtaccatgcggagaccatcaagaatgtgcgcacagccacggaaagctttgcttctgaccccatcctctaccggcccgttgctgtggctctagacactaaaggacctgagatccgaactgggctcatcaagggcagcggcactgcagaggtggagctgaagaagggagccactctcaaaatcacgctggataacgcctacatggaaaagtgtgacgagaacatcctgtggctggactacaagaacatctgcaaggtggtggaagtgggcagcaagatctacgtggatgatgggcttatttctctccaggtgaagcagaaaggtgccgacttcctggtgacggaggtggaaaatggtggctccttgggcagcaagaagggtgtgaaccttcctggggctgctgtggacttgcctgctgtgtcggagaaggacatccaggatctgaagtttggggtcgagcaggatgttgatatggtgtttgcgtcattcatccgcaaggcatctgatgtccatgaagttaggaaggtcctgggagagaagggaaagaacatcaagattatcagcaaaatcgagaatcatgagggggttcggaggtttgatgaaatcctggaggccagtgatgggatcatggtggctcgtggtgatctaggcattgagattcctgcagagaaggtcttccttgctcagaagatgatgattggacggtgcaaccgagctgggaagcctgtcatctgtgctactcagatgctggagagcatgatcaagaagccccgccccactcgggctgaaggcagtgatgtggccaatgcagtcctggatggagccgactgcatcatgctgtctggagaaacagccaaaggggactatcctctggaggctgtgcgcatgcagcacctgatagctcgtgaggctgaggcagccatgttccaccgcaagctgtttgaagaacttgtgcgagcctcaagtcactccacagacctcatggaagccatggccatgggcagcgtggaggcttcttataagtgtttagcagcagctttgatagttctgacggagtctggcaggtctgctcaccaggtggccagataccgcccacgtgcccccatcattgctgtgacccggaatccccagacagctcgtcaggcccacctgtaccgtggcatcttccctgtgctgtgcaaggacccagtccaggaggcctgggctgaggacgtggacctccgggtgaactttgccatgaatgttggcaaggcccgaggcttcttcaagaagggagatgtggtcattgtgctgaccggatggcgccctggctccggcttcaccaacaccatgcgtgttgttcctgtgccgtgatggaccccagagcccctcctccagcccctgtcccacccccttcccccagcccatccattaggccagcaacgcttgtagaactcactctgggctgtaacgtggcactggtaggttgggacaccagggaagaagatcaacgcctcactgaaacatggctgtgtttgcagcctgctctagtgggacagcccagagcctggctgcccatcatgtggccccacccaatcaagggaagaaggaggaatgctggactggaggcccctggagccagatggcaagagggtgacagcttcctttcctgtgtgtactctgtccagttcctttagaaaaaatggatgcccagaggactcccaaccctggcttggggtcaagaaacagccagcaagagttaggggccttagggcactgggctgttgttccattgaagccgactctggccctggcccttacttgcttctctagctctctaggcctctccagtttgcacctgtccccaccctccactcagctgtcctgcagcaaacactccaccctccaccttccattttcccccactactgcagcacctccaggcctgttgctatagagcctacctgtatgtcaataaacaacagctgaagc

SEQ ID NO: 172829 - DNA, 2004 bp, Homo sapiens
  Payload ID: 13970
  Gene Symbol: PKM
  Gene Name: pyruvate kinase, muscle
  Uniprot ID: P14618
  ENST ID: ENST00000565154
  CDS Start-End: 349-1944
gagcggtgcaggaggctacgccatcagtccccaccaagggccagtcgcccggctagtgcggaatcccggcgcgccggccggccccgggcacgcaggcagggcggcgcaggatccagggcgtctgggatgcagtggagctcagagagaggagaacggctcctcacgcctggggcctgctcttcagaagtccccagcgccgttccttccagatcaggcggctctccagggcacaccgtattcagctctgagcggtctttgctagtgaggccaaggagccaccctgagccaaaaggggagcattatgtcaccggaagcccaaccccagagaaccaaaggacctcagcagccatgtcgaagccccatagtgaagccgggactgccttcattcagacccagcagctgcacgcagccatggctgacacattcctggagcacatgtgccgcctggacattgattcaccacccatcacagcccggaacactggcatcatctgtaccattggcccagcttcccgatcagtggagacgttgaaggagatgattaagtctggaatgaatgtggctcgtctgaacttctctcatggaactcatgagtaccatgcggagaccatcaagaatgtgcgcacagccacggaaagctttgcttctgaccccatcctctaccggcccgttgctgtggctctagacactaaaggacctgagatccgaactgggctcatcaagggcagcggcactgcagaggtggagctgaagaagggagccactctcaaaatcacgctggataacgcctacatggaaaagtgtgacgagaacatcctgtggctggactacaagaacatctgcaaggtggtggaagtgggcagcaagatctacgtggatgatgggcttatttctctccaggtgaagcagaaaggtgccgacttcctggtgacggaggtggaaaatggtggctccttgggcagcaagaagggtgtgaaccttcctggggctgctgtggacttgcctgctgtgtcggagaaggacatccaggatctgaagtttggggtcgagcaggatgttgatatggtgtttgcgtcattcatccgcaaggcatctgatgtccatgaagttaggaaggtcctgggagagaagggaaagaacatcaagattatcagcaaaatcgagaatcatgagggggttcggaggtttgatgaaatcctggaggccagtgatgggatcatggtggctcgtggtgatctaggcattgagattcctgcagagaaggtcttccttgctcagaagatgatgattggacggtgcaaccgagctgggaagcctgtcatctgtgctactcagatgctggagagcatgatcaagaagccccgccccactcgggctgaaggcagtgatgtggccaatgcagtcctggatggagccgactgcatcatgctgtctggagaaacagccaaaggggactatcctctggaggctgtgcgcatgcagcacctgatagctcgtgaggctgaggcagccatgttccaccgcaagctgtttgaagaacttgtgcgagcctcaagtcactccacagacctcatggaagccatggccatgggcagcgtggaggcttcttataagtgtttagcagcagctttgatagttctgacggagtctggcaggtctgctcaccaggtggccagataccgcccacgtgcccccatcattgctgtgacccggaatccccagacagctcgtcaggcccacctgtaccgtggcatcttccctgtgctgtgcaaggacccagtccaggaggcctgggctgaggacgtggacctccgggtgaactttgccatgaatgttggcaaggcccgaggcttcttcaagaagggagatgtggtcattgtgctgaccggatggcgccctggctccggcttcaccaacaccatgcgtgttgttcctgtgccgtgatggaccccagagcccctcctccagcccctgtcccacccccttcccccagcccatccatta

SEQ ID NO: 172830 - DNA, 2254 bp, Homo sapiens
  Payload ID: 13970
  Gene Symbol: PKM
  Gene Name: pyruvate kinase, muscle
  ENST ID: ENST00000567118
  CDS Start-End: 206-415
gcacagcagctgcacgcgccgtggctccggatctcttcgtctttgcagcgtagcccgagtcggtcagcgccggagctctccagggcacaccgtattcagctctgagcggtctttgctagtgaggccaaggagccaccctgagccaaaaggggagcattatgtcaccggaagcccaaccccagagaaccaaaggacctcagcagccatgtcgaagccccatagtgaagccgggactgccttcattcagacccagcagctgcacgcagccatggctgacacattcctggagcacatgtgccgcctggacattgattcaccacccatcacagcccggaacactggcatcatctgtaccattgtaccatgcggagaccatcaagaatgtgcgcacagccacggaaagctttgcttctgaccccatcctctaccggcccgttgctgtggctctagacactaaaggacctgagatccgaactgggctcatcaagggcagcggcactgcagaggtggagctgaagaagggagccactctcaaaatcacgctggataacgcctacatggaaaagtgtgacgagaacatcctgtggctggactacaagaacatctgcaaggtggtggaagtgggcagcaagatctacgtggatgatgggcttatttctctccaggtgaagcagaaaggtgccgacttcctggtgacggaggtggaaaatggtggctccttgggcagcaagaagggtgtgaaccttcctggggctgctgtggacttgcctgctgtgtcggagaaggacatccaggatctgaagtttggggtcgagcaggatgttgatatggtgtttgcgtcattcatccgcaaggcatctgatgtccatgaagttaggaaggtcctgggagagaagggaaagaacatcaagattatcagcaaaatcgagaatcatgagggggttcggaggtttgatgaaatcctggaggccagtgatgggatcatggtggctcgtggtgatctaggcattgagattcctgcagagaaggtcttccttgctcagaagatgatgattggacggtgcaaccgagctgggaagcctgtcatctgtgctactcagatgctggagagcatgatcaagaagccccgccccactcgggctgaaggcagtgatgtggccaatgcagtcctggatggagccgactgcatcatgctgtctggagaaacagccaaaggggactatcctctggaggctgtgcgcatgcagcacctgattgcccgtgaggcagaggctgccatctaccacttgcaattatttgaggaactccgccgcctggcgcccattaccagcgaccccacagaagccaccgccgtgggtgccgtggaggcctccttcaagtgctgcagtggggccataatcgtcctcaccaagtctggcaggtctgctcaccaggtggccagataccgcccacgtgcccccatcattgctgtgacccggaatccccagacagctcgtcaggcccacctgtaccgtggcatcttccctgtgctgtgcaaggacccagtccaggaggcctgggctgaggacgtggacctccgggtgaactttgccatgaatgttggcaaggcccgaggcttcttcaagaagggagatgtggtcattgtgctgaccggatggcgccctggctccggcttcaccaacaccatgcgtgttgttcctgtgccgtgatggaccccagagcccctcctccagcccctgtcccacccccttcccccagcccatccattaggccagcaacgcttgtagaactcactctgggctgtaacgtggcactggtaggttgggacaccagggaagaagatcaacgcctcactgaaacatggctgtgtttgcagcctgctctagtgggacagcccagagcctggctgcccatcatgtggccccacccaatcaagggaagaaggaggaatgctggactggaggcccctggagccagatggcaagagggtgacagcttcctttcctgtgtgtactctgtccagttcctttagaaaaaatggatgcccagaggactcccaaccctggcttggggtcaagaaacagccagcaagagttaggggccttagggcactgggctgttgttccattgaagccgactctggccctggcccttacttgcttctctagctctctaggcctctccagtttgcacctgtccccaccctccactcagctgtcctgcagcaaacactccaccctccaccttccatttt

SEQ ID NO: 172831 - DNA, 1863 bp, Homo sapiens
  Payload ID: 13970
  Gene Symbol: PKM
  Gene Name: pyruvate kinase, muscle
  ENST ID: ENST00000568883
  CDS Start-End: 145-1245
gcccacttcgcagtccctagttctccctactgccgctccagtgccagagcccctccgaaggcggccaggacctccaaccacgcacaagtctgcagctctccccaactttccgttcagctcagtctccgagggacctcagcagccatgtcgaagccccatagtgaagccgggactgccttcattcagacccagcagctgcacgcagccatggctgacacattcctggagcacatgtgccgcctggacattgattcaccacccatcaagaagggtgtgaaccttcctggggctgctgtggacttgcctgctgtgtcggagaaggacatccaggatctgaagtttggggtcgagcaggatgttgatatggtgtttgcgtcattcatccgcaaggcatctgatgtccatgaagttaggaaggtcctgggagagaagggaaagaacatcaagattatcagcaaaatcgagaatcatgagggggttcggaggtttgatgaaatcctggaggccagtgatgggatcatggtggctcgtggtgatctaggcattgagattcctgcagagaaggtcttccttgctcagaagatgatgattggacggtgcaaccgagctgggaagcctgtcatctgtgctactcagatgctggagagcatgatcaagaagccccgccccactcgggctgaaggcagtgatgtggccaatgcagtcctggatggagccgactgcatcatgctgtctggagaaacagccaaaggggactatcctctggaggctgtgcgcatgcagcacctgatagctcgtgaggctgaggcagccatgttccaccgcaagctgtttgaagaacttgtgcgagcctcaagtcactccacagacctcatggaagccatggccatgggcagcgtggaggcttcttataagtgtttagcagcagctttgatagttctgacggagtctggcaggtctgctcaccaggtggccagataccgcccacgtgcccccatcattgctgtgacccggaatccccagacagctcgtcaggcccacctgtaccgtggcatcttccctgtgctgtgcaaggacccagtccaggaggcctgggctgaggacgtggacctccgggtgaactttgccatgaatgttggcaaggcccgaggcttcttcaagaagggagatgtggtcattgtgctgaccggatggcgccctggctccggcttcaccaacaccatgcgtgttgttcctgtgccgtgatggaccccagagcccctcctccagcccctgtcccacccccttcccccagcccatccattaggccagcaacgcttgtagaactcactctgggctgtaacgtggcactggtaggttgggacaccagggaagaagatcaacgcctcactgaaacatggctgtgtttgcagcctgctctagtgggacagcccagagcctggctgcccatcatgtggccccacccaatcaagggaagaaggaggaatgctggactggaggcccctggagccagatggcaagagggtgacagcttcctttcctgtgtgtactctgtccagttcctttagaaaaaatggatgcccagaggactcccaaccctggcttggggtcaagaaacagccagcaagagttaggggccttagggcactgggctgttgttccattgaagccgactctggccctggcccttacttgcttctctagctctctaggcctctccagtttgcacctgtccccaccctccactcagctgtcctgcagcaaacactccaccctccaccttccattttcccccactactgcagcacctccaggcctgttgctatagagcctacctgtatgtcaataaacaacagctgaagc

SEQ ID NO: 172832 - DNA, 1806 bp, Homo sapiens
  Payload ID: 13970
  Gene Symbol: PKM
  Gene Name: pyruvate kinase, muscle
  Uniprot ID: P14618
  ENST ID: ENST00000568459
  CDS Start-End: 190-1785
gagctcacaatcttaaaatgtatctcctgtaatgctgggagtggggtacgagcttcctgctgtgggagggagggggacaggaagcctcgtaaggtctcaccaggtggcaagcacactggattagaagatgcaggaaagcaccttccagtctgaagatcatttaaagactcagtcatgacctcagcagccatgtcgaagccccatagtgaagccgggactgccttcattcagacccagcagctgcacgcagccatggctgacacattcctggagcacatgtgccgcctggacattgattcaccacccatcacagcccggaacactggcatcatctgtaccattggcccagcttcccgatcagtggagacgttgaaggagatgattaagtctggaatgaatgtggctcgtctgaacttctctcatggaactcatgagtaccatgcggagaccatcaagaatgtgcgcacagccacggaaagctttgcttctgaccccatcctctaccggcccgttgctgtggctctagacactaaaggacctgagatccgaactgggctcatcaagggcagcggcactgcagaggtggagctgaagaagggagccactctcaaaatcacgctggataacgcctacatggaaaagtgtgacgagaacatcctgtggctggactacaagaacatctgcaaggtggtggaagtgggcagcaagatctacgtggatgatgggcttatttctctccaggtgaagcagaaaggtgccgacttcctggtgacggaggtggaaaatggtggctccttgggcagcaagaagggtgtgaaccttcctggggctgctgtggacttgcctgctgtgtcggagaaggacatccaggatctgaagtttggggtcgagcaggatgttgatatggtgtttgcgtcattcatccgcaaggcatctgatgtccatgaagttaggaaggtcctgggagagaagggaaagaacatcaagattatcagcaaaatcgagaatcatgagggggttcggaggtttgatgaaatcctggaggccagtgatgggatcatggtggctcgtggtgatctaggcattgagattcctgcagagaaggtcttccttgctcagaagatgatgattggacggtgcaaccgagctgggaagcctgtcatctgtgctactcagatgctggagagcatgatcaagaagccccgccccactcgggctgaaggcagtgatgtggccaatgcagtcctggatggagccgactgcatcatgctgtctggagaaacagccaaaggggactatcctctggaggctgtgcgcatgcagcacctgatagctcgtgaggctgaggcagccatgttccaccgcaagctgtttgaagaacttgtgcgagcctcaagtcactccacagacctcatggaagccatggccatgggcagcgtggaggcttcttataagtgtttagcagcagctttgatagttctgacggagtctggcaggtctgctcaccaggtggccagataccgcccacgtgcccccatcattgctgtgacccggaatccccagacagctcgtcaggcccacctgtaccgtggcatcttccctgtgctgtgcaaggacccagtccaggaggcctgggctgaggacgtggacctccgggtgaactttgccatgaatgttggcaaggcccgaggcttcttcaagaagggagatgtggtcattgtgctgaccggatggcgccctggctccggcttcaccaacaccatgcgtgttgttcctgtgccgtgatggaccccagagcccctcctc

SEQ ID NO: 172833 - DNA, 550 bp, Homo sapiens
  Payload ID: 13970
  Gene Symbol: PKM
  Gene Name: pyruvate kinase, muscle
  ENST ID: ENST00000567087
  CDS Start-End: 96-550
cagacacccggaggagtggggagtggcagggcggggccgggagaatgctgccccggaacccataaatctgggccctgcccaggacctcagcagccatgtcgaagccccatagtgaagccgggactgccttcattcagacccagcagctgcacgcagccatggctgacacattcctggagcacatgtgccgcctggacattgattcaccacccatcacagcccggaacactggcatcatctgtaccattggcccagcttcccgatcagtggagacgttgaaggagatgattaagtctggaatgaatgtggctcgtctgaacttctctcatggaactcatgagtaccatgcggagaccatcaagaatgtgcgcacagccacggaaagctttgcttctgaccccatcctctaccggcccgttgctgtggctctagacactaaaggacctgagatccgaactgggctcatcaagggcagcggcactgcagaggtggagctgaagaagggagccactctcaaaatcacgctggataacgcctacatggaaaagtg

SEQ ID NO: 172834 - DNA, 554 bp, Homo sapiens
  Payload ID: 13970
  Gene Symbol: PKM
  Gene Name: pyruvate kinase, muscle
  ENST ID: ENST00000564178
  CDS Start-End: 50-554
gagaaagctgtctaggtagatgtcagtcagcccagtgacctcagcagccatgtcgaagccccatagtgaagccgggactgccttcattcagacccagcagctgcacgcagccatggctgacacattcctggagcacatgtgccgcctggacattgattcaccacccatcacagcccggaacactggcatcatctgtaccattggcccagcttcccgatcagtggagacgttgaaggagatgattaagtctggaatgaatgtggctcgtctgaacttctctcatggaactcatgagtaccatgcggagaccatcaagaatgtgcgcacagccacggaaagctttgcttctgaccccatcctctaccggcccgttgctgtggctctagacactaaaggacctgagatccgaactgggctcatcaagggcagcggcactgcagaggtggagctgaagaagggagccactctcaaaatcacgctggataacgcctacatggaaaagtgtgacgagaacatcctgtggctggactacaagaacatctgcaaggtggtgg

SEQ ID NO: 172835 - DNA, 1568 bp, Homo sapiens
  Payload ID: 13970
  Gene Symbol: PKM
  Gene Name: pyruvate kinase, muscle
  ENST ID: ENST00000561609
  CDS Start-End: 114-1568
aaatgtaacgtatcaccaaatctgtgggggagtggggctctgtggggaagatgactcaacctttcaattattctgcttttgagagaattatcttcgctgggacctcagcagccatgtcgaagccccatagtgaagccgggactgccttcattcagacccagcagctgcacgcagccatggctgacacattcctggagcacatgtgccgcctggacattgattcaccacccatcacagcccggaacactggcatcatctgtaccattggcccagcttcccgatcagtggagacgttgaaggagatgattaagtctggaatgaatgtggctcgtctgaacttctctcatggaactcatgagtaccatgcggagaccatcaagaatgtgcgcacagccacggaaagctttgcttctgaccccatcctctaccggcccgttgctgtggctctagacactaaaggacctgagatccgaactgggctcatcaagggcagcggcactgcagaggtggagctgaagaagggagccactctcaaaatcacgctggataacgcctacatggaaaagtgtgacgagaacatcctgtggctggactacaagaacatctgcaaggtggtggaagtgggcagcaagatctacgtggatgatgggcttatttctctccaggtgaagcagaaaggtgccgacttcctggtgacggaggtggaaaatggtggctccttgggcagcaagaagggtgtgaaccttcctggggctgctgtggacttgcctgctgtgtcggagaaggacatccaggatctgaagtttggggtcgagcaggatgttgatatggtgtttgcgtcattcatccgcaaggcatctgatgtccatgaagttaggaaggtcctgggagagaagggaaagaacatcaagattatcagcaaaatcgagaatcatgagggggttcggaggtttgatgaaatcctggaggccagtgatgggatcatggtggctcgtggtgatctaggcattgagattcctgcagagaaggtcttccttgctcagaagatgatgattggacggtgcaaccgagctgggaagcctgtcatctgtgctactcagatgctggagagcatgatcaagaagccccgccccactcgggctgaaggcagtgatgtggccaatgcagtcctggatggagccgactgcatcatgctgtctggagaaacagccaaaggggactatcctctggaggctgtgcgcatgcagcacctgatagctcgtgaggctgaggcagccatgttccaccgcaagctgtttgaagaacttgtgcgagcctcaagtcactccacagacctcatggaagccatggccatgggcagcgtggaggcttcttataagtgtttagcagcagctttgatagttctgacggagtctggcaggtctgctcaccaggtggccagataccgcccacgtgcccccatcattgctgtgacccggaatccccagacagctcgtcaggcccacctgtaccgtggcatcttccctgtgctgtgcaaggacccagtccaggaggcctgggctgaggac

SEQ ID NO: 172836 - DNA, 560 bp, Homo sapiens
  Payload ID: 13970
  Gene Symbol: PKM
  Gene Name: pyruvate kinase, muscle
  ENST ID: ENST00000566809
  CDS Start-End: 315-560
aacccataaatctgggccctgcccaggtaggccgggacagctggggtggcctgggccgagagccaagaaaagacaccccatctggcagcccaacttggcggcaacaggtggcccggcgcccgggggtctgggaggaaagtcgctccgggggcgggccccgttgccccgccgcgtccccattggtcatcaggtttcttaaaatgtgactctgaatctgtgtccttccgccgcagaatttagtcccaccgaaagggcaacctgcccgcgcgttccgccgccgccgccgcgcttcctcctgaaggacctcagcagccatgtcgaagccccatagtgaagccgggactgccttcattcagacccagcagctgcacgcagccatggctgacacattcctggagcacatgtgccgcctggacattgattcaccacccatcacagcccggaacactggcatcatctgtaccattggcccagcttcccgatcagtggagacgttgaaggagatgattaagtctggaatgaatgtggctcgtctgaacttctctcatggaactcatgag

SEQ ID NO: 172837 - DNA, 582 bp, Homo sapiens
  Payload ID: 13970
  Gene Symbol: PKM
  Gene Name: pyruvate kinase, muscle
  ENST ID: ENST00000562997
  CDS Start-End: 96-582
agaagtccgccctgagaaaccaaggctgggctgctctcctggagccaggggagtccagtgagtgttttacatacaactctaggacctcagcagccatgtcgaagccccatagtgaagccgggactgccttcattcagacccagcagctgcacgcagccatggctgacacattcctggagcacatgtgccgcctggacattgattcaccacccatcacagcccggaacactggcatcatctgtaccattggcccagcttcccgatcagtggagacgttgaaggagatgattaagtctggaatgaatgtggctcgtctgaacttctctcatggaactcatgagtaccatgcggagaccatcaagaatgtgcgcacagccacggaaagctttgcttctgaccccatcctctaccggcccgttgctgtggctctagacactaaaggacctgagatccgaactgggctcatcaagggcagcggcactgcagaggtggagctgaagaagggagccactctcaaaatcacgctggataacgcctacatggaaaagtgtgacgagaacatcctgtggctggactacaaga

SEQ ID NO: 172838 - DNA, 6964 bp, Homo sapiens
  Payload ID: 13971
  Gene Symbol: QKI
  Gene Name: QKI, KH domain containing, RNA binding
  Uniprot ID: Q96PU8
  ENST ID: ENST00000275262
  CDS Start-End: 552-1529
tgaactgaggcgaactccgccgccaagtgagtgaggaggaggaggaggagaaggaggaggaggaagaggaggagcgcagtcggagcgcggcggcagcggcagaggcgccgcggcggggaccagcccagagagaccccccgagcccgcggcacaggcggcggcggcgctgagcgggctcgaccagccgagcgagcggcggccccggctcctcctcgtccggcgccagcagcccgcgccccgcgcccgcactcggccagccgagacccgcctcccgcccgcccgccggcctcgtgagggacgcgccgagccgggcggccgagagcggcggcggctgggagcgcgtcgggcccgggcggaaagtgcctgcggggggcgggcgagcgcgcggtgccggccgccccggggctcggcgcgggagccagagcgggagccggcgcggagcgggacgccgggtcccgagcggcccgcggccggggctcgcccccgcccctccctcctctccggcggcggcggcggcggcggcgggcggagtgagctgcggagcctggaatatggtcggggaaatggaaacgaaggagaagccgaagcccaccccagattacctgatgcagctgatgaacgacaagaagctcatgagcagcctgcccaacttctgcgggatcttcaaccacctcgagcggctgctggacgaagaaattagcagagtacggaaagacatgtacaatgacacattaaatggcagtacagagaaaaggagtgcagaattgcctgatgctgtgggacctattgttcagttacaagagaaactttatgtgcctgtaaaagaatacccagattttaattttgttgggagaatccttggacctagaggacttacagccaaacaacttgaagcagaaaccggatgtaaaatcatggtccgaggcaaaggctcaatgagggataaaaaaaaggaggagcaaaatagaggcaagcccaattgggagcatctaaatgaagatttacatgtactaatcactgtggaagatgctcagaacagagcagaaatcaaattgaagagagcagttgaagaagtgaagaaattattggtacctgcagcagaaggagaagacagcctgaagaagatgcagctgatggagcttgcgattctgaatggcacctacagagatgccaacattaaatcaccagcccttgccttttctcttgcagcaacagcccaggctgctccaaggatcattactgggcctgcgccggttctcccaccagctgccctgcgtactcctacgccagctggccctaccataatgcctttgatcagacaaatacagaccgctgtcatgccaaacggaactcctcacccaactgctgcaatagttcctccagggcccgaagctggtttaatctatacaccctatgagtacccctacacattggcaccagctacatcaatccttgagtatcctattgaacctagtggtgtattagagtggattgaaatgccagtcatgcctgatatttcagcccattgacttgctggatgaaggactagaatacagcagctgttataacacgaccagtcaatgtggaacaaactgtttctgtgcaacccctttgttttaccagacaaaatttgaatactttttttcctgaattgtatatgaccttggtgctgcatgcatgctgttgacttttaggactttgatcttttaaggttttttttccccagcattaatattgatttataaagatttgaaaatctttaatgaactggagaacactaagatttaaactcgaaaattcgttgttcaagtaaagaaagccatgatgctctgtatgttatctgtgtgtgtgcatgcactcaggtgccctttgtttcatgaacaaatacatttcattgtacatgttttctgtttaaatcattgtataaagtaattgcaggtcagaattataccacagaactgtttatgagaggcttgtgtctgttgcacatttcttgaagcatttttaaaataacatgtaacctgtaaccttgttgtttaagttttcttttctattaatactctgtcctgtggtcccgtgcatgctccttttcccagaactcctctctgctgcacccacagcatctgttcccgaggagttatgactcttgacttcctgcagggctggggctcttagccaccagctgctgttccagcactttcagcgcaagatctccctgattttgccacgtggaattgtacttgtatatgattaccttatctaaaatgaataagaggtgatggaccagtttactgcttagaaatagcaagaggcactgcagtaaaacttgtttctcattgtaaagcttcatgtcttttgtttgttggaaaatttttacttatagaaacttaattattagactggtaaaataaagaccaaaatatgcagatttctaattggcattcataaggtgaataataataagtgcccaatgaaaaaatctattatggttaatttcatttcttgctttgccacctaagcagtaaaacatgatattgaccacttggagaactcagaaaattattttaaatttctaagttataataaatttgcacacagataacatgcatgctatttatgtcacatctcacattaaattattttaaaataagcagtgcccttcaaaacagatgcagacatgtgtgttggtagtagtgaggagattggtattagcatcaagtcttcattgatgactaatttttaattcccttccttttatctttaggtatggctttcccaacgaaaggctaagaattcaagaacggtcttaactgaaccctcatcagatctgaatttaacaaatgcttagtctcagcagcctccgggggaaaaaagcttagcctagcagtcagtgacttacttgcactttttgcacatagatataaagtaaaattatgttattaatttggtttagtctgtaatattacacagtaatggtaatttataaaggagtgtatagtagtatactgactgctaagtgtactatactgtttgctttactaatcacctaattcattgcagttcatacttattgactcagagtttaaaaccacaatctgtaggctttaagaattgcttttaaacctttttaagtgataaactcttgaagtggtcttaaggttagcaaataattgtctgtattaaacatggcgttatttaagtagtcctgctgcaagaaaggcacttcagtgaatatgtgactagtaaagcttaaatatgtttggatctaatagagctcatgaaatactgtaacttggggattgtaaatgaatggatacaataggttaaggcccaagatgtttgaaatgaatgcaatattaatagatgcatatatacatgacatattgtggttaattttaaaactactgtgccttaacgtgtttcttaaacttttgtagtaaatgaacatttgaaatccattttgataaacctgctgttaatgttttttccccccttgtgaatgttttctaactttgtcttggtaattgcaatttaactaggtgcggtggctactaaagttcgaaggcacgatatgcgtgtccatccttaccaaaggattgtgaccgcagaccgaggttagtttagttctgcagttcttgtctataagaaatgcgttgggtgtccataaaatttgcaacaccacacctgatggaaaaatgtaattgcttacctgcacacagttttttttccttttctaaatttgtttgtgatcattgacagatttaagggttgggttttttgttttggtttggttttttctcccttcatattttaacttattaaatcttctattattatgtactatgatttattcctactaaaacataaattagtcaatttggggagctattaaattttgatgttgcctcagttattttcattaataacttttgctaaaatttaccttttaaaagttctgaaatttggggttggtattgcaaaatgaattgaacggatggtgctttaatgagagaagtaaaggaatatatgcctcctgtgtacttttggagaaaactgaagatttagtttccatttttctttataataaaatatttgagccactgtataaacatgagggtgcacatgtcaagtacttagctaaaatcaacaaagtgaggactgtgaagataactttcatgtagttggatttttttatataaattagagcgtcaattcccttttattcttacattctcttgccaaaatggatcctttgatttttgtcatttgctgctaaaatatattatctgaaggtaaactgtctcttgaagttctgtggtggtatgagatccagctgtgtgaatataatttttgactaacctgtgactggaaaataagtcttcatttttctcctttacaacttttataatttgtgtcctgtatatgcccttggacccttttataaattatttttgcttattgaggaatggtattttcggtttattgacattgaattgttttctaagtttttccatcacaagataggaatatcaagcatggtagtaaaaaaggattttttacaagtttctattatggcacatttgtttcctacaaattaaattgatcaaagtctcaaatattagtggaggaaaaagtgctggatttgtacttcaattgtacatcttctatgaatttatgaaggacctacctgctttatgtgattaccttgagtactgatgataaatactagacacagctgttgtccacatcagaaataacatgcctttcccaaagacattgttaatatttgtttagcataatccataaagaacgttgaagacttttaaactaatgtattcatcactaacagtgattgttcagtgaacaaaatagaccccagctccgtggtcgtctatgaggatggtattccttgtaagtgttctgtatgagcacgtctcatagggatggggaagttttttggaaagtcacttgagttttaaagaaactggacaattccatgaataatttgaggttttattcatattgctaatgtctacaattgttctaaagagtattttaaagtagtttttttcccccagctaatctttccctatgtatgcccccttttaggagatttctcaccattttgctttaacacaataattattggcctacttaatactccagtgccttgagatagttggacatattttaggaagattttattgtatttggaaaattacgacacattccatgcatggatcttttgtagttacgtgttttgattagtcctgtcactgtttttatttaaaatgcagtgtcagcaaaccgaaatgctcatttcttttttagtaacagagtactcgtatacttatcactgtatgcactcattgggtctaagggagatgtctgaagtccttcacttaaattattttatgatactactgttttctctatttttgaggttaaaattattttaaaaaaatattttgaagagaagtttattagtataagcattcatttaatgcaaaaaaactcagcccttggacatataaccatgtaattctatatgaacgtttagagtactacatggttgaccaatatctagttctttactaaaagtaaactcacctctttatatatatttcaaaactgaatttgaagcctattagagaccaactgaccttttagttgtaatgaactgtatggtcttgcatggtgacacacctgtgtaggaggccaagacttggcagaggatgtagtctaggtgtcctggtatatataaatggtcactcacttcgtttatatattccacactcagaaaagaagtcagagttttttctgagtaatacaaaaaccatcacttacataatttgtataagaaactttaaacagttttaatcaaaactatgagtaacatcaaaaatgctttaagattctatattttggaatacctgtgaagtagtatgactacatcatgttaaatatttattttcttctatgattttggagcagcaatttttattttaaataaaattccacttttaagaaattcagggaagatttggtcacattgaagatacagtatttttgtagtatttataaactgttctaaatgatagactatagaaaacatttttgtcatatgaaggtaaatcagtccattattttggatcatttaaactgaacattacaccttctgggctttgatttatgaagtggcacagaatctaactttgcactgaatatcttttcattcacatctcctctgccttagtcacaatggcaacagtacagaaaattctatcaaacctcagaatatagtagaaataattaagctgttgaatgagtcttaaaaattatactactgttaagtggaccaagtttggtgaagcagaatgtgacaaaggttgattaaggaaggaacaactcaaggacattgggaatgataacttttccacttgagaactactttatgttttactgtaatttttaaagtttttttgtcctttttgttattttgcaaaagaaaatagtatttacaggtggcttcttttaaaatataaaaatataaagcaggaatgtatatgaaatgtcagattttattgtatttgcagagtattagctttgaaattgaataaagaaagctgtttgtagttttaaaatgccttattggtatcaattagaaatttcttctattttttgatgtacttagagctttttgagtgtagaattttaaatggcaggattttacagtgtttacatgcaagtgcattttataagtgttctatatgtgtaaaatagtattttcaactggaaagtgttggctagtgcaaaaggcctggccattttctggttcccatgatgttgcctacactgctagactacagtttagtatcgctttgtatcatgaggccaagaaattccatgttgtttgtaaatagaataattgaaaaagcaataaacatttattgaacaaaagaaa

SEQ ID NO: 172839 - DNA, 1063 bp, Homo sapiens
  Payload ID: 13971
  Gene Symbol: QKI
  Gene Name: QKI, KH domain containing, RNA binding
  Uniprot ID: Q96PU8
  ENST ID: ENST00000361195
  CDS Start-End: 25-1026
ggagtgagctgcggagcctggaatatggtcggggaaatggaaacgaaggagaagccgaagcccaccccagattacctgatgcagctgatgaacgacaagaagctcatgagcagcctgcccaacttctgcgggatcttcaaccacctcgagcggctgctggacgaagaaattagcagagtacggaaagacatgtacaatgacacattaaatggcagtacagagaaaaggagtgcagaattgcctgatgctgtgggacctattgttcagttacaagagaaactttatgtgcctgtaaaagaatacccagattttaattttgttgggagaatccttggacctagaggacttacagccaaacaacttgaagcagaaaccggatgtaaaatcatggtccgaggcaaaggctcaatgagggataaaaaaaaggaggagcaaaatagaggcaagcccaattgggagcatctaaatgaagatttacatgtactaatcactgtggaagatgctcagaacagagcagaaatcaaattgaagagagcagttgaagaagtgaagaaattattggtacctgcagcagaaggagaagacagcctgaagaagatgcagctgatggagcttgcgattctgaatggcacctacagagatgccaacattaaatcaccaacagcccaggctgctccaaggatcattactgggcctgcgccggttctcccaccagctgccctgcgtactcctacgccagctggccctaccataatgcctttgatcagacaaatacagaccgctgtcatgccaaacggaactcctcacccaactgctgcaatagttcctccagggcccgaagctggtttaatctatacaccctatgagtacccctacacattggcaccagctacatcaatccttgagtatcctattgaacctagtggtgtattaggtgcggtggctactaaagttcgaaggcacgatatgcgtgtccatccttaccaaaggattgtgaccgcagaccgagccgccaccggcaactaacctatgaccttctgacctctgaactcttcacccaatg

SEQ ID NO: 172840 - DNA, 6085 bp, Homo sapiens
  Payload ID: 13971
  Gene Symbol: QKI
  Gene Name: QKI, KH domain containing, RNA binding
  Uniprot ID: Q96PU8
  ENST ID: ENST00000361758
  CDS Start-End: 1195-2154
gggcggagcgaccctcggaaggggcgtggcgaccgggctcgacgcgcgcacgcgctctggagccccacggctacgtgtcgggccacgtgatgcccaccccgaaagtcccccgtgaagcaacaggacgttaaaaaaaaatttctcttctgcggggtggataagaggttctgaaaaaactatagtaacgggaggcgaggcggaggcagcgctggcgcgtcccgctggaattcctctcgcctgccgcgccagccccgaccgcgcccgcagccccacccgccccgtgccgtggaaagccccgcgccccccccgcggccgtcggccccgcagcccacacccacccgccccgggcgccccgcacggcggcgacccagtccttgcgcccaggcccgccgagcgccgcagtccgtcacactcccgttgcccccgtcgcccgccccgccggggaggcagggaggagggggcgcggcgccggcggctgccccggtcgcggggcggcgggcagcaggcagcgggagcgcgccggccgggacccgctaacggccgccctgcgcggccccgcccgccgcccgcccccggccctccccgcgccgctgcccctccccccgccgccgccgctgctgccgccgccgctggcagcgccgcctgaactgaggcgaactccgccgccaagtgagtgaggaggaggaggaggagaaggaggaggaggaagaggaggagcgcagtcggagcgcggcggcagcggcagaggcgccgcggcggggaccagcccagagagaccccccgagcccgcggcacaggcggcggcggcgctgagcgggctcgaccagccgagcgagcggcggccccggctcctcctcgtccggcgccagcagcccgcgccccgcgcccgcactcggccagccgagacccgcctcccgcccgcccgccggcctcgtgagggacgcgccgagccgggcggccgagagcggcggcggctgggagcgcgtcgggcccgggcggaaagtgcctgcggggggcgggcgagcgcgcggtgccggccgccccggggctcggcgcgggagccagagcgggagccggcgcggagcgggacgccgggtcccgagcggcccgcggccggggctcgcccccgcccctccctcctctccggcggcggcggcggcggcggcgggcggagtgagctgcggagcctggaatatggtcggggaaatggaaacgaaggagaagccgaagcccaccccagattacctgatgcagctgatgaacgacaagaagctcatgagcagcctgcccaacttctgcgggatcttcaaccacctcgagcggctgctggacgaagaaattagcagagtacggaaagacatgtacaatgacacattaaatggcagtacagagaaaaggagtgcagaattgcctgatgctgtgggacctattgttcagttacaagagaaactttatgtgcctgtaaaagaatacccagattttaattttgttgggagaatccttggacctagaggacttacagccaaacaacttgaagcagaaaccggatgtaaaatcatggtccgaggcaaaggctcaatgagggataaaaaaaaggaggagcaaaatagaggcaagcccaattgggagcatctaaatgaagatttacatgtactaatcactgtggaagatgctcagaacagagcagaaatcaaattgaagagagcagttgaagaagtgaagaaattattggtacctgcagcagaaggagaagacagcctgaagaagatgcagctgatggagcttgcgattctgaatggcacctacagagatgccaacattaaatcaccagcccttgccttttctcttgcagcaacagcccaggctgctccaaggatcattactgggcctgcgccggttctcccaccagctgccctgcgtactcctacgccagctggccctaccataatgcctttgatcagacaaatacagaccgctgtcatgccaaacggaactcctcacccaactgctgcaatagttcctccagggcccgaagctggtttaatctatacaccctatgagtacccctacacattggcaccagctacatcaatccttgagtatcctattgaacctagtggtgtattaggtatggctttcccaacgaaaggctaagaattcaagaacggtcttaactgaaccctcatcagatctgaatttaacaaatgcttagtctcagcagcctccgggggaaaaaagcttagcctagcagtcagtgacttacttgcactttttgcacatagatataaagtaaaattatgttattaatttggtttagtctgtaatattacacagtaatggtaatttataaaggagtgtatagtagtatactgactgctaagtgtactatactgtttgctttactaatcacctaattcattgcagttcatacttattgactcagagtttaaaaccacaatctgtaggctttaagaattgcttttaaacctttttaagtgataaactcttgaagtggtcttaaggttagcaaataattgtctgtattaaacatggcgttatttaagtagtcctgctgcaagaaaggcacttcagtgaatatgtgactagtaaagcttaaatatgtttggatctaatagagctcatgaaatactgtaacttggggattgtaaatgaatggatacaataggttaaggcccaagatgtttgaaatgaatgcaatattaatagatgcatatatacatgacatattgtggttaattttaaaactactgtgccttaacgtgtttcttaaacttttgtagtaaatgaacatttgaaatccattttgataaacctgctgttaatgttttttccccccttgtgaatgttttctaactttgtcttggtaattgcaatttaactaggtgcggtggctactaaagttcgaaggcacgatatgcgtgtccatccttaccaaaggattgtgaccgcagaccgagccgccaccggcaactaacctatgaccttctgacctctgaactcttcacccaatgatgacctgaccatgcctgcctgctgatcagttaactggtaatcgcctttgcttgcctgtcgtcagtgcagcgagctgaggcacttgtccgttcgtcttaccatctaaccaaacaaaagacaaagaaattgttgtcctccaactcagctttttttttttttttttcctgtttgggtgaaagtggttctagaaactgcactgaatagtagtaaagcaataaggcccaattcatcccacagcactgatcatcttttaatatcccaccctaagcgaacggtaagaaggcctctcttaagaaggggagacagatggtccttaactactcaatgacagaggcagttactgtgagagacttctaggaatctttttcttctcatagcgaagtcaaagctctctctgaatgtactgtgtgatgatgcatcatgcatgaaccttcggtcagggatatcattggtgaagtgatttcaaaaagtattcaaaatttgatatgctgtttagtcactacagtgccctcaaagggcagaagttgcagccttttttatattgcctgccaaaatttgaagtattagaagaaagtgtgccatgagagaaaaacttaaggagttttgaaaagtaatgcaaataacaaaactgcaacactatttttaaaaagataaatatctgagttaaaattactgaatctttattttacacctaaaaaaatatgagaacaaggtacatgcattatgtgtcacattactgggcaaactgttcaagtatttttttttaaacctccctgtatagaaaaaaatcattaaggatgtaaaagccatgcttgcctatttgctgtatacatgtaatgaaattgtagataaagtgtagtgcattgaaacaaatgaacaaaaagtagatacttttactatacaagggtgctggtgcagaaaaaaatatatatatttttggaaatgtagcattttatactttcaagtgttataaaaaaaaagaaaaagaacaaagaaaccctttatttcattaaatgattttttctggtggttgtcaagaaacaaaagaccaaaagagcctttttgtctttcttttttattttttaagtattggaataagtctaaagaaaagaaagtgccttattttccttcatggtcattcagtcaagtgtctcataaagatcagctcctccctcagaatacaagttaatgcatgttactcagtcgcccagtatgtgaaagaagatatgagggagacaaatgagttgatagtttgaattataggatttttgccacgttaccttgatgcaaatttgccaaatctgatactgtgaaaagatttgataacttttctaatgcctgactagtaagttttaaaacatcattctttaaaagaatagtttaatacttttggttattccaatcttcaatgttaacccaaaggattctgagataaaaattatgtgtcatctaaacttcagtttacagacaaaattagagctttgttttatttggagaagggggatgcattcatttgattttgttttttgtttttaattaattgaatataataggatacctagcaaatgttttcacaaaagtgaatctttgtgattttcattctagaaaacaatgttttaaatcacccaaatttaatcacatgtctttatatcataccagataactggtgtagtgtatccttttactgtttcaataacctctgcctcccccaccccttaactttaaaagaatgtgaaaaactagcatcatagtgcatataaatactcaaccacatttcagcttaagcttctaatttctcaagaagttgaaacagttagttatgtagttgaagcaatttgtgtgcaaagcctacatctaaacacttgagtgaataatcattaactgctcagtaccagacgtggcaaatctcaagtgacagtggacccccccccccgcccagcttatcaactcgtcccctcttccacaccttcccagcatcacagtcagaggtcagcaggaagctgagtcattaccttcttggtgacctcccccaccatcttgtctcacttggaaaccgttgtcagtttatttactatgcaatagacattcattgttttgtatccagctagctttggtttaatatgccactgctttgtctttctgttacacatacagttttgatttatttacaatatatgctgtgccattttgatttttatattgtttggttggttgaataaatttgcgacactcaaacacttgaggtgatagttgttaaaaacaataccagtatttgatccagtttcatctcaactatgttatacctggacattttagatgtttatcaaaggtcttttatggggaagaaagtaaatgtatgaaataataaatgtgtgacatttatagggaatgttggctctgaacaaacttttgaaaacttggttgacaaaattttggatcaactgaaaaaagcatgacttttgaaatctctgaatgccttggttctcagtattatcattctttattgaatttatttcttattaaaatatgtagtttttaagactttttttctgacagtattatgtaattttttagcgtgggtagatgggagtgtcgcttgtatgttatcgtacagctgacatgtatttttgtctattctttattatcttagtttcatgctatgtatgtaccataaccaacctattgcctatgagaaacatgtaagataatgtatttacagccattgttacaagtttataatgtatttttctatcttgttttatatgtatgttatataacattcaaaaagaatttttttcttgattgagaaaaggatacaaaatgcaaaatccacaattttgataactgaaaattgccaattgttttgcagtactttattatattgggtgtcttgtcttttttgggcttttagttagctaatgaatgaatacattagacacttttgggttttagttgggattttacatagcttgcattttaattctttggttctttgctgtttctattaacccacagcattattttaataaatgttataataccaacctactaa

SEQ ID NO: 172841 - DNA, 9463 bp, Homo sapiens
  Payload ID: 13971
  Gene Symbol: QKI
  Gene Name: QKI, KH domain containing, RNA binding
  Uniprot ID: Q96PU8
  ENST ID: ENST00000361752
  CDS Start-End: 552-1577
tgaactgaggcgaactccgccgccaagtgagtgaggaggaggaggaggagaaggaggaggaggaagaggaggagcgcagtcggagcgcggcggcagcggcagaggcgccgcggcggggaccagcccagagagaccccccgagcccgcggcacaggcggcggcggcgctgagcgggctcgaccagccgagcgagcggcggccccggctcctcctcgtccggcgccagcagcccgcgccccgcgcccgcactcggccagccgagacccgcctcccgcccgcccgccggcctcgtgagggacgcgccgagccgggcggccgagagcggcggcggctgggagcgcgtcgggcccgggcggaaagtgcctgcggggggcgggcgagcgcgcggtgccggccgccccggggctcggcgcgggagccagagcgggagccggcgcggagcgggacgccgggtcccgagcggcccgcggccggggctcgcccccgcccctccctcctctccggcggcggcggcggcggcggcgggcggagtgagctgcggagcctggaatatggtcggggaaatggaaacgaaggagaagccgaagcccaccccagattacctgatgcagctgatgaacgacaagaagctcatgagcagcctgcccaacttctgcgggatcttcaaccacctcgagcggctgctggacgaagaaattagcagagtacggaaagacatgtacaatgacacattaaatggcagtacagagaaaaggagtgcagaattgcctgatgctgtgggacctattgttcagttacaagagaaactttatgtgcctgtaaaagaatacccagattttaattttgttgggagaatccttggacctagaggacttacagccaaacaacttgaagcagaaaccggatgtaaaatcatggtccgaggcaaaggctcaatgagggataaaaaaaaggaggagcaaaatagaggcaagcccaattgggagcatctaaatgaagatttacatgtactaatcactgtggaagatgctcagaacagagcagaaatcaaattgaagagagcagttgaagaagtgaagaaattattggtacctgcagcagaaggagaagacagcctgaagaagatgcagctgatggagcttgcgattctgaatggcacctacagagatgccaacattaaatcaccagcccttgccttttctcttgcagcaacagcccaggctgctccaaggatcattactgggcctgcgccggttctcccaccagctgccctgcgtactcctacgccagctggccctaccataatgcctttgatcagacaaatacagaccgctgtcatgccaaacggaactcctcacccaactgctgcaatagttcctccagggcccgaagctggtttaatctatacaccctatgagtacccctacacattggcaccagctacatcaatccttgagtatcctattgaacctagtggtgtattaggtgcggtggctactaaagttcgaaggcacgatatgcgtgtccatccttaccaaaggattgtgaccgcagaccgagccgccaccggcaactaacctatgaccttctgacctctgaactcttcacccaatgatgacctgaccatgcctgcctgctgatcagttaactggtaatcgcctttgcttgcctgtcgtcagtgcagcgagctgaggcacttgtccgttcgtcttaccatctaaccaaacaaaagacaaagaaattgttgtcctccaactcagctttttttttttttttttcctgtttgggtgaaagtggttctagaaactgcactgaatagtagtaaagcaataaggcccaattcatcccacagcactgatcatcttttaatatcccaccctaagcgaacggtaagaaggcctctcttaagaaggggagacagatggtccttaactactcaatgacagaggcagttactgtgagagacttctaggaatctttttcttctcatagcgaagtcaaagctctctctgaatgtactgtgtgatgatgcatcatgcatgaaccttcggtcagggatatcattggtgaagtgatttcaaaaagtattcaaaatttgatatgctgtttagtcactacagtgccctcaaagggcagaagttgcagccttttttatattgcctgccaaaatttgaagtattagaagaaagtgtgccatgagagaaaaacttaaggagttttgaaaagtaatgcaaataacaaaactgcaacactatttttaaaaagataaatatctgagttaaaattactgaatctttattttacacctaaaaaaatatgagaacaaggtacatgcattatgtgtcacattactgggcaaactgttcaagtatttttttttaaacctccctgtatagaaaaaaatcattaaggatgtaaaagccatgcttgcctatttgctgtatacatgtaatgaaattgtagataaagtgtagtgcattgaaacaaatgaacaaaaagtagatacttttactatacaagggtgctggtgcagaaaaaaatatatatatttttggaaatgtagcattttatactttcaagtgttataaaaaaaaagaaaaagaacaaagaaaccctttatttcattaaatgattttttctggtggttgtcaagaaacaaaagaccaaaagagcctttttgtctttcttttttattttttaagtattggaataagtctaaagaaaagaaagtgccttattttccttcatggtcattcagtcaagtgtctcataaagatcagctcctccctcagaatacaagttaatgcatgttactcagtcgcccagtatgtgaaagaagatatgagggagacaaatgagttgatagtttgaattataggatttttgccacgttaccttgatgcaaatttgccaaatctgatactgtgaaaagatttgataacttttctaatgcctgactagtaagttttaaaacatcattctttaaaagaatagtttaatacttttggttattccaatcttcaatgttaacccaaaggattctgagataaaaattatgtgtcatctaaacttcagtttacagacaaaattagagctttgttttatttggagaagggggatgcattcatttgattttgttttttgtttttaattaattgaatataataggatacctagcaaatgttttcacaaaagtgaatctttgtgattttcattctagaaaacaatgttttaaatcacccaaatttaatcacatgtctttatatcataccagataactggtgtagtgtatccttttactgtttcaataacctctgcctcccccaccccttaactttaaaagaatgtgaaaaactagcatcatagtgcatataaatactcaaccacatttcagcttaagcttctaatttctcaagaagttgaaacagttagttatgtagttgaagcaatttgtgtgcaaagcctacatctaaacacttgagtgaataatcattaactgctcagtaccagacgtggcaaatctcaagtgacagtggacccccccccccgcccagcttatcaactcgtcccctcttccacaccttcccagcatcacagtcagaggtcagcaggaagctgagtcattaccttcttggtgacctcccccaccatcttgtctcacttggaaaccgttgtcagtttatttactatgcaatagacattcattgttttgtatccagctagctttggtttaatatgccactgctttgtctttctgttacacatacagttttgatttatttacaatatatgctgtgccattttgatttttatattgtttggttggttgaataaatttgcgacactcaaacacttgaggtgatagttgttaaaaacaataccagtatttgatccagtttcatctcaactatgttatacctggacattttagatgtttatcaaaggtcttttatggggaagaaagtaaatgtatgaaataataaatgtgtgacatttatagggaatgttggctctgaacaaacttttgaaaacttggttgacaaaattttggatcaactgaaaaaagcatgacttttgaaatctctgaatgccttggttctcagtattatcattctttattgaatttatttcttattaaaatatgtagtttttaagactttttttctgacagtattatgtaattttttagcgtgggtagatgggagtgtcgcttgtatgttatcgtacagctgacatgtatttttgtctattctttattatcttagtttcatgctatgtatgtaccataaccaacctattgcctatgagaaacatgtaagataatgtatttacagccattgttacaagtttataatgtatttttctatcttgttttatatgtatgttatataacattcaaaaagaatttttttcttgattgagaaaaggatacaaaatgcaaaatccacaattttgataactgaaaattgccaattgttttgcagtactttattatattgggtgtcttgtcttttttgggcttttagttagctaatgaatgaatacattagacacttttgggttttagttgggattttacatagcttgcattttaattctttggttctttgctgtttctattaacccacagcattattttaataaatgttataataccaacctactaactctggactttgtctgtttattaacctttatatgtttaattaaaataaacaaataaagacaaaagaatgtaaagtcttgagttactggactaaccctgaagaacgtgaccacagataacatagtgtgacttgtttttatgttgtttgtcagctgacagttttgcacactactgttaaaatggctttggttattctggtcttttagcttgggggccggggcgggtgtgggtgtaggtgcagtagagatgggaacaaagtagcctttgtttgaggcattcttctcttgccacttgcctttcagcatctgcattactaattccacaccttatttttccttctccaaaataatcactgtctgctcacagcatcgagtaaaaagatacattgtcatggtatatacctggagaaaccagtttgattctttgttgaaccatttcttttaatttctgtaaataagtaattttatggtcacattgtaaagcagagaaactgttgatattttacctttatttagatttttgttttaacttgacctttttcctttggaaagcgttgaacttgtttagctaactactcctattaggggagcttaacttgggtaaagtcaaaggcccactggctgtttctcatggtggcctgaagccccgctgctttccagtgaggaaaagaaccctcagcacgttactgagctttcctcaggtatttttttctctgtcacctactttacaaatacagtcagactaaaacattaaacaagaagtttaagggggaataacattgggatttgaaaagttgtatgtgattaatttcttgcatgcaaatcaatttaagatttcttaaatatcttcatgcttttcttggctggaacttgggtaaattaacctgtaattatgaattatttagtttaactcaaggtgcatttttatttcacagattgatacttgcttttttctgtgaaacagttctcctagataccaaaatcctcaggatgaatttttgcatttgtaaataacaatttatctttgtaaattacattttatttatttagagttctaaaattgagggctgaaatgaatgacatgtaatagaagacaaaactgtaccaatacgctgttaaccaatcagactgtccaggtattctcatttcataaatatgtatacacacatataaatacacagagtagtgttagctgatgtgagtgataacagcgaatcaccattgagatggtcatttggatcatgtaaacaaaccgtgtcatgtctctgatgggagcggtgggtagtgtactgttaggtggacaggtcttttaacatgctactatttgtaaaagtttccgttgccataacagttcatgtagtagtctgtgaaaattcgaagctgtctgtcaagctgctaatatacaagttgtcatggtaccatgtaacttaaattgatgaatttctatgcaatttactattctctgaagcctatgaatgcagcctcatctcattttcagttaagggtactttatgtataattatgtcattgctgccttttatgtaggaaatgtaaaaaagttttaaaaggcgaaaataacattacagatttcatttttatacaggttacaatattaaacatgaaactaccaaattccaagaatagtaaaattctagagtcagttgattgattgaaactatttgacaaaacagttgaaagctgagctttcagtcaagaagttggtgaaattaatgtccttaaacttttcctttaggcaaaatgtcagggaaaacttaacatgaaagtagttactcccatacgcaccagtgcagtagctccaggtgtaagaggtcacgaaggcaccctgcccataaaaccaggatgtgcatacgtacacacaatcggtgtctggttatggttttctaaacactacataaggatctgaattttttagtgtgccaaaagcaaacgataggtttaaatgaaattgctcactaccaaatcaagactcttcatatatatacgtgtgtgtatatatatatgtcataacactttcacgtgtgacagcctaaggtttctttagttttaggatggggtggggtgggagtggttttgcatgtttgaccaggatgtgatgcctgtctttattccttgataagaagtagctgttacagcatttcaagcaaattattttaggtagaatagaacttactgccaaatgattatttatttagcaaaaattattctccaacttttcgaattcacaatttttctaagtgcatagagtagttttttacattgtcacgaattccttaatacctttatttaaaatggaaaaaatatggacaatattttagaaatatgtgctacacatctaattttatctgtagtttaagtgatctaaattgagatgcctttgatatgaagagatttaccaacattatatgcactcgtgccttcaatgtggaatcaaactggttaacctcagcacagtcctctcgtttctgtgtttctgctgcactaattgccagggggtgggggagaaggcgaatgaattaattcatagtagaaggaggcgataggtgcagcaaagggcagccacagtgttgattccacattataatgttgttgcctcttcttggcaaaagacaccacattgtgggaagatctcagcttccagggtaaaagttaatttataacttaaaagtgctattaagtttttattaccaaatatatcttttatggtttatattgtagtggtatgtatgaaacatttaaaattttactgtggaaattgtgtatatatatatatatagtcgaaataggtgttcacaggtcacatgtgaacggagaactgcatgaccgtacatgaaatgcaataaaccaactggaaaaagtgcatgtgcttcatcctctcaagccaactgcagctggaaagtgctgcttatcctccacccccagaaaatgcatgtatcaatatgagaataaagaacgcacactttcaattttattgaggctttcaacactatttaaaagaaaatgtaagaatttgacattctggagttattataacattagaaaatgagcataacattcactctgattttagccattaagggagattagtaaacagactgctacagtgttccatagttggactgtgcatccaaaacatttttttatctttaataaatggtacagtttttatgtagttttcgaatgtaagaagaaaggaatgctgaccaaaacttgatttcatcagcttcatgaaaaggactagtgtcattaacctgttgaacagaattggtttattaaaaaaatcatttccagtagtgtgaaacctttacgagtctttaacatctaaatgttatgactccttgtaccttaagttttccagtctttcttatttatatcatctccaagtacctctggctcctttcctcttgctcaccggaaccttagttttcctcaacagaatgctttgttaaagtagcccacagttgcaggatccatagcaccgtcgtgcagactagcagcccaaaggtgtgtttggtttggcttatacggtgttttgctttttaaactacttgccataatttaaaagtggcaacactagacttaaaaaaaaaaaagtctgattgcccatattagattttttttttaattcttcacaaaatctgctcttcctgaaagatcaaagtgtctagaaagcccaaacatgtattcttaacatagtaggcaccagctgaaactgagtaattaaacggtcccctgaagccaagtattccctggttagtcgccaccccaccactccttcctgtctctagtgtcacacttgggctgttgattttcttactcttctcttgctttaatccttccccccggctctctggctcctgtggatatctgtgcttgtttcctggtccaggatggtgatctgactttcaaaccagcttctcaaaaggggtgacataaaatcagttttgatgtttttcctcctgaaaaatcagatgaatattttagtcactgttactcatgcacattgtgttcttatgtttacagaagtgcttaagtgaatggaagcactagacatttggatttccttcctaacgtaatttttaatgattaccccttttatacagtaatttgtggtctttagaaagcagttaaactaattgaccatctaatagttgtactatacatatgtctaaaataatagtcatggtaagtttggcatcatatcttccccaaaaaatgtttattaaaattagattattccagtttaatgctattttgtgaactgtataccctctgaaagcgcttatttttacatgctacacaacagttccaattttaaggagtgtctcctaaaattgggatgaaaatctactgtagtctgttttaaagtatgctatactatgttcattggttacttaactggatattaatataaaggttattacaagaaaaatgatgaagagcaaaaggagaagaaaatatttgcaagtgaatccacaattcttgcagaactatttgagttgatactaaagattttatgttcactcctttaccttagaactgtcaagcttgggaatgaggaaagtgccttggctgtgcttgaaacctgaattttagtgcttcccttattacattcattgttttcaatgattgatttataaaattaagacatactggtagtacaagttgaaagttggtttgaatacattttaattaaatgataatatgttaatatgcttttgttcattgctttctcactgaggtaaaacagcattaaaaagttgtccagaatttaaactga

SEQ ID NO: 172842 - DNA, 7911 bp, Homo sapiens
  Payload ID: 13971
  Gene Symbol: QKI
  Gene Name: QKI, KH domain containing, RNA binding
  Uniprot ID: Q96PU8
  ENST ID: ENST00000392127
  CDS Start-End: 552-1511
tgaactgaggcgaactccgccgccaagtgagtgaggaggaggaggaggagaaggaggaggaggaagaggaggagcgcagtcggagcgcggcggcagcggcagaggcgccgcggcggggaccagcccagagagaccccccgagcccgcggcacaggcggcggcggcgctgagcgggctcgaccagccgagcgagcggcggccccggctcctcctcgtccggcgccagcagcccgcgccccgcgcccgcactcggccagccgagacccgcctcccgcccgcccgccggcctcgtgagggacgcgccgagccgggcggccgagagcggcggcggctgggagcgcgtcgggcccgggcggaaagtgcctgcggggggcgggcgagcgcgcggtgccggccgccccggggctcggcgcgggagccagagcgggagccggcgcggagcgggacgccgggtcccgagcggcccgcggccggggctcgcccccgcccctccctcctctccggcggcggcggcggcggcggcgggcggagtgagctgcggagcctggaatatggtcggggaaatggaaacgaaggagaagccgaagcccaccccagattacctgatgcagctgatgaacgacaagaagctcatgagcagcctgcccaacttctgcgggatcttcaaccacctcgagcggctgctggacgaagaaattagcagagtacggaaagacatgtacaatgacacattaaatggcagtacagagaaaaggagtgcagaattgcctgatgctgtgggacctattgttcagttacaagagaaactttatgtgcctgtaaaagaatacccagattttaattttgttgggagaatccttggacctagaggacttacagccaaacaacttgaagcagaaaccggatgtaaaatcatggtccgaggcaaaggctcaatgagggataaaaaaaaggaggagcaaaatagaggcaagcccaattgggagcatctaaatgaagatttacatgtactaatcactgtggaagatgctcagaacagagcagaaatcaaattgaagagagcagttgaagaagtgaagaaattattggtacctgcagcagaaggagaagacagcctgaagaagatgcagctgatggagcttgcgattctgaatggcacctacagagatgccaacattaaatcaccagcccttgccttttctcttgcagcaacagcccaggctgctccaaggatcattactgggcctgcgccggttctcccaccagctgccctgcgtactcctacgccagctggccctaccataatgcctttgatcagacaaatacagaccgctgtcatgccaaacggaactcctcacccaactgctgcaatagttcctccagggcccgaagctggtttaatctatacaccctatgagtacccctacacattggcaccagctacatcaatccttgagtatcctattgaacctagtggtgtattaggtaagttcttctccccatggggttaacaacattctctttataaatatttttgctccctcagattttgaaatgattttatcagttttagagaggcaagacaagtttgcattagggaagaccgaaaactaaattttgttttatttcagcctctcataagggttcccctttgaaataattgcaccttaaatttattcagatccactttggtaactgaggttcagtttggttgggtaaatctgttgtgtacatttcaacaaatacttttacatttgacattactgaggtcattctgagttttaggtcccaccccattggcccgtcacctccatcagctccacttctcaaactttatttgagatttattttatctcacaggtttgtgtaattgttggaaaatttttaaacttctaagtgaaagtagtctgagcgctttataaaattcatattattgtgtgtgttttgtaatatttgcgatcacttaaaatatcagataaatacagtcatgcatcgcttaacaacggggatacagtctaagaattgccttgtctggcagtttcatcatttggtgtacatcatagagtgtacttacacagacatagatgatatcgtttactacacacctaggctgtgtggtatagccattataatcttatgggaccacatagtataagtggtccgttgttgaccaaaatgttgttatgcaggcatgactgtagttgtattcttaagatttttcagttcttgtgttttggagtcctagtcatattaaacatgagagatactcttaatttcagtagtacagtatggaatagttaaataaatagcaaatcactgaattcagaatctcacttaaggcagaaattaaaatcataatataaacgcttggttttacatgaacaaaaagtggtgtgctcgaaaaagacattactgatgccttttttttatagagtggattgaaatgccagtcatgcctgatatttcagcccattgacttgctggatgaaggactagaatacagcagctgttataacacgaccagtcaatgtggaacaaactgtttctgtgcaacccctttgttttaccagacaaaatttgaatactttttttcctgaattgtatatgaccttggtgctgcatgcatgctgttgacttttaggactttgatcttttaaggttttttttccccagcattaatattgatttataaagatttgaaaatctttaatgaactggagaacactaagatttaaactcgaaaattcgttgttcaagtaaagaaagccatgatgctctgtatgttatctgtgtgtgtgcatgcactcaggtgccctttgtttcatgaacaaatacatttcattgtacatgttttctgtttaaatcattgtataaagtaattgcaggtcagaattataccacagaactgtttatgagaggcttgtgtctgttgcacatttcttgaagcatttttaaaataacatgtaacctgtaaccttgttgtttaagttttcttttctattaatactctgtcctgtggtcccgtgcatgctccttttcccagaactcctctctgctgcacccacagcatctgttcccgaggagttatgactcttgacttcctgcagggctggggctcttagccaccagctgctgttccagcactttcagcgcaagatctccctgattttgccacgtggaattgtacttgtatatgattaccttatctaaaatgaataagaggtgatggaccagtttactgcttagaaatagcaagaggcactgcagtaaaacttgtttctcattgtaaagcttcatgtcttttgtttgttggaaaatttttacttatagaaacttaattattagactggtaaaataaagaccaaaatatgcagatttctaattggcattcataaggtgaataataataagtgcccaatgaaaaaatctattatggttaatttcatttcttgctttgccacctaagcagtaaaacatgatattgaccacttggagaactcagaaaattattttaaatttctaagttataataaatttgcacacagataacatgcatgctatttatgtcacatctcacattaaattattttaaaataagcagtgcccttcaaaacagatgcagacatgtgtgttggtagtagtgaggagattggtattagcatcaagtcttcattgatgactaatttttaattcccttccttttatctttaggtatggctttcccaacgaaaggctaagaattcaagaacggtcttaactgaaccctcatcagatctgaatttaacaaatgcttagtctcagcagcctccgggggaaaaaagcttagcctagcagtcagtgacttacttgcactttttgcacatagatataaagtaaaattatgttattaatttggtttagtctgtaatattacacagtaatggtaatttataaaggagtgtatagtagtatactgactgctaagtgtactatactgtttgctttactaatcacctaattcattgcagttcatacttattgactcagagtttaaaaccacaatctgtaggctttaagaattgcttttaaacctttttaagtgataaactcttgaagtggtcttaaggttagcaaataattgtctgtattaaacatggcgttatttaagtagtcctgctgcaagaaaggcacttcagtgaatatgtgactagtaaagcttaaatatgtttggatctaatagagctcatgaaatactgtaacttggggattgtaaatgaatggatacaataggttaaggcccaagatgtttgaaatgaatgcaatattaatagatgcatatatacatgacatattgtggttaattttaaaactactgtgccttaacgtgtttcttaaacttttgtagtaaatgaacatttgaaatccattttgataaacctgctgttaatgttttttccccccttgtgaatgttttctaactttgtcttggtaattgcaatttaactaggtgcggtggctactaaagttcgaaggcacgatatgcgtgtccatccttaccaaaggattgtgaccgcagaccgaggttagtttagttctgcagttcttgtctataagaaatgcgttgggtgtccataaaatttgcaacaccacacctgatggaaaaatgtaattgcttacctgcacacagttttttttccttttctaaatttgtttgtgatcattgacagatttaagggttgggttttttgttttggtttggttttttctcccttcatattttaacttattaaatcttctattattatgtactatgatttattcctactaaaacataaattagtcaatttggggagctattaaattttgatgttgcctcagttattttcattaataacttttgctaaaatttaccttttaaaagttctgaaatttggggttggtattgcaaaatgaattgaacggatggtgctttaatgagagaagtaaaggaatatatgcctcctgtgtacttttggagaaaactgaagatttagtttccatttttctttataataaaatatttgagccactgtataaacatgagggtgcacatgtcaagtacttagctaaaatcaacaaagtgaggactgtgaagataactttcatgtagttggatttttttatataaattagagcgtcaattcccttttattcttacattctcttgccaaaatggatcctttgatttttgtcatttgctgctaaaatatattatctgaaggtaaactgtctcttgaagttctgtggtggtatgagatccagctgtgtgaatataatttttgactaacctgtgactggaaaataagtcttcatttttctcctttacaacttttataatttgtgtcctgtatatgcccttggacccttttataaattatttttgcttattgaggaatggtattttcggtttattgacattgaattgttttctaagtttttccatcacaagataggaatatcaagcatggtagtaaaaaaggattttttacaagtttctattatggcacatttgtttcctacaaattaaattgatcaaagtctcaaatattagtggaggaaaaagtgctggatttgtacttcaattgtacatcttctatgaatttatgaaggacctacctgctttatgtgattaccttgagtactgatgataaatactagacacagctgttgtccacatcagaaataacatgcctttcccaaagacattgttaatatttgtttagcataatccataaagaacgttgaagacttttaaactaatgtattcatcactaacagtgattgttcagtgaacaaaatagaccccagctccgtggtcgtctatgaggatggtattccttgtaagtgttctgtatgagcacgtctcatagggatggggaagttttttggaaagtcacttgagttttaaagaaactggacaattccatgaataatttgaggttttattcatattgctaatgtctacaattgttctaaagagtattttaaagtagtttttttcccccagctaatctttccctatgtatgcccccttttaggagatttctcaccattttgctttaacacaataattattggcctacttaatactccagtgccttgagatagttggacatattttaggaagattttattgtatttggaaaattacgacacattccatgcatggatcttttgtagttacgtgttttgattagtcctgtcactgtttttatttaaaatgcagtgtcagcaaaccgaaatgctcatttcttttttagtaacagagtactcgtatacttatcactgtatgcactcattgggtctaagggagatgtctgaagtccttcacttaaattattttatgatactactgttttctctatttttgaggttaaaattattttaaaaaaatattttgaagagaagtttattagtataagcattcatttaatgcaaaaaaactcagcccttggacatataaccatgtaattctatatgaacgtttagagtactacatggttgaccaatatctagttctttactaaaagtaaactcacctctttatatatatttcaaaactgaatttgaagcctattagagaccaactgaccttttagttgtaatgaactgtatggtcttgcatggtgacacacctgtgtaggaggccaagacttggcagaggatgtagtctaggtgtcctggtatatataaatggtcactcacttcgtttatatattccacactcagaaaagaagtcagagttttttctgagtaatacaaaaaccatcacttacataatttgtataagaaactttaaacagttttaatcaaaactatgagtaacatcaaaaatgctttaagattctatattttggaatacctgtgaagtagtatgactacatcatgttaaatatttattttcttctatgattttggagcagcaatttttattttaaataaaattccacttttaagaaattcagggaagatttggtcacattgaagatacagtatttttgtagtatttataaactgttctaaatgatagactatagaaaacatttttgtcatatgaaggtaaatcagtccattattttggatcatttaaactgaacattacaccttctgggctttgatttatgaagtggcacagaatctaactttgcactgaatatcttttcattcacatctcctctgccttagtcacaatggcaacagtacagaaaattctatcaaacctcagaatatagtagaaataattaagctgttgaatgagtcttaaaaattatactactgttaagtggaccaagtttggtgaagcagaatgtgacaaaggttgattaaggaaggaacaactcaaggacattgggaatgataacttttccacttgagaactactttatgttttactgtaatttttaaagtttttttgtcctttttgttattttgcaaaagaaaatagtatttacaggtggcttcttttaaaatataaaaatataaagcaggaatgtatatgaaatgtcagattttattgtatttgcagagtattagctttgaaattgaataaagaaagctgtttgtagttttaaaatgccttattggtatcaattagaaatttcttctattttttgatgtacttagagctttttgagtgtagaattttaaatggcaggattttacagtgtttacatgcaagtgcattttataagtgttctatatgtgtaaaatagtattttcaactggaaagtgttggctagtgcaaaaggcctggccattttctggttcccatgatgttgcctacactgctagactacagtttagtatcgctttgtatcatgaggccaagaaattccatgttgtttgtaaatagaataattgaaaaagcaataaacatttattgaacaaaagaaa

SEQ ID NO: 172843 - DNA, 954 bp, Homo sapiens
  Payload ID: 13971
  Gene Symbol: QKI
  Gene Name: QKI, KH domain containing, RNA binding
  Uniprot ID: Q96PU8
  ENST ID: ENST00000424802
  CDS Start-End: 1-954
atggtcggggaaatggaaacgaaggagaagccgaagcccaccccagattacctgatgcagctgatgaacgacaagaagctcatgagcagcctgcccaacttctgcgggatcttcaaccacctcgagcggctgctggacgaagaaattagcagagtacggaaagacatgtacaatgacacattaaatggcagtacagagaaaaggagtgcagaattgcctgatgctgtgggacctattgttcagttacaagagaaactttatgtgcctgtaaaagaatacccagattttaattttgttgggagaatccttggacctagaggacttacagccaaacaacttgaagcagaaaccggatgtaaaatcatggtccgaggcaaaggctcaatgagggataaaaaaaaggaggagcaaaatagaggcaagcccaattgggagcatctaaatgaagatttacatgtactaatcactgtggaagatgctcagaacagagcagaaatcaaattgaagagagcagttgaagaagtgaagaaattattggtacctgcagcagaaggagaagacagcctgaagaagatgcagctgatggagcttgcgattctgaatggcacctacagagatgccaacattaaatcaccaacagcccaggctgctccaaggatcattactgggcctgcgccggttctcccaccagctgccctgcgtactcctacgccagctggccctaccataatgcctttgatcagacaaatacagaccgctgtcatgccaaacggaactcctcacccaactgctgcaatagttcctccagggcccgaagctggtttaatctatacaccctatgagtacccctacacattggcaccagctacatcaatccttgagtatcctattgaacctagtggtgtattagagtggattgaaatgccagtcatgcctgatatttcagcccattga

SEQ ID NO: 172844 - DNA, 5685 bp, Homo sapiens
  Payload ID: 13971
  Gene Symbol: QKI
  Gene Name: QKI, KH domain containing, RNA binding
  Uniprot ID: Q96PU8
  ENST ID: ENST00000453779
  CDS Start-End: 552-1511
tgaactgaggcgaactccgccgccaagtgagtgaggaggaggaggaggagaaggaggaggaggaagaggaggagcgcagtcggagcgcggcggcagcggcagaggcgccgcggcggggaccagcccagagagaccccccgagcccgcggcacaggcggcggcggcgctgagcgggctcgaccagccgagcgagcggcggccccggctcctcctcgtccggcgccagcagcccgcgccccgcgcccgcactcggccagccgagacccgcctcccgcccgcccgccggcctcgtgagggacgcgccgagccgggcggccgagagcggcggcggctgggagcgcgtcgggcccgggcggaaagtgcctgcggggggcgggcgagcgcgcggtgccggccgccccggggctcggcgcgggagccagagcgggagccggcgcggagcgggacgccgggtcccgagcggcccgcggccggggctcgcccccgcccctccctcctctccggcggcggcggcggcggcggcgggcggagtgagctgcggagcctggaatatggtcggggaaatggaaacgaaggagaagccgaagcccaccccagattacctgatgcagctgatgaacgacaagaagctcatgagcagcctgcccaacttctgcgggatcttcaaccacctcgagcggctgctggacgaagaaattagcagagtacggaaagacatgtacaatgacacattaaatggcagtacagagaaaaggagtgcagaattgcctgatgctgtgggacctattgttcagttacaagagaaactttatgtgcctgtaaaagaatacccagattttaattttgttgggagaatccttggacctagaggacttacagccaaacaacttgaagcagaaaccggatgtaaaatcatggtccgaggcaaaggctcaatgagggataaaaaaaaggaggagcaaaatagaggcaagcccaattgggagcatctaaatgaagatttacatgtactaatcactgtggaagatgctcagaacagagcagaaatcaaattgaagagagcagttgaagaagtgaagaaattattggtacctgcagcagaaggagaagacagcctgaagaagatgcagctgatggagcttgcgattctgaatggcacctacagagatgccaacattaaatcaccagcccttgccttttctcttgcagcaacagcccaggctgctccaaggatcattactgggcctgcgccggttctcccaccagctgccctgcgtactcctacgccagctggccctaccataatgcctttgatcagacaaatacagaccgctgtcatgccaaacggaactcctcacccaactgctgcaatagttcctccagggcccgaagctggtttaatctatacaccctatgagtacccctacacattggcaccagctacatcaatccttgagtatcctattgaacctagtggtgtattaggtatggctttcccaacgaaaggctaagaattcaagaacggtcttaactgaaccctcatcagatctgaatttaacaaatgcttagtctcagcagcctccgggggaaaaaagcttagcctagcagtcagtgacttacttgcactttttgcacatagatataaagtaaaattatgttattaatttggtttagtctgtaatattacacagtaatggtaatttataaaggagtgtatagtagtatactgactgctaagtgtactatactgtttgctttactaatcacctaattcattgcagttcatacttattgactcagagtttaaaaccacaatctgtaggctttaagaattgcttttaaacctttttaagtgataaactcttgaagtggtcttaaggttagcaaataattgtctgtattaaacatggcgttatttaagtagtcctgctgcaagaaaggcacttcagtgaatatgtgactagtaaagcttaaatatgtttggatctaatagagctcatgaaatactgtaacttggggattgtaaatgaatggatacaataggttaaggcccaagatgtttgaaatgaatgcaatattaatagatgcatatatacatgacatattgtggttaattttaaaactactgtgccttaacgtgtttcttaaacttttgtagtaaatgaacatttgaaatccattttgataaacctgctgttaatgttttttccccccttgtgaatgttttctaactttgtcttggtaattgcaatttaactaggtgcggtggctactaaagttcgaaggcacgatatgcgtgtccatccttaccaaaggattgtgaccgcagaccgaggttagtttagttctgcagttcttgtctataagaaatgcgttgggtgtccataaaatttgcaacaccacacctgatggaaaaatgtaattgcttacctgcacacagttttttttccttttctaaatttgtttgtgatcattgacagatttaagggttgggttttttgttttggtttggttttttctcccttcatattttaacttattaaatcttctattattatgtactatgatttattcctactaaaacataaattagtcaatttggggagctattaaattttgatgttgcctcagttattttcattaataacttttgctaaaatttaccttttaaaagttctgaaatttggggttggtattgcaaaatgaattgaacggatggtgctttaatgagagaagtaaaggaatatatgcctcctgtgtacttttggagaaaactgaagatttagtttccatttttctttataataaaatatttgagccactgtataaacatgagggtgcacatgtcaagtacttagctaaaatcaacaaagtgaggactgtgaagataactttcatgtagttggatttttttatataaattagagcgtcaattcccttttattcttacattctcttgccaaaatggatcctttgatttttgtcatttgctgctaaaatatattatctgaaggtaaactgtctcttgaagttctgtggtggtatgagatccagctgtgtgaatataatttttgactaacctgtgactggaaaataagtcttcatttttctcctttacaacttttataatttgtgtcctgtatatgcccttggacccttttataaattatttttgcttattgaggaatggtattttcggtttattgacattgaattgttttctaagtttttccatcacaagataggaatatcaagcatggtagtaaaaaaggattttttacaagtttctattatggcacatttgtttcctacaaattaaattgatcaaagtctcaaatattagtggaggaaaaagtgctggatttgtacttcaattgtacatcttctatgaatttatgaaggacctacctgctttatgtgattaccttgagtactgatgataaatactagacacagctgttgtccacatcagaaataacatgcctttcccaaagacattgttaatatttgtttagcataatccataaagaacgttgaagacttttaaactaatgtattcatcactaacagtgattgttcagtgaacaaaatagaccccagctccgtggtcgtctatgaggatggtattccttgtaagtgttctgtatgagcacgtctcatagggatggggaagttttttggaaagtcacttgagttttaaagaaactggacaattccatgaataatttgaggttttattcatattgctaatgtctacaattgttctaaagagtattttaaagtagtttttttcccccagctaatctttccctatgtatgcccccttttaggagatttctcaccattttgctttaacacaataattattggcctacttaatactccagtgccttgagatagttggacatattttaggaagattttattgtatttggaaaattacgacacattccatgcatggatcttttgtagttacgtgttttgattagtcctgtcactgtttttatttaaaatgcagtgtcagcaaaccgaaatgctcatttcttttttagtaacagagtactcgtatacttatcactgtatgcactcattgggtctaagggagatgtctgaagtccttcacttaaattattttatgatactactgttttctctatttttgaggttaaaattattttaaaaaaatattttgaagagaagtttattagtataagcattcatttaatgcaaaaaaactcagcccttggacatataaccatgtaattctatatgaacgtttagagtactacatggttgaccaatatctagttctttactaaaagtaaactcacctctttatatatatttcaaaactgaatttgaagcctattagagaccaactgaccttttagttgtaatgaactgtatggtcttgcatggtgacacacctgtgtaggaggccaagacttggcagaggatgtagtctaggtgtcctggtatatataaatggtcactcacttcgtttatatattccacactcagaaaagaagtcagagttttttctgagtaatacaaaaaccatcacttacataatttgtataagaaactttaaacagttttaatcaaaactatgagtaacatcaaaaatgctttaagattctatattttggaatacctgtgaagtagtatgactacatcatgttaaatatttattttcttctatgattttggagcagcaatttttattttaaataaaattccacttttaagaaattcagggaagatttggtcacattgaagatacagtatttttgtagtatttataaactgttctaaatgatagactatagaaaacatttttgtcatatgaaggtaaatcagtccattattttggatcatttaaactgaacattacaccttctgggctttgatttatgaagtggcacagaatctaactttgcactgaatatcttttcattcacatctcctctgccttagtcacaatggcaacagtacagaaaattctatcaaacctcagaatatagtagaaataattaagctgttgaatgagtcttaaaaattatactactgttaagtggaccaagtttggtgaagcagaatgtgacaaaggttgattaaggaaggaacaactcaaggacattgggaatgataacttttccacttgagaactactttatgttttactgtaatttttaaagtttttttgtcctttttgttattttgcaaaagaaaatagtatttacaggtggcttcttttaaaatataaaaatataaagcaggaatgtatatgaaatgtcagattttattgtatttgcagagtattagctttgaaattgaataaagaaagctgtttgtagttttaaaatgccttattggtatcaattagaaatttcttctattttttgatgtacttagagctttttgagtgtagaattttaaatggcaggattttacagtgtttacatgcaagtgcattttataagtgttctatatgtgtaaaatagtattttcaactggaaagtgttggctagtgcaaaaggcctggccattttctggttcccatgatgttgcctacactgctagactacagtttagtatcgctttgtatcatgaggccaagaaattccatgttgtttgtaaatagaataattgaaaaagcaataaacatttattgaacaaaagaaa

SEQ ID NO: 172845 - DNA, 846 bp, Homo sapiens
  Payload ID: 13971
  Gene Symbol: QKI
  Gene Name: QKI, KH domain containing, RNA binding
  ENST ID: ENST00000545607
  CDS Start-End: 1-103
agattacctgatgcagctgatgaacgacaagaagctcatgagcagcctgcccaacttctgcgggatcttcaaccacctcgagcggctgctggacgaagtttaattttgttgggagaatccttggacctagaggacttacagccaaacaacttgaagcagaaaccggatgtaaaatcatggtccgaggcaaaggctcaatgagggataaaaaaaaggaggagcaaaatagaggcaagcccaattgggagcatctaaatgaagatttacatgtactaatcactgtggaagatgctcagaacagagcagaaatcaaattgaagagagcagttgaagaagtgaagaaattattggtacctgcagcagaaggagaagacagcctgaagaagatgcagctgatggagcttgcgattctgaatggcacctacagagatgccaacattaaatcaccaacagcccaggctgctccaaggatcattactgggcctgcgccggttctcccaccagctgccctgcgtactcctacgccagctggccctaccataatgcctttgatcagacaaatacagaccgctgtcatgccaaacggaactcctcacccaactgctgcaatagttcctccagggcccgaagctggtttaatctatacaccctatgagtacccctacacattggcaccagctacatcaatccttgagtatcctattgaacctagtggtgtattaggtgcggtggctactaaagttcgaaggcacgatatgcgtgtccatccttaccaaaggattgtgaccgcagaccgagccgccaccggcaactaacctatgaccttctgacctctgaactcttcac

SEQ ID NO: 172846 - DNA, 597 bp, Homo sapiens
  Payload ID: 13971
  Gene Symbol: QKI
  Gene Name: QKI, KH domain containing, RNA binding
  ENST ID: ENST00000544823
  CDS Start-End: 87-597
ttcctctggactagcaagaatattttttttgtctaacacatttaaaatttttacttttaacagaaattagcagagtacggaaagacatgtacaatgacacattaaatggcagtacagagaaaaggagtgcagaattgcctgatgctgtgggacctattgttcagttacaagagaaactttatgtgcctgtaaaagaatacccagattttaattttgttgggagaatccttggacctagaggacttacagccaaacaacttgaagcagaaaccggatgtaaaatcatggtccgaggcaaaggctcaatgagggataaaaaaaaggaggagcaaaatagaggcaagcccaattgggagcatctaaatgaagatttacatgtactaatcactgtggaagatgctcagaacagagcagaaatcaaattgaagagagcagttgaagaagtgaagaaattattggtacctgcagcagaaggagaagacagcctgaagaagatgcagctgatggagcttgcgattctgaatggcacctacagagatgccaacattaaatcaccagcccttgccttttctcttgcagcaacagcccaggctgctc

SEQ ID NO: 172847 - DNA, 583 bp, Homo sapiens
  Payload ID: 13971
  Gene Symbol: QKI
  Gene Name: QKI, KH domain containing, RNA binding
  ENST ID: ENST00000537041
  CDS Start-End: 104-583
aaaaattagccgggcatggtagagtgtgcctacagtgccagctacttgggaggctgaagcagaagaatcgcttgaacctgaaattagcagagtacggaaagacatgtacaatgacacattaaatggcagtacagagaaaaggagtgcagaattgcctgatgctgtgggacctattgttcagttacaagagaaactttatgtgcctgtaaaagaatacccagattttaattttgttgggagaatccttggacctagaggacttacagccaaacaacttgaagcagaaaccggatgtaaaatcatggtccgaggcaaaggctcaatgagggataaaaaaaaggaggagcaaaatagaggcaagcccaattgggagcatctaaatgaagatttacatgtactaatcactgtggaagatgctcagaacagagcagaaatcaaattgaagagagcagttgaagaagtgaagaaattattggtacctgcagcagaaggagaagacagcctgaagaagatgcagctgatggagcttgcgattctgaatggcacctacagagatgccaacattaaatcaccaacagcccag

SEQ ID NO: 172848 - DNA, 457 bp, Homo sapiens
  Payload ID: 13971
  Gene Symbol: QKI
  Gene Name: QKI, KH domain containing, RNA binding
  ENST ID: ENST00000545346
  CDS Start-End: 47-172
agttcatctttggcagtagcatgaaattagcagagtacggaaagacatgtacaatgacacattaaatggcagtacagagaaaaggagtgcagaattgcctgatgctgtgggacctattgttcagttacaagagaaactttatgtgcctgtaaaagaatacccagatttgtgacttcttgccacggtgaactactattaccgactggtgtgttggagcatggcatttgtcttgatcggtgattctcaaaacacagtccttggaccatagtatctacgctttctgggaactgtaaatgttcaagcccctttccatacttattgaatcagaaactctgggtttaattttgttgggagaatccttggacctagaggacttacagccaaacaacttgaagcagaaaccggatgtaaaatcatggtccgaggcaaaggctcaatgagggataaaaaaaaggag

SEQ ID NO: 172849 - DNA, 1106 bp, Homo sapiens
  Payload ID: 13971
  Gene Symbol: QKI
  Gene Name: QKI, KH domain containing, RNA binding
  ENST ID: ENST00000537883
  CDS Start-End: 1-715
agagaaaaggagtgcagaattgcctgatgctgtgggacctattgttcagttacaagagaaactttatgtgcctgtaaaagaatacccagatgaggagcaaaatagaggcaagcccaattgggagcatctaaatgaagatttacatgtactaatcactgtggaagatgctcagaacagagcagaaatcaaattgaagagagcagttgaagaagtgaagaaattattggtacctgcagcagaaggagaagacagcctgaagaagatgcagctgatggagcttgcgattctgaatggcacctacagagatgccaacattaaatcaccagcccttgccttttctcttgcagcaacagcccaggctgctccaaggatcattactgggcctgcgccggttctcccaccagctgccctgcgtactcctacgccagctggccctaccataatgcctttgatcagacaaatacagaccgctgtcatgccaaacggaactcctcacccaactgctgcaatagttcctccagggcccgaagctggtttaatctatacaccctatgagtacccctacacattggcaccagctacatcaatccttgagtatcctattgaacctagtggtgtattaggtgcggtggctactaaagttcgaaggcacgatatgcgtgtccatccttaccaaaggattgtgaccgcagaccgagccgccaccggcaactaacctatgaccttctgacctctgaactcttcacccaatgatgacctgaccatgcctgcctgctgatcagttaactggtaatcgcctttgcttgcctgtcgtcagtgcagcgagctgaggcacttgtccgttcgtcttaccatctaaccaaacaaaagacaaagaaattgttgtcctccaactcagctttttttttttttttttcctgtttgggtgaaagtggttctagaaactgcactgaatagtagtaaagcaataaggcccaattcatcccacagcactgatcatcttttaatatcccaccctaagcgaacggtaagaaggcctctcttaagaaggggagacagatggtccttaactactcaatgacagaggcagttactgtgagagactt

SEQ ID NO: 172850 - DNA, 613 bp, Homo sapiens
  Payload ID: 13971
  Gene Symbol: QKI
  Gene Name: QKI, KH domain containing, RNA binding
  ENST ID: ENST00000544361
  CDS Start-End: 1-556
attgaagagagcagttgaagaagtgaagaaattattggtacctgcagcagaaggagaagacagcctgaagaagatgcagctgatggagcttgcgattctgaatggcacctacagagatgccaacattaaatcaccagcccttgccttttctcttgcagcaacagcccaggctgctccaaggatcattactgggcctgcgccggttctcccaccagctgccctgcgtactcctacgccagctggccctaccataatgcctttgatcagacaaatacagaccgctgtcatgccaaacggaactcctcacccaactgctgcaatagttcctccagggcccgaagctggtttaatctatacaccctatgagtacccctacacattggcaccagctacatcaatccttgagtatcctattgaacctagtggtgtattaggtgcggtggctactaaagttcgaaggcacgatatgcgtgtccatccttaccaaaggattgtgaccgcagaccgagtcacaatggcaacagtacagaaaattctatcaaacctcagaatatagtagaaataattaagctgttgaatgagtcttaaaaattatactactgttaagtggacc

SEQ ID NO: 172851 - DNA, 551 bp, Homo sapiens
  Payload ID: 13971
  Gene Symbol: QKI
  Gene Name: QKI, KH domain containing, RNA binding
  ENST ID: ENST00000537124
  CDS Start-End: 409-551
aacctggtaggcggcggttgcagggagaggagattgcgccactgcactccagcctgggtgacagagcgagattccatctcaaaaacaaataaaatttggaaccttttttgtaaactcttcaatgtcatagttttacagggtctcaaacttactttgcagattatatcagagaattgtgttttagagctgcaggggacctgagagttgggagtatatgttcatttcataggtgcaaagacaagtgggcagcagagctagagcaagacactcacttctgccctctgttccattttgtggcgtgcctctccacaaggggaactggagggaaaaacctggaatatttccatatgctaaaaatctgctgctgttgcctcaagttgtgaagaaattagcagagtacggaaagacatgtacaatgacacattaaatggcagtacagagaaaaggagtgcagaattgcctgatgctgtgggacctattgttcagttacaagagaaactttatgtgcctgtaaaagaatacccagattttaattttgttgggagaatcct

SEQ ID NO: 172852 - DNA, 495 bp, Homo sapiens
  Payload ID: 13971
  Gene Symbol: QKI
  Gene Name: QKI, KH domain containing, RNA binding
  ENST ID: ENST00000544436
  CDS Start-End: 196-495
agtacctgaagtattaatttctagtagctgtgggtttctgtggacgcctagagaaaaaaaagaccacaaaaaaagtctgtttcgaaaatcgactggccaggagtttgtttgtttttttttcctgcttagaggcaccaccggaggactgtgtaaaggaaactgaaaactacagaaattagcagagtacggaaagacatgtacaatgacacattaaatggcagtacagagaaaaggagtgcagaattgcctgatgctgtgggacctattgttcagttacaagagaaactttatgtgcctgtaaaagaatacccagattttaattttgttgggagaatccttggacctagaggacttacagccaaacaacttgaagcagaaaccggatgtaaaatcatggtccgaggcaaaggctcaatgagggataaaaaaaaggaggagcaaaatagaggcaagcccaattgggagcatctaaatgaagatttacatgtactaatc

SEQ ID NO: 172853 - DNA, 1317 bp, Homo sapiens
  Payload ID: 13972
  Gene Symbol: QTRT1
  Gene Name: queuine tRNA-ribosyltransferase 1
  Uniprot ID: Q9BXR0
  ENST ID: ENST00000250237
  CDS Start-End: 11-1222
gacagtcaagatggcgggagcagctacccaggcttccctggagtcggccccacggatcatgcggctggtggccgaatgcagccgctccagggcccgggcaggcgagctgtggctgccgcatgggacagtggccactcctgtgttcatgccagtgggcacgcaggccaccatgaagggcatcacgaccgaacagctggacgctctgggttgccgcatctgcctgggcaatacctaccatctgggtctaaggccgggacccgagctgatccagaaagccaacggtctccacggcttcatgaattggcctcataatctgctaacggacagcggcggtttccagatggtgtcgctggtgtctctgtccgaggtgacggaggagggcgtccgcttccgctccccctacgacggcaatgagaccctgctgagcccggagaaatccgtgcagatccagaatgcgctgggctcggacatcatcatgcagctggacgacgtggttagcagtactgtgactgggccacgtgtggaggaggccatgtacaggtcaatccgctggctggaccggtgcattgcagcccatcagcggccggacaagcagaacctcttcgccattatccagggtgggctggacgcagatctccgggccacctgccttgaagagatgaccaagcgagacgtgcctggcttcgccatcgggggcctgagcgggggtgagagcaagtcgcagttctggcggatggtggcgctgagcacctctcggctgccgaaggacaagccccgatatctgatgggggttggctatgccactgatctggtagtctgcgtggctcttggatgtgacatgttcgactgcgtcttccccacacggacagcgcgctttggctctgccctggtgcccactgggaacctgcagttgaggaagaaggtgtttgagaaggacttcggccccatagacccggagtgcacctgccccacgtgccaaaagcacagccgcgccttcctgcacgcactgctgcacagtgacaacacggccgcgctgcaccacctcacggtccacaacatcgcctaccagctgcagctcatgagcgccgtccgcaccagcatcgtggagaagcgcttcccggacttcgtgcgggacttcatgggcgccatgtacggggatcccaccctctgtcccacctgggccactgacgctctggcctctgtgggaatcacactgggctgacctggcattgggagagggagggaggaaggaagggagggaggggctggaagatactgaaggattcctttttgaaaggttttttttattgtaactta

SEQ ID NO: 172854 - DNA, 1502 bp, Homo sapiens
  Payload ID: 13972
  Gene Symbol: QTRT1
  Gene Name: queuine tRNA-ribosyltransferase 1
  Uniprot ID: Q9BXR0
  ENST ID: ENST00000421333
  CDS Start-End: 8-685
agtcaagatggcgggagcagctacccaggcttccctggagtcggccccacggatcatgcggctggtggccgaatgcagccgctccagggcccgggcaggcgagctgtggctgccgcatgggacagtggccactcctgtgttcatgccagtgggcacgcaggccaccatgaagggcatcacgaccgaacagctggacgctctgggttgccgcatctgcctgggcaatacctaccatctgggtctaaggccgggacccgagctgatccagaaagccaacggtctccacggcttcatgaattggcctcataatctgctaacggacagcggcggtttccagatggtgtcgctggtgtctctgtccgaggtgacggaggagggcgtccgcttccgctccccctacgacggcaatgagaccctgctgagcccggagaaatccgtgcagatccagaatgcgctgggctcggacatcatcatgcagctggacgacgtggttagcagtactgtgactgggccacgtgtggaggaggccatgtacaggcccctggggcttgtgactggggccctgttgcaggtcaatccgctggctggaccggtgcattgcagcccatcagcggccggacaagcagaacctcttcgccattatccagggtgggctggacgcagatctccgggccacctgccttgaagagatgaccaagcgagacgtgcctggcttcgccatcgggggcctgagcgggggtgagagcaagtcgcagttctggcggatggtggcgctgagcacctctcggctgccgaaggacaagccccgatatctgatgggggttgggtatgttgtggatagggaagccagagccctacctgtgggaagtggattcctggggaccccctaccctgcttggggaggtggcatttgggggaaacggacacaggtctgatctgaggagactaggaagacatggctgtcccttgggggccattctgagggaatatggcccagtctggggcagtgtgagggttgggaggggccctgggaagcccctgaggttctctgccccctcccgtcatggctgcaaccccagctatgccactgatctggtagtctgcgtggctcttggatgtgacatgttcgactgcgtcttccccacacggacagcgcgctttggctctgccctggtgcccactgggaacctgcagttgaggaagaaggtgtttgagaaggacttcggccccatagacccggagtgcacctgccccacgtgccaaaagcacagccgcgccttcctgcacgcactgctgcacagtgacaacacggccgcgctgcaccacctcacggtccacaacatcgcctaccagctgcagctcatgagcgccgtccgcaccagcatcgtggagaagcgcttcccggacttcgtgcgggacttcatgggcgccatagtgtgtctgtgtcttcttgaggaagtggcctgtctgggtccccctcccagtctgagcgtcattgcagt

SEQ ID NO: 172855 - DNA, 994 bp, Homo sapiens
  Payload ID: 13972
  Gene Symbol: QTRT1
  Gene Name: queuine tRNA-ribosyltransferase 1
  ENST ID: ENST00000587599
  CDS Start-End: 1-610
gggagcagctacccaggcttccctggagtcggccccacggatcatgcggctggtggccgaatgcagccgctccagggcccgggcaggcgagctgtggctgccgcatgggacagtggccactcctgtgttcatgccagtgggcacgcaggccaccatgaagggcatcacgaccgaacagctggacgctctgggttgccgcatctgcctgggcaatacctaccatctgggtctaaggccgggacccgagctgatccagaaagccaacggtctccacggcttcatgaattggcctcataatctgctaacggacagcggcggtttccagatggtgtcgctggtgtctctgtccgaggtgacggaggagggcgtccgcttccgctccccctacgacggcaatgagaccctgctgagcccggagaaatccgtgcagatccagaatgcgctggccttgctctgtcatccaggctggagtgcagtggcacaatcttggctcactgctacctctgtctcccagattcaagctattctcctgtctctgccttccaagcagctgggaatacaggctcggacatcatcatgcagctggacgacgtggttagcagtactgtgactgggccacgtgtggaggaggccatgtacaggtcaatccgctggctggaccggtgcattgcagcccatcagcggccggacaagcagaacctcttcgccattatccagggtgggctggacgcagatctccgggccacctgccttgaagagatgaccaagcgagacgtgcctggcttcgccatcgggggcctgagcgggggtgagagcaagtcgcagttctggcggatggtggcgctgagcacctctcggctgccgaaggacaagccccgatatctgatgggggttgggtatgttgtggatagggaagccagagccctacctgtgggaagtggattcctggggaccccctaccctgcttggggaggtggcatttgggggaaacgga

SEQ ID NO: 172856 - DNA, 500 bp, Homo sapiens
  Payload ID: 13972
  Gene Symbol: QTRT1
  Gene Name: queuine tRNA-ribosyltransferase 1
  ENST ID: ENST00000592376
  CDS Start-End: 1-411
gatctggtagtctgcgtggctcttggatgtgacatgttcgactgcgtcttccccacacggacagcgcgctttggctctgccctggtgcccactgggaacctgcagttgaggaagaaggtgtttgagaaggacttcggccccatagacccggagtgcacctgccccacgtgccaaaagcacagccgcgccttcctgcacgcactgctgcacagtgacaacacggccgcgctgcaccacctcacggtccacaacatcgcctaccagctcatgagcgccgtccgcaccagcatcgtggagaagcgcttcccggacttcgtgcgggacttcatgggcgccatgtacggggatcccaccctctgtcccacctgggccactgacgctctggcctctgtgggaatcacactgggctgacctggcattgggagagggagggaggaaggaagggagggaggggctggaagatactgaaggattcctttttgaaaggttttttttattgt

SEQ ID NO: 172857 - DNA, 370 bp, Homo sapiens
  Payload ID: 13972
  Gene Symbol: QTRT1
  Gene Name: queuine tRNA-ribosyltransferase 1
  ENST ID: ENST00000591643
  CDS Start-End: 1-370
ggacatcatcatgcagctggacgacgtggttagcagtactgtgactgggccacgtgtggaggaggccatgtacaggtcaatccgctggctggaccggtgcattgcagcccatcagcggccggacaagcagaacctcttcgccattatccagggtgggctggacgcagatctccgggccacctgccttgaaggtcctcagagcgaaagtctaaaatccagaacattggccgggtaccatagctcacacctgaatcccagcactttaggaggccaagagatgaccaagcgagacgtgcctggcttcgccatcgggggcctgagcgggggtgagagcaagtcgcagttctggcggatggtggcgctgagcacc

SEQ ID NO: 172858 - DNA, 539 bp, Homo sapiens
  Payload ID: 13972
  Gene Symbol: QTRT1
  Gene Name: queuine tRNA-ribosyltransferase 1
  ENST ID: ENST00000592254
  CDS Start-End: 1-539
cagctacccaggcttccctggagtcggccccacggatcatgcggctggtggccgaatgcagccgctccagggcccgggcaggcgagctgtggctgccgcatgggacagtggccactcctgtgttcatgccagtgggcacgcaggccaccatgaagggcatcacgaccgaacagctggacgctctgggttgccgcatctgcctgggcaatacctaccatctgggtctaaggccgggacccgagctgatccagaaagccaacggtctccacggcttcatgaattggcctcataatctgctaacggtgacggaggagggcgtccgcttccgctccccctacgacggcaatgagaccctgctgagcccggagaaatccgtgcagatccagaatgcgctgggctcggacatcatcatgcagctggacgacgtggttagcagtactgtgactgggccacgtgtggaggaggccatgtacaggtcaatccgctggctggaccggtgcattgcagcccatcagcggccggacaagcagaacctcttc

SEQ ID NO: 172859 - DNA, 4023 bp, Homo sapiens
  Payload ID: 13973
  Gene Symbol: QTRTD1
  Gene Name: queuine tRNA-ribosyltransferase domain containing 1
  Uniprot ID: Q9H974
  ENST ID: ENST00000281273
  CDS Start-End: 258-1505
agtactccctgattggctctgcactggaggcagtgattttggggcagagaattttgcaacacgtggtagtgaactgtgaggagtttgaggggtctgaagactgaaagagtcgaatggtttgttggcagggtgtcctggtggattggtttctgtaagttcagattctcataaatcgtgtgagcgtcgccgacacctctgagataaaagggcccctttcgactagcctctgctgaaaggacctagaagaatcccttaggatgaagctgagtcttaccaaggtagttaatggctgtcgcctaggaaaaataaaaaacctgggcaaaacaggggaccacaccatggatattccaggctgccttctgtataccaagactggctccgccccacacctcacccatcacacgctgcataatatccacggggttcctgccatggctcagcttacgctgtcatccctagcagaacatcatgaagtcttgacagaatataaagaaggagttggaaagtttataggcatgccagaatcactcttgtactgctccctgcacgatccagtcagcccctgcccggctggttatgtaacaaacaagtctgtgtctgtgtggagtgttgcaggacgagtggaaatgactgtttccaagttcatggcaattcagaaggcccttcagccagactggttccagtgcctctccgatggagaagtatcttgtaaggaagcaacttccataaaaagggtcagaaagtctgttgaccgatcacttcttttcttggataactgtctgcggctgcaggaagagtcagaggttcttcagaagagtgtgatcattggagtgattgaaggtggagatgtgatggaagagaggctgaggtcagcacgagagacagccaagcggcctgtgggtggcttccttctggatggttttcaaggaaatccaacaaccctggaggctagactacgcttgctgtcatcagtcactgcagagctgccggaggacaagccaaggctcatatctggtgttagtcggccagatgaggtgctcgagtgtattgaaagaggagtggacttatttgagagttttttcccttatcaagtaacagagcggggatgtgccctgactttcagttttgattaccagccgaatcctgaagagacactactacaacaaaatggaacacaagaagaaataaaatgtatggatcaaataaagaaaattgaaacaactggttgcaaccaagaaataacatcatttgaaattaatctgaaggaaaaaaagtaccaggaggactttaacccgctggtgagaggatgttcctgttactgctgtaagaatcacactcgggcatacatccaccatctgctggtgaccaatgagctgctggccggagtcctgcttatgatgcacaactttgaacactactttgggtttttccattacatccgggaagcactaaaaagtgacaaactggcacagttgaaagagctcatccacaggcaagcatcttgagatcttgcaaatacaagtctcactcttcacactgagcctgtaccactgttgtaacatgggaagacgtgaagaagaaataatctgagctttaattatttatatttggatataaggtctgcttaaataaagaatctttgtaccaaactgcccacatgagggtgaagagatttcctcaaaagacttaaatgacctggattgatcagagagaattgaactgtgacctttaagacttctagactaattcttttagttgatagagattcatttagtcaaagacaaaagctttaactgtgagggcacagccttgaagtgggagtgatgagattctgagggacccatgaattggattgaggcttgaggggaaatggtgtgagacgaatgggctctggacatatgcctgttgatttgagaagaaatctggctggtttgagggtttcctttagttcaccctcatactctcaggagactcttctggatacttttgtcttccaccctgccctggcagtgcagccaatcagaaatggctcttgtgacttaactgggcttggatatccctggaatgtggggcttgaacattgctcctgtgatgatcatctgtcccaggtcacactccttcatttgaccacatggcctatttgcaacttctttttagagccaatgtaattgcctgttaggagccagaagtttgcccagctgctttcttctggttgtacagatccattgtggtctgccttccaggctcattaatagtctaactacgtaataactgaagacctatctcttgtgaagattcattctcaatgtgttcacttggacagagccctgcctggcctaacgattagagggttagtctccatcctgctcagatatgactcctgggcaattcacttaacttctccatggctgcttcctgctgaataaatagggacaggcataatggataggaatgaatgaacttttaagatactgtctagctctaaaattggaagaacaaaaagttttagattagagtcatagccttaatagccctagttgtcatcctgggagacaggcaacagtagagatatttgagagcctaaagagaggtttggcctgtgggtttttaagtggttattgaattggtatcaggagatcctgaggctggtaggggaaggtaattctttctaagttacctctgtatttttcaagttttctataaggaatacacatacacccacatgcacacaccatagtttttatacaaacagcaataacaaaaccaaaaagatgcccctttttttgtagggataagaaatacatttgttttatacttctatgctatattttgctattcaaaatttagtgggcattacttaacattgtttctaattattttgtggctgctgtatgttttatgtgttgggagcccattgtattaggccgttcttggattgctataaagaaatacctgagactgggtaatttggttttttggttttttggggttttttttgagacggagccttgctctgtcgcccaggctggagtgcagtggcgcgatctcggctctatgcaacctccacctcctgggttcatgccattctcctgcctcagcctcccgagtagctgggactacaggcgcccgccaccatgcctggctaattttttatatttttagtagagatggggtttcaccgtatgagccaggatggtctcgatctcctgacctcatgatccacaagactgggtaatctgtaaagaaaagaggtttaattggctcatggctctgcaggctttacaggaagcatggtactggcatctgcttggtttctggggaggcctccggaagcttatagtcatgacagaaggtgaagggggagcaggcacatcacatgacaaaagcaggaacaagactcagagcaagaagtcacttatcaccaaggggatggcccaggccattcatgagggatccacctttgtgctccaaacacctcccaccaggccccacctccagtattggggattacatttcaacttgaggtttgggcgggaacaaatagtcaaattatattacccatctacatggttttctttttcttagtatgggagtgtccatgaataaattcatgggcatcctcataactcttccatgaatggcaaggggtacttatggaaaacagttttccaaagatctgattgttttgaaatgtgttagattggacttgttcaaatgttcatatttttgttctatgctaaatgcatcgttaggggagtagtggtaaatattccagaatccatatgaaattcatgagtttatttatgtctaaaacactgaaaactgtgtccaatatcgttcagtttcctgggtctttttcttattagcacatttgagaaaaatattcctttcctttattgtagtaaatctattaaaggcaatagccaataaaacatttttaattttaaaaatttactgtgtttggctttctgtaaatgtagtaggtctgttaaacaaaatattaaatttccatagtaccagaaa

SEQ ID NO: 172860 - DNA, 1196 bp, Homo sapiens
  Payload ID: 13973
  Gene Symbol: QTRTD1
  Gene Name: queuine tRNA-ribosyltransferase domain containing 1
  Uniprot ID: Q9H974
  ENST ID: ENST00000479882
  CDS Start-End: 243-1121
gcactggaggcagtgattttggggcagagaattttgcaacacgtggtagtgaactgtgaggagtttgaggggtctgaagactgaaagagtcgaatggtttgttggcaggacctagaagaatcccttaggatgaagctgagtcttaccaagagcagaacatcatgaagtcttgacagaatataaagaaggagttggaaagtttatagtctgtgtctgtgtggagtgttgcaggacgagtggaaatgactgtttccaagttcatggcaattcagaaggcccttcagccagactggttccagtgcctctccgatggagaagtatcttgtaaggaagcaacttccataaaaagggtcagaaagtctgttgaccgatcacttcttttcttggataactgtctgcggctgcaggaagagtcagaggttcttcagaagagtgtgatcattggagtgattgaaggtggagatgtgatggaagagaggctgaggtcagcacgagagacagccaagcggcctgtgggtggcttccttctggatggttttcaaggaaatccaacaaccctggaggctagactacgcttgctgtcatcagtcactgcagagctgccggaggacaagccaaggctcatatctggtgttagtcggccagatgaggtgctcgagtgtattgaaagaggagtggacttatttgagagttttttcccttatcaagtaacagagcggggatgtgccctgactttcagttttgattaccagccgaatcctgaagagacactactacaacaaaatggaacacaagaagaaataaaatgtatggatcaaataaagaaaattgaaacaactggttgcaaccaagaaataacatcatttgaaattaatctgaaggaaaaaaagtaccaggaggactttaacccgctggtgagaggatgttcctgttactgctgtaagaatcacactcgggcatacatccaccatctgctggtgaccaatgagctgctggccggagtcctgcttatgatgcacaactttgaacactactttgggtttttccattacatccgggaagcactaaaaagtgacaaactggcacagttgaaagagctcatccacaggcaagcatcttgagatcttgcaaatacaagtctcactcttcacactgagcctgtaccactgttgtaacatgggaagacgtgaagaaga

SEQ ID NO: 172861 - DNA, 881 bp, Homo sapiens
  Payload ID: 13973
  Gene Symbol: QTRTD1
  Gene Name: queuine tRNA-ribosyltransferase domain containing 1
  ENST ID: ENST00000462966
  CDS Start-End: 1-30
tttgaaattaatctgaaggaaaaaaaatgaatttgtagacttcgtcttgtcagaagactggagccaggtaccaggaggactttaacccgctggtgagaggatgttcctgttactgctgtaagaatcacactcgggcatacatccaccatctgctggtgaccaatgagctgctggccggagtcctgcttatgatgcacaactttgaacactactttgggtttttccattacatccgggaagcactaaaaagtgacaaactggcacagttgaaagagctcatccacaggcaagcatcttgagatcttgcaaatacaagtctcactcttcacactgagcctgtaccactgttgtaacatgggaagacgtgaagaagaaataatctgagctttaattatttatatttggatataaggtctgcttaaataaagaatctttgtaccaaactgcccacatgagggtgaagagatttcctcaaaagacttaaatgacctggattgatcagagagaattgaactgtgacctttaagacttctagactaattcttttagttgatagagattcatttagtcaaagacaaaagctttaactgtgagggcacagccttgaagtgggagtgatgagattctgagggacccatgaattggattgaggcttgaggggaaatggtgtgagacgaatgggctctggacatatgcctgttgatttgagaagaaatctggctggtttgagggtttcctttagttcaccctcatactctcaggagactcttctggatacttttgtcttccaccctgccctggcagtgcagccaatcagaaatggctcttgtgacttaactgggcttggatatccctggaatgtggggcttgaacattgctcc

SEQ ID NO: 172862 - DNA, 1046 bp, Homo sapiens
  Payload ID: 13973
  Gene Symbol: QTRTD1
  Gene Name: queuine tRNA-ribosyltransferase domain containing 1
  Uniprot ID: Q9H974
  ENST ID: ENST00000493014
  CDS Start-End: 69-998
agagaattttgcaacacgtggtagtgaactgtgaggagtttgaggggtctgaagactgaaagagtcgaatggtttgttggcagtctgtgtctgtgtggagtgttgcaggacgagtggaaatgactgtttccaagttcatggcaattcagaaggcccttcagccagactggttccagtgcctctccgatggagaagtatcttgtaaggaagcaacttccataaaaagggtcagaaagtctgttgaccgatcacttcttttcttggataactgtctgcggctgcaggaagagtcagaggttcttcagaagagtgtgatcattggagtgattgaaggtggagatgtgatggaagagaggctgaggtcagcacgagagacagccaagcggcctgtgggtggcttccttctggatggttttcaaggaaatccaacaaccctggaggctagactacgcttgctgtcatcagtcactgcagagctgccggaggacaagccaaggctcatatctggtgttagtcggccagatgaggtgctcgagtgtattgaaagaggagtggacttatttgagagttttttcccttatcaagtaacagagcggggatgtgccctgactttcagttttgattaccagccgaatcctgaagagacactactacaacaaaatggaacacaagaagaaataaaatgtatggatcaaataaagaaaattgaaacaactggttgcaaccaagaaataacatcatttgaaattaatctgaaggaaaaaaagtaccaggaggactttaacccgctggtgagaggatgttcctgttactgctgtaagaatcacactcgggcatacatccaccatctgctggtgaccaatgagctgctggccggagtcctgcttatgatgcacaactttgaacactactttgggtttttccattacatccgggaagcactaaaaagtgacaaactggcacagttgaaagagctcatccacaggcaagcatcttgagatcttgcaaatacaagtctcactcttcacactgagcctgtaccactg

SEQ ID NO: 172863 - DNA, 449 bp, Homo sapiens
  Payload ID: 13973
  Gene Symbol: QTRTD1
  Gene Name: queuine tRNA-ribosyltransferase domain containing 1
  ENST ID: ENST00000482307
  CDS Start-End: 15-449
aagaatcccttaggatgaagctgagtcttaccaaggtagttaatggctgtcgcctaggaaaaataaaaaacctgggcaaaacaggggaccacaccatggatattccaggctgccttctgtataccaagactggctccgccccacacctcacccatcacacgctgcataatatccacggggttcctgccatggctcagcttacgctgtcatccctagcagaacatcatgaagtcttgacagaatataaagaaggagttggaaagtttataggcatgccagaatcactcttgtactgctccctgcacgatccagtcagcccctgcccggctggttatgtaacaaacaaggttcttcagaagagtgtgatcattggagtgattgaaggtggagatgtgatggaagagaggctgaggtcagcacgagagacagccaagcggcctgtgggtggc

SEQ ID NO: 172864 - DNA, 3844 bp, Homo sapiens
  Payload ID: 13973
  Gene Symbol: QTRTD1
  Gene Name: queuine tRNA-ribosyltransferase domain containing 1
  Uniprot ID: Q9H974
  ENST ID: ENST00000485050
  CDS Start-End: 116-1399
gcagtactccctgattggctctgcactggaggcagtgattttggggcagagaattttgcaacacgtggtagtgaactgtgaggagtttgaggggtctgaagactgaaagagtcgaatggtttgttggcaggacctagaagaatcccttaggatgaagctgagtcttaccaaggtagttaatggctgtcgcctaggaaaaataaaaaacctgggcaaaacaggggaccacaccatggatattccaggctgccttctgtataccaagactggctccgccccacacctcacccatcacacgctgcataatatccacggggttcctgccatggctcagcttacgctgtcatccctagcagaacatcatgaagtcttgacagaatataaagaaggagttggaaagtttataggcatgccagaatcactcttgtactgctccctgcacgatccagtcagcccctgcccggctggttatgtaacaaacaagtctgtgtctgtgtggagtgttgcaggacgagtggaaatgactgtttccaagttcatggcaattcagaaggcccttcagccagactggttccagtgcctctccgatggagaagtatcttgtaaggaagcaacttccataaaaagggtcagaaagtctgttgaccgatcacttcttttcttggataactgtctgcggctgcaggaagagtcagaggttcttcagaagagtgtgatcattggagtgattgaaggtggagatgtgatggaagagaggctgaggtcagcacgagagacagccaagcggcctgtgggtggcttccttctggatggttttcaaggaaatccaacaaccctggaggctagactacgcttgctgtcatcagtcactgcagagctgccggaggacaagccaaggctcatatctggtgttagtcggccagatgaggtgctcgagtgtattgaaagaggagtggacttatttgagagttttttcccttatcaagtaacagagcggggatgtgccctgactttcagttttgattaccagccgaatcctgaagagacactactacaacaaaatggaacacaagaagaaataaaatgtatggatcaaataaagaaaattgaaacaactggttgcaaccaagaaataacatcatttgaaattaatctgaaggaaaaaaagtaccaggaggactttaacccgctggtgagaggatgttcctgttactgctgtaagaatcacactcgggcatacatccaccatctgctggtgaccaatgagctgctggccggagtcctgcttatgatgcacaactttgaacactactttgggtttttccattacatccgggaagcactaaaaagtgacaaactggcacagttgaaagagctcatccacaggcaagcatcttgagatcttgcaaatacaagtctcactcttcacactgagcctgtaccactgttgtaacatgggaagacgtgaagaagaaataatctgagctttaattatttatatttggatataaggtctgcttaaataaagaatctttgtaccaaactgcccacatgagggtgaagagatttcctcaaaagacttaaatgacctggattgatcagagagaattgaactgtgacctttaagacttctagactaattcttttagttgatagagattcatttagtcaaagacaaaagctttaactgtgagggcacagccttgaagtgggagtgatgagattctgagggacccatgaattggattgaggcttgaggggaaatggtgtgagacgaatgggctctggacatatgcctgttgatttgagaagaaatctggctggtttgagggtttcctttagttcaccctcatactctcaggagactcttctggatacttttgtcttccaccctgccctggcagtgcagccaatcagaaatggctcttgtgacttaactgggcttggatatccctggaatgtggggcttgaacattgctcctgtgatgatcatctgtcccaggtcacactccttcatttgaccacatggcctatttgcaacttctttttagagccaatgtaattgcctgttaggagccagaagtttgcccagctgctttcttctggttgtacagatccattgtggtctgccttccaggctcattaatagtctaactacgtaataactgaagacctatctcttgtgaagattcattctcaatgtgttcacttggacagagccctgcctggcctaacgattagagggttagtctccatcctgctcagatatgactcctgggcaattcacttaacttctccatggctgcttcctgctgaataaatagggacaggcataatggataggaatgaatgaacttttaagatactgtctagctctaaaattggaagaacaaaaagttttagattagagtcatagccttaatagccctagttgtcatcctgggagacaggcaacagtagagatatttgagagcctaaagagaggtttggcctgtgggtttttaagtggttattgaattggtatcaggagatcctgaggctggtaggggaaggtaattctttctaagttacctctgtatttttcaagttttctataaggaatacacatacacccacatgcacacaccatagtttttatacaaacagcaataacaaaaccaaaaagatgcccctttttttgtagggataagaaatacatttgttttatacttctatgctatattttgctattcaaaatttagtgggcattacttaacattgtttctaattattttgtggctgctgtatgttttatgtgttgggagcccattgtattaggccgttcttggattgctataaagaaatacctgagactgggtaatttggttttttggttttttggggttttttttgagacggagccttgctctgtcgcccaggctggagtgcagtggcgcgatctcggctctatgcaacctccacctcctgggttcatgccattctcctgcctcagcctcccgagtagctgggactacaggcgcccgccaccatgcctggctaattttttatatttttagtagagatggggtttcaccgtatgagccaggatggtctcgatctcctgacctcatgatccacaagactgggtaatctgtaaagaaaagaggtttaattggctcatggctctgcaggctttacaggaagcatggtactggcatctgcttggtttctggggaggcctccggaagcttatagtcatgacagaaggtgaagggggagcaggcacatcacatgacaaaagcaggaacaagactcagagcaagaagtcacttatcaccaaggggatggcccaggccattcatgagggatccacctttgtgctccaaacacctcccaccaggccccacctccagtattggggattacatttcaacttgaggtttgggcgggaacaaatagtcaaattatattacccatctacatggttttctttttcttagtatgggagtgtccatgaataaattcatgggcatcctcataactcttccatgaatggcaaggggtacttatggaaaacagttttccaaagatctgattgttttgaaatgtgttagattggacttgttcaaatgttcatatttttgttctatgctaaatgcatcgttaggggagtagtggtaaatattccagaatccatatgaaattcatgagtttatttatgtctaaaacactgaaaactgtgtccaatatcgttcagtttcctgggtctttttcttattagcacatttgagaaaaatattcctttcctttattgtagtaaatctattaaaggcaatagccaataaaacatttttaattttaaaaa

SEQ ID NO: 172865 - DNA, 680 bp, Homo sapiens
  Payload ID: 13973
  Gene Symbol: QTRTD1
  Gene Name: queuine tRNA-ribosyltransferase domain containing 1
  ENST ID: ENST00000472599
  CDS Start-End: 180-680
gtgcactcagagagacattctgaagggaaccctgcaagttgcctgttgttgttcttcccaggggaggactgagcatacaaccactgcttcccaagggaggcttttcccacaaagggggcacagcagtctcctgagagagagaaacatgttatagctcaactatttaaaggactgtgctgatgaaatccaacatttatgaggacctagaagaatcccttaggatgaagctgagtcttaccaaggtagttaatggctgtcgcctaggaaaaataaaaaacctgggcaaaacaggggaccacaccatggatattccaggctgccttctgtataccaagactggctccgccccacacctcacccatcacacgctgcataatatccacggggttcctgccatggctcagcttacgctgtcatccctagcagaacatcatgaagtcttgacagaatataaagaaggagttggaaagtttataggcatgccagaatcactcttgtactgctccctgcacgatccagtcagcccctgcccggctggttatgtaacaaacaagtctgtgtctgtgtggagtgttgcaggacgagtggaaatgactgtttccaagttcatggcaattcagaaggcccttcagccagactggttccagtgcctctccgatggagaagtatcttgtaaggaa

SEQ ID NO: 172866 - DNA, 2519 bp, Homo sapiens
  Payload ID: 13974
  Gene Symbol: QSOX1
  Gene Name: quiescin Q6 sulfhydryl oxidase 1
  Uniprot ID: O00391
  ENST ID: ENST00000367600
  CDS Start-End: 12-1826
cagcgccgaggatgaggaggtgcaacagcggctccgggccgccgccgtcgctgctgctgctgctgctgtggctgctcgcggttcccggcgctaacgcggccccgcggtcggcgctctattcgccttccgacccgctgacgctgctgcaggcggacacggtgcgcggcgcggtgctgggctcccgcagcgcctgggccgtggagttcttcgcctcctggtgcggccactgcatcgccttcgccccgacgtggaaggcgctggccgaagacgtcaaagcctggaggccggccctgtatctcgccgccctggactgtgctgaggagaccaacagtgcagtctgcagagacttcaacatccctggcttcccgactgtgaggttcttcaaggcctttaccaagaacggctcgggagcagtatttccagtggctggtgctgacgtgcagacactgcgggagaggctcattgacgccctggagtcccatcatgacacgtggcccccagcctgtcccccactggagcctgccaagctggaggagattgatggattctttgcgagaaataacgaagagtacctggctctgatctttgaaaagggaggctcctacctgggtagagaggtggctctggacctgtcccagcacaaaggcgtggcggtgcgcagggtgctgaacacagaggccaatgtggtgagaaagtttggtgtcaccgacttcccctcttgctacctgctgttccggaatggctctgtctcccgagtccccgtgctcatggaatccaggtccttctataccgcttacctgcagagactctctgggctcaccagggaggctgcccagaccacagttgcaccaaccactgctaacaagatagctcccactgtttggaaattggcagatcgctccaagatctacatggctgacctggaatctgcactgcactacatcctgcggatagaagtgggcaggttcccggtcctggaagggcagcgcctggtggccctgaaaaagtttgtggcagtgctggccaagtatttccctggccggcccttagtccagaacttcctgcactccgtgaatgaatggctcaagaggcagaagagaaataaaattccctacagtttctttaaaactgccctggacgacaggaaagagggtgccgttcttgccaagaaggtgaactggattggctgccaggggagtgagccgcatttccggggctttccctgctccctgtgggtcctcttccacttcttgactgtgcaggcagctcggcaaaatgtagaccactcacaggaagcagccaaggccaaggaggtcctcccagccatccgaggctacgtgcactacttcttcggctgccgagactgcgctagccacttcgagcagatggctgctgcctccatgcaccgggtggggagtcccaacgccgctgtcctctggctctggtctagccacaacagggtcaatgctcgccttgcaggtgcccccagcgaggacccccagttccccaaggtgcagtggccaccccgtgaactttgttctgcctgccacaatgaacgcctggatgtgcccgtgtgggacgtggaagccaccctcaacttcctcaaggcccacttctccccaagcaacatcatcctggacttccctgcagctgggtcagctgcccggagggatgtgcagaatgtggcagccgccccagagctggcgatgggagccctggagctggaaagccggaattcaactctggaccctgggaagcctgagatgatgaagtcccccacaaacaccaccccacatgtgccggctgagggacctgagcttatttgaagtcctgcctcattctcactggagcctcagtctctcctgcttggtcttggccctcaactggggcaagtgaagccagaggagggtcccccagctgggtgggctggaatggaactcctcactagctgctggggctccgcccaccctgctcccttccggacaatgaagaagcctttgcaccctgggaggaaggaccaccccgggccctctatgcctggccagcctccagctcctcagacctcctgggtggggtttggcttcagggtggggtttggaagcttctggaagtcgtgctggtctcccaggtgaggcaagccatggttgctgggctgtagggtgagtggcttgcttggtgggacctgacgagttggtggcatgggaaggatgtgggtctctagtgccttgccctggcttagctgcaggagaagatggctgctttcacttccccccattgagctctgctccctctgagcctggtcttttgtccttttttattttggtctccaagatgaatgctcatctttggagggtgccaggtagaagctagggaggggagtgtcttctctctccaggtttcaccttccagtgtgcagaagttagaagggtctggcgggggcagtgccttacacatgcttgattcccacgctaccccctgccttgggaggtgtgtggaataaattatttttgttaaggcaa

SEQ ID NO: 172867 - DNA, 9311 bp, Homo sapiens
  Payload ID: 13974
  Gene Symbol: QSOX1
  Gene Name: quiescin Q6 sulfhydryl oxidase 1
  Uniprot ID: O00391
  ENST ID: ENST00000367602
  CDS Start-End: 75-2318
gaggcaggcggtgccgcggcgccgggacccgactcatccggtgcttgcgtgtggtggtgagcgcagcgccgaggatgaggaggtgcaacagcggctccgggccgccgccgtcgctgctgctgctgctgctgtggctgctcgcggttcccggcgctaacgcggccccgcggtcggcgctctattcgccttccgacccgctgacgctgctgcaggcggacacggtgcgcggcgcggtgctgggctcccgcagcgcctgggccgtggagttcttcgcctcctggtgcggccactgcatcgccttcgccccgacgtggaaggcgctggccgaagacgtcaaagcctggaggccggccctgtatctcgccgccctggactgtgctgaggagaccaacagtgcagtctgcagagacttcaacatccctggcttcccgactgtgaggttcttcaaggcctttaccaagaacggctcgggagcagtatttccagtggctggtgctgacgtgcagacactgcgggagaggctcattgacgccctggagtcccatcatgacacgtggcccccagcctgtcccccactggagcctgccaagctggaggagattgatggattctttgcgagaaataacgaagagtacctggctctgatctttgaaaagggaggctcctacctgggtagagaggtggctctggacctgtcccagcacaaaggcgtggcggtgcgcagggtgctgaacacagaggccaatgtggtgagaaagtttggtgtcaccgacttcccctcttgctacctgctgttccggaatggctctgtctcccgagtccccgtgctcatggaatccaggtccttctataccgcttacctgcagagactctctgggctcaccagggaggctgcccagaccacagttgcaccaaccactgctaacaagatagctcccactgtttggaaattggcagatcgctccaagatctacatggctgacctggaatctgcactgcactacatcctgcggatagaagtgggcaggttcccggtcctggaagggcagcgcctggtggccctgaaaaagtttgtggcagtgctggccaagtatttccctggccggcccttagtccagaacttcctgcactccgtgaatgaatggctcaagaggcagaagagaaataaaattccctacagtttctttaaaactgccctggacgacaggaaagagggtgccgttcttgccaagaaggtgaactggattggctgccaggggagtgagccgcatttccggggctttccctgctccctgtgggtcctcttccacttcttgactgtgcaggcagctcggcaaaatgtagaccactcacaggaagcagccaaggccaaggaggtcctcccagccatccgaggctacgtgcactacttcttcggctgccgagactgcgctagccacttcgagcagatggctgctgcctccatgcaccgggtggggagtcccaacgccgctgtcctctggctctggtctagccacaacagggtcaatgctcgccttgcaggtgcccccagcgaggacccccagttccccaaggtgcagtggccaccccgtgaactttgttctgcctgccacaatgaacgcctggatgtgcccgtgtgggacgtggaagccaccctcaacttcctcaaggcccacttctccccaagcaacatcatcctggacttccctgcagctgggtcagctgcccggagggatgtgcagaatgtggcagccgccccagagctggcgatgggagccctggagctggaaagccggaattcaactctggaccctgggaagcctgagatgatgaagtcccccacaaacaccaccccacatgtgccggctgagggacctgaggcaagtcgacccccgaagctgcaccctggcctcagagctgcaccaggccaggagcctcctgagcacatggcagagcttcagaggaatgagcaggagcagccgcttgggcagtggcacttgagcaagcgagacacaggggctgcattgctggctgagtccagggctgagaagaaccgcctctggggccctttggaggtcaggcgcgtgggccgcagctccaagcagctggtcgacatccctgagggccagctggaggcccgagctggacggggccgaggccagtggctgcaggtgctgggagggggcttctcttacctggacatcagcctctgtgtggggctctattccctgtccttcatgggcctgctggccatgtacacctacttccaggccaagataagggccctgaagggccatgctggccaccctgcagcctgaaccacctggggaggaggcgggagagggagctgccatctctaggcacctcaagccccctgaccccattccctcccctcccaccccttgctccttgtctggcctagaagtgtgggaaattcaggaaaacgagttgctccagtgaagcttcttggggttgctaggacagagagctcctttgacacaaaagacaggagcagggtccaggttcccctgctgtgcagggagggcagccccgggcagtgggcatagggcagctcagtccctggcctcttagcaccacattcctgtttttcagcttatttgaagtcctgcctcattctcactggagcctcagtctctcctgcttggtcttggccctcaactggggcaagtgaagccagaggagggtcccccagctgggtgggctggaatggaactcctcactagctgctggggctccgcccaccctgctcccttccggacaatgaagaagcctttgcaccctgggaggaaggaccaccccgggccctctatgcctggccagcctccagctcctcagacctcctgggtggggtttggcttcagggtggggtttggaagcttctggaagtcgtgctggtctcccaggtgaggcaagccatggttgctgggctgtagggtgagtggcttgcttggtgggacctgacgagttggtggcatgggaaggatgtgggtctctagtgccttgccctggcttagctgcaggagaagatggctgctttcacttccccccattgagctctgctccctctgagcctggtcttttgtccttttttattttggtctccaagatgaatgctcatctttggagggtgccaggtagaagctagggaggggagtgtcttctctctccaggtttcaccttccagtgtgcagaagttagaagggtctggcgggggcagtgccttacacatgcttgattcccacgctaccccctgccttgggaggtgtgtggaataaattatttttgttaaggcaagcattggtgtgttctttaacttgctacttggagacctagtgtccagtctggacagaatgcacagagaccagcctcacctggaatgcagccagactcgatgtccctcagcacacacagctcctggccacagactgcccatagaactgtctgcacccaaaccccatggccttttcatgcacggagacaggcctctggatgtgcagccttgccaccccctgccccaatcctccctgagagctcctgcctcagtgccctgggctggtgagggagaagcctgtctgcacctgcctaattccagctcctccaggaagcaagggcttgtttgtcagagctgcagggttggccactcggtggggaggagtcagccaggattagagagcctgcccctaatccggcctgctgggttttacaaggatcagagctgctgataatgaacctcattaagggggagcaggagcctcaatccgatttggttttctctttgacatcttcactctgctcagatggcctgggtgctatgtggagcaggtgggatgccaaggccactcctgctatggggcagctggggctggggagggatggcagtctccctgcatgtttccctcgacctctttagctgcagcgccttgctgggctcctgggttggactccctctctgtgcccctgctccaggcacccattggctccatcctcctggttgtgctctgcaccccctgctcccttgggctggccctggctgggggcctgagagacagacaggaacccacaatcaggaggcaaccctggcctgcaagaggaagacagaggctcccagggccggtgccctgtgtgcccactgcaccaaggccgctgaataagcctgcccttcaccccctaagggctccttgcccaatgccaagtgctggggatttctgtcagcaagccctgtggctccagtgacggtatttctaaagccaaacttagttacctagaattagcgccatgttggaaacactgtcgcagcagcccgggctgcacagtgtgtagcccagcctccaggtccacggagtggtgtggacctcccacctcacagctgcctctggcagccaagcctcttttcgcccggccccagcccctctggttgataaacgggtgggcctcctcagcagcgtggctgcctttcaccttgatttccccagggctctcggcaacatcgataaaccagcctcgcccaccagctgggccctcccccacccagtctgccaggctgggagctggagcttgctgagtcttgaatgcccttctagatggcttctctagaggctctcctggcaagagagggtcccaaggggagccctgcaaagcaaaggctccttgtctggggcgggatagagaatctcgcctctgtctggtgtgttacctactgggggcacaggaacaatttcctcaaggagacagtggcatggagctttgaaagacgagtaggtgttagcaaggaaataaggaggaacgggggttacgggcagaggagaaagcacatgccaagtcagcaaagaaaagtagaattcgaaaactttttaaaaatattactaaggattttcacaatgctgcactgggctagaaactgaagctaaaacagatacgtggtccctgctgctatggggcttccgttctagaggcaaggacaggttgtgatgagggttctgaaggatagagaccaagcagggagggtgttgaggaggcttctgcgagacctgaaggatgggaagccaggaagtgggaggggtgggggtccaggctggaggggcccaatgtaggtgtagagggactacagccctgaggggctgctccatgcggcattcttggaggtccaagaggggcagcgccaccttgggccaggctcctctccagcagccttggtatggggtgggggtgggaagacccctgatgcagcctgtcctctgggtgtgggggtggaggagagggctccaggggacccagccagccttgaccctggaggaaagtcaggtgggctcagagagagccctcaaatctgggccctgggtcagggtggggtcaagtccagccttgaagagaatggactctggaatctgacgtctgggtttgaatccagcttccaacactcactggctgtgtgactttgggcaagataacttatccccttgtccccatgtgtcattggagataaactacccacctaccagattgttgtaccatgctgggcaaacactaagtgcttaataatggtagcccactgctcatgtcgtgtcgtctcctgtcttgatacctgaaaactcaaggggccctgttgtgcttggaggggggtgccgttcccacaggatattctgtgaagggtgtccctggagctgggcctccaggtggcaagccccaagccaccccggcaggtgccactggccagagttgaactgaggtgttgagtggaaagtgcctccccacccccatctgccacagtagtatggatttccttcatgagatggggctcctaaaatgcctgaaatgtgtatgctgttggagaattgatgtgtatgatttattgaactttgcactcatttaaatctcatttaatcctccaacaacgcaagatgaagaagctgaggcttaaagagattaagaaacatcctatcccctttactcccaccaaaataaatacatttgccctattctcccaaatggtgagaggtagatccaggacttgaccccagatcccacccactcaaccctggagctgcagtctctaccccttctaacacatgtgattctgtttcatgtcctgttccatcggtagagttacacactttcctgagactttatatggtggtgctgctgggtgccagcccttcttccctccaacagtggcagtaaccactgttgtgtgttggtgtcaaggagtggggacaccctgaaggaatccgccttttctagagctctcgctccattccctacatcgaggctgaagtgccctgtctcgggtccttgtttttaggcctcgtttgaaggaggggaagaaaccaggttcgttgggcgtgaccttggctcagctcgtctgtgaaattggggccgcagacttagtttgcgggtccctgctaaattcctctccctcttcctgggattcccatccatgtattgccagctacatgtagagtggagaggagaggtttttcctgcagggccttccagagaaaggattcttggccagaggaaatcacagcctataagatcaatatcctgatagaatcccgggccaggtgtgagaggggagagctcactcacaccagcctgacagtcttggggcagagcgccccataggcctctgcagccccatcactgcctcattctccctcaggtgccaaggaagctccagggtgggcccagtatccttccacagcatccctcctcttccccttcaacacccctttcacccctccctccaccacctctgaaaggtgctccttgggcagggcgataggattcccacccctagctttaagaactaaaccaaacttcaagaggagcaatttaatcttcatacctgactccttgtccctcctcaggcatgctgttgtgcaggacagagccctggcttctcctggatgtcacacctggcctgtctctgacccttgctttccctttctctgctgccctcaagggtcattcacacccaagagggtaagaagctgccctctcatcccttcctctcccaccctgggcctctgccctctgcctggccccagcagcacagtcttctccatagagaggggctgggccatgggaccccagttcctggggtctcggtgacacagttcactgtttgctgcagaggaggccccactcgcagccttggcctctgccctgcagaagaattccctgtaactcactcaccaatggccgtgggagccagtggcctcggcgagggtcagttggactgcatagctgccggctgagtctctctggccaccctcactggccccatcactccaggttgcactgctgcccagggggtttgtgccaggcctgggtcacagtggaagagagtctggaaatcacaaggcagaggaggagacctttgccaatgtgagagaacaaagttaaggggcagtccatgggggcattgaccttacttaggtgaggaggactcagggaacatctacagactctagggctagggtgagatcctcctgatagtgctggtagctccagctgctgctttggcaagacttggtcgtctctatactgagagagcaaaagctcttttcctggggctgcatgttcttccataggaaagtgggcttcaggtgctgcctattaaacctcctgcctcccctgctgcagtgctttgatgcctttcacctgtgtctacctgcgaacctctgcccaccacggaagagcagctcacatttggaaggggctaaaatttttacctagtttgaatctgctctgcaatgtccccatcaagttcttaaccatcccgggttccaatggttacagagttctgccctggggagggaggaattgcttagcaaatgatgttgagaatagtgattatttgggggaaaattcaggtaagatctcaccttcataccatataccaaaatacatctcagtagattagtaagctaatgcaaaaaaaaaaaaaaaaggggaaatataattgaatacttcactgtttttgaaagcatgaaaacaatggaaaatgcaactgatgtgagtaatccatctacttgacgtcacttttaagaaataaggccaggcacggtggctcacgcttgtaatcctagcactttgggaggccgaggtgggtggatcacgaggtcaggagtttgagaccagcttggccaacatggtgaaacccccatctctactaaaatattacacaggcattgtggcacacatctgtaatcccagctactcaggaggctgaggcaggagaatcacttgaacctgggaggtggaggttgcagtgagctgagatcgcgccattgcactccagcctgggggacagagcgagactctgtctcaaaaaaataaaaaaataaaaataaaaaaataaagtaaagctacatatttaaaagctggggaaatatatgctgtaaatatgacaaagggctgtgactcttctgcaacacaccattttaagaatgagctaggtctgcatttattgacctgataaaatgtcccaagaaggacacatttttataaacataagttactattgttatatatatgctaacgtttgtctagaaaaagtctagaaaaatacacactgaactgtgaatagcagttatatttagaaagcaacattaggatgaacttaagtcagggcttggactagagcaaggcaagtgaggtgccaggatgcaaaagttaaggagacacctgacctcaggggcccacaactgcagagcccctgacagtgagtgtctcagtagcctcgccctagtcctggctttcacttaaatatgttttcgaatgtttgtaataaaatatttcttttggaaggcaaaaatagcaaggaaaataaataggattaaaggatactaaagcccattcaataaaatttgtaggaggccactgatttggcctaggctcctatgatgtaaccaacagaccaaaccaatatggagtcattcatgctaaatgaaactagttaggagtatattcatataacaagtggctaagtgtcagttacagcctctgagctttagtcaattgtaggtggtcaatagattcagataaggcaatccagttaaactgtatatcccacttgctgttttctgtccctaaattctctctgagtacactgcagccctgaagttctttgaacctgttctgggttctgagggctgtccaattactgaatcatacataaaagccaagtaagattttaaaatttgttataattttggtttttaacaacttctgttgtaaataataaaagcactaaatccctactgaaaataaagggcctaaagactgaa

SEQ ID NO: 172868 - DNA, 1075 bp, Homo sapiens
  Payload ID: 13974
  Gene Symbol: QSOX1
  Gene Name: quiescin Q6 sulfhydryl oxidase 1
  ENST ID: ENST00000392029
  CDS Start-End: 39-506
tccggtgcttgcgtgtggtggtgagcgcagcgccgaggatgaggaggtgcaacagcggctccgggccgccgccgtcgctgctgctgctgctgctgtggctgctcgcggttcccggcgctaacgcggccccgcggtcggcgctctattcgccttccgacccgctgacgctgctgcaggcggacacggtgcgcggcgcggtgctgggctcccgcagcgcctgggccgtggagttcttcgcctcctggtgcggccactgcatcgccttcgccccgacgtggaaggcgctggccgaagacgtcaaagcctggaggccggccctgtatctcgccgccctggactgtgctgaggagaccaacagtgcagtctgcagagacttcaacatccctggcttcccgactgtgaggttcttcaaggcctttaccaagaacggctcgggagcagtatttccaggctggaggagattgatggattctttgcgagaaataacgaagagtacctggctctgatctttgaaaagggaggctcctacctgggtagagaggtggctctggacctgtcccagcacaaaggcgtggcggtgcgcagggtgctgaacacagaggccaatgtggtgagaaagtttggtgtcaccgacttcccctcttgctacctgctgttccggaatggctctgtctcccgagtccccgtgctcatggaatccaggtccttctataccgcttacctgcagagactctctgggctcaccagggaggctgcccagaccacagttgcaccaaccactgctaacaagatagctcccactgtttggaaattggcagatcgctccaagatctacatggctgacctggaatctgcactgcactacatcctgcggatagaagtgggcaggttcccggtcctggaagggcagcgcctggtggccctgaaaaagtttgtggcagtgctggccaagtatttccctggccggcccttagtccagaacttcctgcactccgtgaatgaatggctcaagaggcagaagagaaataaaattccctacagtttctttaaaactgccctggacgacaggaaagag

SEQ ID NO: 172869 - DNA, 893 bp, Homo sapiens
  Payload ID: 13974
  Gene Symbol: QSOX1
  Gene Name: quiescin Q6 sulfhydryl oxidase 1
  ENST ID: ENST00000443059
  CDS Start-End: 1-218
ggaatgagcaggagcagccgcttgggcagtggcacttgagcaagcgagacacaggggctgcattgctggctgagtccagggctgagaagaaccgcctctggggccctttggaggtcaggcgcgtgggccgcagctccaagcagctggtcgacatccctgagggccagctggaggcccgagctggacggggccgaggccagtggctgcagcttatttgaagtcctgcctcattctcactggagcctcagtctctcctgcttggtcttggccctcaactggggcaagtgaagccagaggagggtcccccagctgggtgggctggaatggaactcctcactagctgctggggctccgcccaccctgctcccttccggacaatgaagaagcctttgcaccctgggaggaaggaccaccccgggccctctatgcctggccagcctccagctcctcagacctcctgggtggggtttggcttcagggtggggtttggaagcttctggaagtcgtgctggtctcccaggtgaggcaagccatggttgctgggctgtagggtgagtggcttgcttggtgggacctgacgagttggtggcatgggaaggatgtgggtctctagtgccttgccctggcttagctgcaggagaagatggctgctttcacttccccccattgagctctgctccctctgagcctggtcttttgtccttttttattttggtctccaagatgaatgctcatctttggagggtgccaggtagaagctagggaggggagtgtcttctctctccaggtttcaccttccagtgtgcagaagttagaagggtctggcgggggcagtgccttacacatgcttgattcccacgctaccccctgccttgggaggtgtgtggaataaa

SEQ ID NO: 172870 - DNA, 4530 bp, Homo sapiens
  Payload ID: 13975
  Gene Symbol: QSOX2
  Gene Name: quiescin Q6 sulfhydryl oxidase 2
  Uniprot ID: Q6ZRP7
  ENST ID: ENST00000358701
  CDS Start-End: 39-2135
ccagggtgaaagttcagcgcgccggcggcacttccaacatggcggcggccggggcggcggtggcgcgcagcccgggaatcggagcgggacctgcgctgagagcccggcgctcgcccccgccgcgggccgcacggctgccgcggctgctagtgctgctagcggcggcggcggtggggccgggcgcgggcggtgcggcgcggctgtaccgcgcgggcgaggacgccgtgtgggtgctggacagcggcagcgtgcgcggggccaccgccaacagctcggccgcgtggctcgtgcagttctactcgtcgtggtgtggccactgcatcggctacgcgcccacttggcgggccctggctggggatgtgcgagactgggccagtgccattcgcgtcgcagctctggactgcatggaagagaagaaccaggccgtgtgccatgactacgacatccacttctaccccaccttccggtattttaaagcatttacaaaggagtttacaactggagaaaattttaaaggacctgaccgagagctgcgaacagtcagacagacgatgattgacttcctgcagaaccacacggaaggaagccggccccctgcctgcccgcgcctagaccccattcagcccagtgatgttctttcccttcttgacaaccgtggcagccattacgtggctattgtctttgaaagcaacagctcctaccttggacgggaggtgatcttagacctgatcccgtatgaaagcatcgtggtgacccgagcactggacggggacaaagcatttctggagaaacttggtgtttcttcagtcccttcgtgttacctgatctacccaaatgggtcgcatggattgattaacgtcgtgaagcctctgcgggccttcttttcgtcttatttgaagtcattgccggatgtgaggaaaaaatcgcttcccttgcctgaaaagccacacaaagaagaaaattcagaaatcgtggtttggagagaatttgacaagtcgaagctgtacacggtggacctggagtcagggctacactacctcctgcgggtggagctggcagcccacaagtccctggccggagcagagctgaagacgctcaaggactttgtgactgtcttggccaagctgttccctggacggccgccagtcaagaagctgttggagatgctgcaggagtggctggccagccttcccctggacaggatcccctacaacgccgtgcttgacctggtcaacaacaagatgcggatttctggaatattccttactaatcacataaagtgggttggatgtcaaggaagccgatctgagttgaggggttacccgtgttctctctggaaactgttccacactttgactgttgaagcctcgacccacccagatgcactggttggcacaggctttgaagacgacccccaggctgtgctgcagacaatgaggaggtacgttcacaccttctttgggtgtaaggaatgtggtgagcactttgaggaaatggctaaagaatccatggactcggtgaaaaccccagaccaagccatcctctggctgtggaagaagcataatatggtgaacggccgcctggcaggccatctgagtgaggatccccggtttccaaagcttcagtggcccactccggacctctgcccagcctgccatgaggaaattaagggcctggccagctgggatgaaggccacgtgctcacattcttgaagcagcactatggccgcgacaacctcttagacacgtattccgcagaccagggggattccagtgaaggaggaaccctggccaggggtgaggaagaggagaaaagactcactcccccagaggtgtcccatggagaccgagacacccagagcgtccgtccacctggtgcactgggccccaggcctgcccttccagagagcttgcatcacagcttggacgggaaactccagagtctggatgggcccggggcccacaaggaggtgggcggggccgcacccttcctcggggttgacttctccagcctggacatgagtctctgtgtcgtgctgtacgtggcttcatccctgttcctcatggtgatgtacttcttcttccgggtgaggtccaggcggtggaaggtcaagcaccaccacccggccgtgtgagtgcccgggtgctgccagccacggcggaagctcccttggaggcagccctgccccgtgccacctgcagctttaatatttatgatcagggattttataaacatgcgggcctggtttcacatcggatggcaccttttggcttcaaagtcctggttttacaaacgctcttctaacaagggaagaacacggggtaattttgtggggatatttgcattcctggcgtactcaagtctgttcatgctccttttgcaggtcttacagcaaaaagacttctgtatttttactcttctagatgtgaaaagagggtgcagagtccaggccagatagtcttccccacacactttcatctcgtttcctccactccgccccatcctgcagggccttgtttttgtatttggagaacctcgcccatcccccccgcggctcctggctcccccccactcccctcgctccccctccccccgctccccccacgccccctgctccaggctgccaagtgttttcctttagccgggcggggacagacagagccggaagcgcagtcggcctctgcagcccctccaagcaagtgctccagggactatcctgtgtttgtagctgcttccctagggcaggttcctgagggctctccttgttcctccgggtgttcgacaccagacgtggggatttcaacaggggaggagccaaggaattctgtggctgtgctgcgtttcagaaaataacccccagaggccttgggctgtggacctgggggttggaaggatgggggctcatttaaccctcagaggcagcgcctttgtctgtctatctggtgacaagagagagacaagtaaatgggggccgttgggacggcgggtgcctggagggcagctctgggctcagcgggcagtgcttagagcacaggcccctctgttgggggatggggaggagagcagtctgcccttgggagcgtaggccccagggagacttctaaagccccccctgtcgtctgctcttcacccagcaccacagaggcacctgctgcacacacaagcatctcactcggcccacggagggggccaggcttcctttgcctgaagctgttttgggaagggtctccacacaggcactgatctcccaagcttttgtcatgatgtcttttaccatttgataattttaaacattgtttttaaacccaaaacatttagtggtccgttgcctctgaagatgtaaacaaacaaatacactatttctgggaacatttatattgagattctttgtggctattggtgtgtctcacaggcaaaatttgatttggctaaaataggctcagatgtatttgtgtgcccgtgtgtgtgtgtgtgtgtgtgtgtgtgtgtgtgtgtgtatgagagagagagagactttgacggttgtagatattttttccgctttgcctactttatgttgtataatcatgtgtttactaacaagttgatgacatggatgtattcataagaccatgtaatattgatgtgattgttgtcgcttgagaaaaaaaggcaacagctgattctttcaacaactgtcacagaatggctgggctgagaacgctgcccagggccctgcagctggcgggagaggtgtctggtgggagcggtgtctggtgcgtcagcctgctgcttcgtgtctcactcgagagttgcttctggtttcacactttttaacccctctgtgctttagcagccgtgaccttgccttcattgcttcatccagtgcaggcctgggttattgaagacaccaaagtgtttctcttccagtttgaaaaccaggcaggtttacacgtgggtttcagtgtatttgcctttgaacccttcaaactaaactttagccttttggctggtgttgaatgtctttagctggggtgacctggagtgacctgggacggtgttgtggtttaccgtctccagcttcagcctttccagaaacccttgtggagggcagtgttggctgcaggtttcatcatattgcagtttgaggtcaccactatttggggaacaagcttgcgtcctgctgaggggcaggattttcagcagagcgtcggtggggctgggccgtcgtggaggtggccccaggagtcatatggccatactcagacacaccttgtgtggcctgctcagagctggatgccacctttaggcaatgtttagagtctattttctaaagttttaagtattttaagaggtattgagactaatgaatataatagttcagtaatttaaatgcttatttattttcagtggaaggatttttattaaaaagaagctaattgacatggaaatgtcagtgaaatttcttacctgcaaggaaagtgaacattttgtatttaagtaaactataatgtgcacattttaataaagaaatctgacatttgaaaaaa

SEQ ID NO: 172871 - DNA, 851 bp, Homo sapiens
  Payload ID: 13975
  Gene Symbol: QSOX2
  Gene Name: quiescin Q6 sulfhydryl oxidase 2
  ENST ID: ENST00000455222
  CDS Start-End: 1-851
tggagaaaattttaaaggacctgaccgagagctgcgaacagtcagacagacgatgattgacttcctgcagaaccacacggaaggaagccggccccctgcctgcccgcgcctagaccccattcacgtgaagcctctgcgggccttcttttcgtcttatttgaagtcattgccggatgtgaggaaaaaatcgcttcccttgcctgaaaagccacacaaagaagaaaattcagaaatcgtggtttggagagaatttgacaagtcgaagctgtacacggtggacctggagtcagggctacactacctcctgcgggtggagctggcagcccacaagtccctggccggagcagagctgaagacgctcaaggactttgtgactgtcttggccaagctgttccctggacggccgccagtcaagaagctgttggagatgctgcaggagtggctggccagccttcccctggacaggatcccctacaacgccgtgcttgacctggtcaacaacaagatgcggatttctggaatattccttactaatcacataaagtgggttggatgtcaaggaagccgatctgagttgaggggttacccgtgttctctctggaaactgttccacactttgactgttgaagcctcgacccacccagatgcactggttggcacaggctttgaagacgacccccaggctgtgctgcagacaatgaggaggtacgttcacaccttctttgggtgtaaggaatgtggtgagcactttgaggaaatggctaaagaatccatggactcggtgaaaaccccagaccaagccatcctctggctgtggaagaagcataatatggtgaacggccgcctggcag

SEQ ID NO: 172872 - DNA, 4518 bp, Homo sapiens
  Payload ID: 13975
  Gene Symbol: QSOX2
  Gene Name: quiescin Q6 sulfhydryl oxidase 2
  ENST ID: ENST00000616829
  CDS Start-End: 39-2129
ccagggtgaaagttcagcgcgccggcggcacttccaacatggcggcggccggggcggcggtggcgcgcagcccgggaatcggagcgggacctgcgctgagagcccggcgctcgcccccgccgcgggccgcacggctgccgcggctgctagtgctgctagcggcggcggcggtggggccgggcgcgggcggtgcggcgcggctgtaccgcgcgggcgaggacgccgtgtgggtgctggacagcggcagcgtgcgcggggccaccgccaacagctcggccgcgtggctcgtgcagttctactcgtcgtggtgtggccactgcatcggctacgcgcccacttggcgggccctggctggggatgtgcgagactgggccagtgccattcgcgtcgcagctctggactgcatggaagagaagaaccaggccgtgtgccatgactacgacatccacttctaccccaccttccggtattttaaagcatttacaaaggagtttacaactggagaaaattttaaaggacctgaccgagagctgcgaacagtcagacagacgatgattgacttcctgcagaaccacacggaaggaagccggccccctgcctgcccgcgcctagaccccattcagcccagtgatgttctttcccttcttgacaaccgtggcagccattacgtggctattgtctttgaaagcaacagctcctaccttggacgggaggtgatcttagacctgatcccgtatgaaagcatcgtggtgacccgagcactggacggggacaaagcatttctggagaaacttggtgtttcttcagtcccttcgtgttacctgatctacccaaatgggtcgcatggattgattaacgtcgtgaagcctctgcgggccttcttttcgtcttatttgaagtcattgccggatgtgaggaaaaaatcgcttcccttgcctgaaaagccacacaaagaagaaaattcagaaatcgtggtttggagagaatttgacaagtcgaagctgtacacggtggacctggagtcagggctacactacctcctgcgggtggagctggcagcccacaagtccctggccggagcagagctgaagacgctcaaggacttttgtcttggccaagctgttccctggacggccgccgtcaagaagctgttggagatgctgcaggagtggctggccagccttcccctggacaggatcccctacaacgccgtgcttgacctggtcaacaacaagatgcggatttctggaatattccttactaatcacataaagtgggttggatgtcaaggaagccgatctgagttgaggggttacccgtgttctctctggaaactgttccacactttgactgttgaagcctcgacccacccagatgcactggttggcacaggctttgaagacgacccccaggctgtgctgcagacaatgaggaggtacgttcacaccttctttgggtgtaaggaatgtggtgagcactttgaggaaatggctaaagaatccatggactcggtgaaaaccccagaccaagccatcctctggctgtggaagaagcataatatggtgaacggccgcctggcaggccatctgagtgaggatccccggtttccaaagcttcagtggcccactccggacctctgcccagcctgccatgaggaaattaagggcctggccagctgggatgaaggccacgtgctcacattcttgaagcagcactatggccgcgacaacctcttagacacgtattccgcagaccagggggattccagtgaaggaggaaccctggccaggggtgaggaagaggagaaaagactcactcccccagaggtgtcccatggagaccgagacacccagagcgtccgtccacctggtgcactgggccccaggcctgcccttccagagagcttgcatcacagcttggacgggaaactccagagtctggatgggcccggggcccacaaggaggtgggcggggccgcacccttcctcggggttgacttctccagcctggacatgagtctctgtgtcgtgctgtacgtggcttcatccctgttcctcatggtgatgtacttcttcttccgggtgaggtccaggcggtggaaggtcaagcaccaccacccggccgtgtgagtgcccgggtgctgccagccacggcggaagctcccttggaggcagccctgccccgtgccacctgcagctttaatatttatgatcagggattttataaacatgcgggcctggtttcacatcggatggcaccttttggcttcaaagtcctggttttacaaacgctcttctaacaagggaagaacacggggtaattttgtggggatatttgcattcctggcgtactcaagtctgttcatgctccttttgcaggtcttacagcaaaaagacttctgtatttttactcttctagatgtgaaaagagggtgcagagtccaggccagatagtcttccccacacactttcatctcgtttcctccactccgccccatcctgcagggccttgtttttgtatttggagaacctcgcccatcccccccgcggctcctggctcccccccactcccctcgctccccctccccccgctccccccacgccccctgctccaggctgccaagtgttttcctttagccgggcggggacagacagagccggaagcgcagtcggcctctgcagcccctccaagcaagtgctccagggactatcctgtgtttgtagctgcttccctagggcaggttcctgagggctctccttgttcctccgggtgttcgacaccagacgtggggatttcaacaggggaggagccaaggaattctgtggctgtgctgcgtttcagaaaataacccccagaggccttgggctgtggacctgggggttggaaggatgggggctcatttaaccctcagaggcagcgcctttgtctgtctatctggtgacaagagagagacaagtaaatgggggccgttgggacggcgggtgcctggagggcagctctgggctcagcgggcagtgcttagagcacaggcccctctgttgggggatggggaggagagcagtctgcccttgggagcgtaggccccagggagacttctaaagccccccctgtcgtctgctcttcacccagcaccacagaggcacctgctgcacacacaagcatctcactcggcccacggagggggccaggcttcctttgcctgaagctgttttgggaagggtctccacacaggcactgatctcccaagcttttgtcatgatgtcttttaccatttgataattttaaacattgtttttaaacccaaaacatttagtggtccgttgcctctgaagatgtaaacaaacaaatacactatttctgggaacatttatattgagattctttgtggctattggtgtgtctcacaggcaaaatttgatttggctaaaataggctcagatgtatttgtgtgcccgtgtgtgtgtgtgtgtgtgtgtgtgtgtgtgtgtgtgtatgagagagagagagactttgacggttgtagatattttttccgctttgcctactttatgttgtataatcatgtgtttactaacaagttgatgacatggatgtattcataagaccatgtaatattgatgtgattgttgtcgcttgagaaaaaaaggcaacagctgattctttcaacaactgtcacagaatggctgggctgagaacgctgcccagggccctgcagctggcgggagaggtgtctggtgggagcggtgtctggtgcgtcagcctgctgcttcgtgtctcactcgagagttgcttctggtttcacactttttaacccctctgtgctttagcagccgtgaccttgccttcattgcttcatccagtgcaggcctgggttattgaagacaccaaagtgtttctcttccagtttgaaaaccaggcaggtttacacgtgggtttcagtgtatttgcctttgaacccttcaaactaaactttagccttttggctggtgttgaatgtctttagctggggtgacctggagtgacctgggacggtgttgtggtttaccgtctccagcttcagcctttccagaaacccttgtggagggcagtgttggctgcaggtttcatcatattgcagtttgaggtcaccactatttggggaacaagcttgcgtcctgctgaggggcaggattttcagcagagcgtcggtggggctgggccgtcgtggaggtggccccaggagtcatatggccatactcagacacaccttgtgtggcctgctcagagctggatgccacctttaggcaatgtttagagtctattttctaaagttttaagtattttaagaggtattgagactaatgaatataatagttcagtaatttaaatgcttatttattttcagtggaaggatttttattaaaaagaagctaattgacatggaaatgtcagtgaaatttcttacctgcaaggaaagtgaacattttgtatttaagtaaactataatgtgcacattttaataaagaaatctgacatttg

SEQ ID NO: 172873 - DNA, 1648 bp, Homo sapiens
  Payload ID: 13976
  Gene Symbol: QDPR
  Gene Name: quinoid dihydropteridine reductase
  Uniprot ID: P09417
  ENST ID: ENST00000281243
  CDS Start-End: 181-915
acagtccctccgggtggcggggcgccccgagcgtggcagcgcgctaggcggcagcagcgggcgcggagcggggcgcggccgccgcgcgttccctcttggcggggttggccggccggggcggggcgcggcgctccggctcgaggcattcggagctgcgggagccgggctggcaggagcaggatggcggcggcggcggctgcaggcgaggcgcgccgggtgctggtgtacggcggcaggggcgctctgggttctcgatgcgtgcaggcttttcgggcccgcaactggtgggttgccagcgttgatgtggtggagaatgaagaggccagcgctagcatcattgttaaaatgacagactcgttcactgagcaggctgaccaggtgactgctgaggttggaaagctcttgggtgaagagaaggtggatgcaattctttgcgttgctggaggatgggccgggggcaatgccaaatccaagtctctctttaagaactgtgacctgatgtggaagcagagcatatggacatcgaccatctccagccatctggctaccaagcatctcaaggaaggaggcctcctgaccttggctggcgcaaaggctgccctggatgggactcctggtatgatcgggtacggcatggccaagggtgctgttcaccagctctgccagagcctggctgggaagaacagcggcatgccgcccggggcagccgccatcgctgtgctcccggttaccctggataccccgatgaacaggaaatcaatgcctgaggctgacttcagctcctggacacccttagaattcctagttgaaactttccatgactggatcacagggaaaaaccgaccgagctcaggaagcctaatccaggtggtaaccacagaaggaaggacggaactcaccccagcatatttttaggcctcatctcagtgcctatgaggggcctgccagaaaagtcactaacctgtctcagtgtggccttgtccagccttgtgttttctgtaacccctgtttgtggtacgagataatgagtcctatttttctctcacataatatgcatttgctctcctaggacagtgtaatacatttatgtgaagtaaagacatgcgagactggtggcctgcaaatagcatccgttgatctgtgttaactgcatagggagggctctgcatagcacctgctatagcggtgtcatgttggatcgcttttgtgactgttcatctgtccttgacagtggctgtcatcttgactactttgttgatttgttggtattggggacattttaaaggctgagttatttttgaatgtcatgtttatgtcatagacgtagttttcgcatccttgaattaaactgccttaactccttttgtggtataagcaaaactacatggactctgtcctggtatccttttcctgtgtggttgccccgtgtcctctggcctagggttaagtgtgcaagataactactcgtgagtattcagaatgttgttcctaataaatgcacttgttgtctgtcttctttaatcaaatcacatcttatatacagcagtcagagatgagtatactagaatcatggattgctggaggtcttttaatctgatgttctcagaagggggtggatttaaatcctgaaataaatatttcaacacaa

SEQ ID NO: 172874 - DNA, 1278 bp, Homo sapiens
  Payload ID: 13976
  Gene Symbol: QDPR
  Gene Name: quinoid dihydropteridine reductase
  Uniprot ID: P09417
  ENST ID: ENST00000428702
  CDS Start-End: 33-674
ggagctgcgggagccgggctggcaggagcaggatggcggcggcggcggctgcaggcgaggcgcgccgggtgctggtgtacggcggcaggggcgctctgggttctcgatgcgtgcaggcttttcgggcccgcaactgggtgactgctgaggttggaaagctcttgggtgaagagaaggtggatgcaattctttgcgttgctggaggatgggccgggggcaatgccaaatccaagtctctctttaagaactgtgacctgatgtggaagcagagcatatggacatcgaccatctccagccatctggctaccaagcatctcaaggaaggaggcctcctgaccttggctggcgcaaaggctgccctggatgggactcctggtatgatcgggtacggcatggccaagggtgctgttcaccagctctgccagagcctggctgggaagaacagcggcatgccgcccggggcagccgccatcgctgtgctcccggttaccctggataccccgatgaacaggaaatcaatgcctgaggctgacttcagctcctggacacccttagaattcctagttgaaactttccatgactggatcacagggaaaaaccgaccgagctcaggaagcctaatccaggtggtaaccacagaaggaaggacggaactcaccccagcatatttttaggcctcatctcagtgcctatgaggggcctgccagaaaagtcactaacctgtctcagtgtggccttgtccagccttgtgttttctgtaacccctgtttgtggtacgagataatgagtcctatttttctctcacataatatgcatttgctctcctaggacagtgtaatacatttatgtgaagtaaagacatgcgagactggtggcctgcaaatagcatccgttgatctgtgttaactgcatagggagggctctgcatagcacctgctatagcggtgtcatgttggatcgcttttgtgactgttcatctgtccttgacagtggctgtcatcttgactactttgttgatttgttggtattggggacattttaaaggctgagttatttttgaatgtcatgtttatgtcatagacgtagttttcgcatccttgaattaaactgccttaactccttttgtggtataagcaaaactacatggactctgtcctggtatccttttcctgtgtggttgccccgtgtcctctggcctagggttaagtgtgcaagataactactcgtgagtattcagaatgttgttcctaataaatgcacttgttgtctgtcttcttt

SEQ ID NO: 172875 - DNA, 1068 bp, Homo sapiens
  Payload ID: 13976
  Gene Symbol: QDPR
  Gene Name: quinoid dihydropteridine reductase
  ENST ID: ENST00000505710
  CDS Start-End: 1-386
gatgcgtgcaggcttttcgggcccgcaactggtgggttgccagcgttgatgtggtggagaatgaagaggccagcgctagcatcattgttaaaatgacagactcgttcactgagcaggctgaccaggtgactgctgaggttggaaagctcttgggtgaagagaaggtggatgcaattctttgcgttgctggaggatgggccgggggcaatgccaaatccaagtctctctttaagaactgtgacctgatgtggaagcagagcatatggacatcgaccatctccagccatctggctaccaagcatctcaaggaaggaggcctcctgaccttggctggcgcaaaggctgccctggatgggactcctgggttaccctggataccccgatgaacaggaaatcaatgcctgaggctgacttcagctcctggacacccttagaattcctagttgagtgagtattacagacatgtccatgactgagcagcttccagcccctattctctgcctgctgtggtccagaggacaagtctgtgttccctgagatcgtcaatccgggtggtcttgggaggtctctgggactctgaggatgcattgcacatcagacggaatctcagagtagctggacttggagacaggcagcacagtggcagaatgggtagtgccgacatgaatcctggctcgctccctcaccaccggccatgctgagcacattattgacctgctgaggcctcagtttccccacctgtatcatgaggtccatcatgcttgttaggattaaacgtgatagtgtgcggcaagcactcaacacagtgtctggccataacaagtgctcagtgatccccagctgcagtttgtgtccttactgctgtgatgaggagactccatgggggagggggacaccacgtagatggcctgggggcacatatctgaatctgtgtcaagccacagacccacagaaagtgccctttaatttccgaaatcctttttgcccatttgtgaatatgggtggcatttgaacgctcatgggacagagagctgaattcctcttttgtgtttgtttaggtatcagttc

SEQ ID NO: 172876 - DNA, 1188 bp, Homo sapiens
  Payload ID: 13976
  Gene Symbol: QDPR
  Gene Name: quinoid dihydropteridine reductase
  ENST ID: ENST00000513615
  CDS Start-End: 36-494
ttcggagctgcgggagccgggctggcaggagcaggatggcggcggcggcggctgcaggcgaggcgcgccgggtgctggtgtacggcggcaggggcgctctgggttctcgatgcgtgcaggcttttcgggcccgcaactggtgggttgccagcgttgatgtggtggagaatgaagaggccagcgctagcatcattgttaaaatgacagactcgttcactgagcaggctgaccaggtgactgctgaggttggaaagctcttgggtgaagagaaggtggatgcaattctttgcgttgctggaggatgggccgggggcaatgccaaatccaagtctctctttaagaactgtgacctgatgtggaagcagagcatatggacatcgaccatctccagccatctggctaccaagcatctcaaggaaggaggcctcctgaccttggctggcgcaaaggctgccctggatgggactcctgggttaccctggataccccgatgaacaggaaatcaatgcctgaggctgacttcagctcctggacacccttagaattcctagttgaaactttccatgactggatcacagggaaaaaccgaccgagctcaggaagcctaatccaggaactgactcagctgcaggaggacagcttcaattccctatgagttcatctcggacccaaccaatcagagctcttgactcactggcttccccctacccaccaagttgtccttaaaaactttgatccccgaatgcttggggaaaccaatctgagtaataataaaactcaagtcacctgcacagctggctctgtgtgaattactctctctattgcaattcccctgtcttgataaaatggctctatctaggcagctggcaaggtgaatccattgggtggttacaatacctcccttagtagactaaagaacaacttggataaaaccagcaagaaatggattatatcgagggaaattgtcatgcccatccaagaccatgataaggaatgaggaagtaacataatggaaggattctgtctcttctcattgggactgactctaagcacctctgattagatgtcattctatgtctgggatgatctcaggactatggtattgtcctcttgtgctatcaattttaactcacaaatggatgtcgatgtcatttattctcttattctacagaccttcattggctacat

SEQ ID NO: 172877 - DNA, 1374 bp, Homo sapiens
  Payload ID: 13976
  Gene Symbol: QDPR
  Gene Name: quinoid dihydropteridine reductase
  ENST ID: ENST00000507439
  CDS Start-End: 16-474
gctggcaggagcaggatggcggcggcggcggctgcaggcgaggcgcgccgggtgctggtgtacggcggcaggggcgctctgggttctcgatgcgtgcaggcttttcgggcccgcaactggtgggttgccagcgttgatgtggtggagaatgaagaggccagcgctagcatcattgttaaaatgacagactcgttcactgagcaggctgaccaggtgactgctgaggttggaaagctcttgggtgaagagaaggtggatgcaattctttgcgttgctggaggatgggccgggggcaatgccaaatccaagtctctctttaagaactgtgacctgatgtggaagcagagcatatggacatcgaccatctccagccatctggctaccaagcatctcaaggaaggaggcctcctgaccttggctggcgcaaaggctgccctggatgggactcctgggttaccctggataccccgatgaacaggaaatcaatgcctgaggctgacttcagctcctggacacccttagaattcctagttgaaactttccatgactggatcacagggaaaaaccgaccgagctcaggaagcctaatccaggtggtaaccacagaaggaaggacggaactcaccccagcatatttttaggcctcatctcagtgcctatgaggggcctgccagaaaagtcactaacctgtctcagtgtggccttgtccagccttgtgttttctgtaacccctgtttgtggtacgagataatgagtcctatttttctctcacataatatgcatttgctctcctaggacagtgtaatacatttatgtgaagtaaagacatgcgagactggtggcctgcaaatagcatccgttgatctgtgttaactgcatagggagggctctgcatagcacctgctatagcggtgtcatgttggatcgcttttgtgactgttcatctgtccttgacagtggctgtcatcttgactactttgttgatttgttggtattggggacattttaaaggctgagttatttttgaatgtcatgtttatgtcatagacgtagttttcgcatccttgaattaaactgccttaactccttttgtggtataagcaaaactacatggactctgtcctggtatccttttcctgtgtggttgccccgtgtcctctggcctagggttaagtgtgcaagataactactcgtgagtattcagaatgttgttcctaataaatgcacttgttgtctgtcttctttaatcaaatcacatcttatatacagcagtcagagatgagtatactagaatcatggattgctggaggtcttttaatctgatgttctcagaagggggtggatttaaatcctgaaataaatatttcaacacaa

SEQ ID NO: 172878 - DNA, 781 bp, Homo sapiens
  Payload ID: 13976
  Gene Symbol: QDPR
  Gene Name: quinoid dihydropteridine reductase
  ENST ID: ENST00000514300
  CDS Start-End: 153-263
gagcgtggcagcgcgctaggcggcagcagcgggcgcggagcggggcgcggccgccgcgcgttccctcttggcggggttggccggccggggcggggcgcggcgctccggctcgaggcattcggagctgcgggagccgggctggcaggagcaggatggcggcggcggcggctgcaggcgaggcgcgccgggtgctggtgtacggcggcaggggcgctctgggttctcgatgcgtgcaggcttttcgggcccgcaactggatttgagtaacaacagataccatatggccagcaaagcctaagtgggttgccagcgttgatgtggtggagaatgaagaggccagcgctagcatcattgttaaaatgacagactcgttcactgagcaggctgaccaggtgactgctgaggttggaaagctcttgggtgaagagaaggtggatgcaattctttgcgttgctggaggatgggccgggggcaatgccaaatccaagtctctctttaagaactgtgacctgatgtggaagcagagcatatggacatcgaccatctccagccatctggctaccaagcatctcaaggaaggaggcctcctgaccttggctggcgcaaaggctgccctggatgggactcctgggttaccctggataccccgatgaacaggaaatcaatgcctgaggctgacttcagctcctggacacccttagaattcctagttgaaactttccatgactggatcacagggaaaaaccgaccgagctcaggaagcctaatccaggtggtaacc

SEQ ID NO: 172879 - DNA, 601 bp, Homo sapiens
  Payload ID: 13976
  Gene Symbol: QDPR
  Gene Name: quinoid dihydropteridine reductase
  ENST ID: ENST00000508623
  CDS Start-End: 34-522
cggagctgcgggagccgggctggcaggagcaggatggcggcggcggcggctgcaggcgaggcgcgccgggtgctggtgtacggcggcaggggcgctctgggttctcgatgcgtgcaggcttttcgggcccgcaactggtgggttgccagcgttgatgtggtggagaatgaagaggccagcgctagcatcattgttaaaatgacagactcgttcactgagcaggctgaccaggtgactgctgaggttggaaagctcttgggtgaagagaaggtggatgcaattctttgcgttgctggaggatgggccgggggcaatgccaaatccaagtctctctttaagaactgtgacctgatgtggaagcagagcatatggacatcgaccatctccagccatctggctaccaagcatctcaaggaaggaggcctcctgaccttggctggcgcaaaggctgccctggatgggactcctgaactttccatgactggatcacagggaaaaaccgaccgagctcaggaagcctaatccaggtggtaaccacagaaggaaggacggaactcaccccagcatatttttaggcctcatctcagtgcctatgaggggc

SEQ ID NO: 172880 - DNA, 2343 bp, Homo sapiens
  Payload ID: 13977
  Gene Symbol: QPRT
  Gene Name: quinolinate phosphoribosyltransferase
  Uniprot ID: Q15274
  ENST ID: ENST00000395384
  CDS Start-End: 162-1055
ggcctggcagaggacaggagggaggcttggggagcctgggaagggccggctgacagcttgatgggccctccctccctccacagtcccacccccagcctggggcctctgggagccttggtcctgagcagccaacacaccagcccagacagctgcaagtcaccatggacgctgaaggcctggcgctgctgctgccgcccgtcaccctggcagccctggtggacagctggctccgagaggactgcccagggctcaactacgcagccttggtcagcggggcaggcccctcgcaggcggcgctgtgggccaaatcccctggggtactggcagggcagcctttcttcgatgccatatttacccaactcaactgccaagtctcctggttcctccccgagggatcgaagctggtgccggtggccagagtggccgaggtccggggccctgcccactgcctgctgctgggggaacgggtggccctcaacacgctggcccgctgcagtggcattgccagtgctgccgccgctgcagtggaggccgccaggggggccggctggactgggcacgtggcaggcacgaggaagaccacgccaggcttccggctggtggagaagtatgggctcctggtgggcggggccgcctcgcaccgctacgacctgggagggctggtgatggtgaaggataaccatgtggtggccgccggtggcgtggagaaggcggtgcgggcggccagacaggcggctgacttcactctgaaggtggaagtggaatgcagcagcctgcaggaggccgtgcaggcagctgaggctggtgccgaccttgtcctgctggacaacttcaagccagaggagctgcaccccacggccaccgtgctgaaggcccagttcccgagtgtggctgtggaagccagtgggggcatcaccctggacaacctcccccagttctgcgggccgcacatagacgtcatctccatggggatgctgacccaggcggccccagcccttgatttctccctcaagctgtttgccaaagaggtggctccagtgcccaaaatccactagtcctaaaccggaagaggatgacaccggccatgggttaacgtggctcctcaggaccctctgggtcacacatctttagggtcagtggccaatggggcacatttggcactagcttgagcccaactctggctctgccacctgctgctcctgtgacctgtcagggctgacttcacctctgctcatctcagtttcctaatctgtaaaatgggtctaataaaggatcaaccacatggggttctgcggtgataatgagcacatagtgaggggtcagcaaatgtcagaagttacctgggacagccgggcacgatggctcacacctgtaatcccagcactttgggaggctgaggcgggaagatcacttgagttcaggagtttgagaccagcctggccaacatggtgaaaccccatctctaccaaaaatagaagaattagctgggtgtggtggcacgcgcctgtaatcccagctacttaggaggctgaggcaggagaatcgcttgaacccaggaagtggaggttgcagtgagctgatggtgccactgcactccagcctgggtgatagagcgagactctgtctccaaagaagaaacaaaggaaagaaagagagaaagagagagggagggagggagggagggaaaggaaggatggaaagaaaggaagaaaggcaggcaaaagccccagacaggccaaaaccttcatccttcatgcacccaacctgtaccaaacaccagcatggcctggctgtgagtgcacagcagatggaggtttgctgggcagagacactgggctggcctagacactgcctttggtgataccctaaaccaaaggggccagtcccacagtaagaaggagaccactactactcctgctgccctcctccccccaccttgcctagtttacaagacaggaggaaagagagaaagcaaaaagttagaaaacaaaacaaaacagaagtaagataaatagccagaagaccttggcgacaccacccggccctggtagttaaaaaaaagtaacaataataataatatcaacccctgacctaaactacttgtgttatctgtaaattccagacattgtatgaaaaagcattgcaaaactttctgctctgttagctgatgcgtgtagcccccagtcacgttccccgcttgcttgagatatcatgaccctttcacgtggaccccttagagttgtaagcctttaaaaaggccaagaatttctttttcagggatctcagctattaagatgcaagtctgccaatgctcctggccaaataaacctcttccttctttaa

SEQ ID NO: 172881 - DNA, 579 bp, Homo sapiens
  Payload ID: 13977
  Gene Symbol: QPRT
  Gene Name: quinolinate phosphoribosyltransferase
  ENST ID: ENST00000562473
  CDS Start-End: 17-466
acagctgcaagtcaccatggacgctgaaggcctggcgctgctgctgccgcccgtcaccctggcagccctggtggacagctggctccgagaggactgcccagggctcaactacgcagccttggcggtgcgggcggccagacaggcggctgacttcactctgaaggtggaagtggaatgcagcagcctgcaggaggccgtgcaggcagctgaggctggtgccgaccttgtcctgctggacaacttcaagccagaggagctgcaccccacggccaccgtgctgaaggcccagttcccgagtgtggctgtggaagccagtgggggcatcaccctggacaacctcccccagttctgcgggccgcacatagacgtcatctccatggggatgctgacccaggcggccccagcccttgatttctccctcaagctgtttgccaaagaggtggctccagtgcccaaaatccactagtcctaaaccggaagaggatgacaccggccatgggttaacgtggctcctcaggaccctctgggtcacacatctttagggtcagtggccaatggggcacatttggcactagcttg

SEQ ID NO: 172882 - DNA, 1773 bp, Homo sapiens
  Payload ID: 13978
  Gene Symbol: R3HCC1
  Gene Name: R3H domain and coiled-coil containing 1
  ENST ID: ENST00000265806
  CDS Start-End: 269-1591
tgtctgggtctcggttttgccatgaatatgaaagctagtcgtgtcactctaggagaagcggtttgtgttggtggcaggtgcgccccctcccaataggtgacaagaacacgcactctcccgttcctgcgttacctcccccaggccgcgcggtggcgctgcgtctctgcagcggcccgggtctctctagggcgctcgggcgcgctggcccctggggacgccgagggcggctgcgacgcgccgagaggccgcggctctcccacctgtcaccctggcccttctctgcttggatggtgtcttcctctcctcagccgagaatgacttcgtccaccggatccaggaggaactggaccgctttctgctgcagaagcagctgtcaaaggttcttcttttccccccactctccagtcgcctccggtacctgatccatagaacagcagagaattttgatctcttgagcagcttctccgttggggagggctggaagaggaggacggtcatctgtcaccaggacatcagggtacccagttcggatggcctctctggcccctgccgcgctcctgcctcctgccccagcaggtaccacggtcctcggcccatctccaaccaaggagcagctgcggttccccgaggtgcccgggctggccggtggtatcgtggacgcaagcctgaccagcctttgtatgtgccccgggtgctgcgcaggcaggaagaatgggggctgacctctacctcggtgctcaagagagaggccccagctggcagggacccagaagagcctggagatgttggtgctggagaccccaactctgatcagggactccctgtgctgatgactcagggaacagaggacctaaagggcccaggacaaaggtgtgagaatgagccactgctggaccctgttggccctgagcctctggggcctgagagtcagtcagggaagggagacatggtggagatggccacacggtttgggtccaccctgcagctagacctggaaaaggggaaggagagtctgttggagaagaggctggtggcagaggaggaagaggacgaagaggaggtggaagaggatggccccagcagctgctcggaggacgattacagtgagctgctgcaggagatcacagacaacctgacgaagaaggagattcagatagagaagatccatttggacacatcctccttcgtggaggagctgcctggagagaaggaccttgcccacgtggtagagatctatgactttgaaccagcgctcaagacggaggacctgctggcaacgttttctgagttccaagagaaggggttcaggattcagtgggtggatgatactcacgcactcggcatctttccctgcctggcctcagctgcggaagccctgacccgggagttctcggtgctcaagatccggcccctcacacagggaaccaagcagtcaaagctcaaagccttgcagaggccaaaactcctgcgtctggtgaaggagaggccacagacaaatgcgactgtggcccggcggctggtggcccgggccctgggactccaacacaaaaagaaagagcggcctgctgtccggggtccgctgccgccctgaggcctggagacccaactggcctggatctgcgtcccgacgtagctggcgcccccaacaccataagccttcacagacgccagagcagccccgcaccaccctcgagcttcaccatggggtgtggtgggctttagtttagtcccagaaatggagaaaaaataaaaactcacgttgttctaatgtga

SEQ ID NO: 172883 - DNA, 1467 bp, Homo sapiens
  Payload ID: 13978
  Gene Symbol: R3HCC1
  Gene Name: R3H domain and coiled-coil containing 1
  Uniprot ID: Q9Y3T6
  ENST ID: ENST00000411463
  CDS Start-End: 1-1443
atgaatatgaaagctagtcgtgtcactctaggagaagcgggcgctcgggcgcgctggcccctggggacgccgagggcggctgcgacgcgccgagaggccgcggctctcccacctgtcaccctggcccttctctgcttggatggtgtcttcctctcctcagccgagaatgacttcgtccaccggatccaggaggaactggaccgctttctgctgcagaagcagctgtcaaaggttcttcttttccccccactctccagtcgcctccggtacctgatccatagaacagcagagaattttgatctcttgagcagcttctccgttggggagggctggaagaggaggacggtcatctgtcaccaggacatcagggtacccagttcggatggcctctctggcccctgccgcgctcctgcctcctgccccagcaggtaccacggtcctcggcccatctccaaccaaggagcagctgcggttccccgaggtgcccgggctggccggtggtatcgtggacgcaagcctgaccagcctttgtatgtgccccgggtgctgcgcaggcaggaagaatgggggctgacctctacctcggtgctcaagagagaggccccagctggcagggacccagaagagcctggagatgttggtgctggagaccccaactctgatcagggactccctgtgctgatgactcagggaacagaggacctaaagggcccaggacaaaggtgtgagaatgagccactgctggaccctgttggccctgagcctctggggcctgagagtcagtcagggaagggagacatggtggagatggccacacggtttgggtccaccctgcagctagacctggaaaaggggaaggagagtctgttggagaagaggctggtggcagaggaggaagaggacgaagaggaggtggaagaggatggccccagcagctgctcggaggacgattacagtgagctgctgcaggagatcacagacaacctgacgaagaaggagattcagatagagaagatccatttggacacatcctccttcgtggaggagctgcctggagagaaggaccttgcccacgtggtagagatctatgactttgaaccagcgctcaagacggaggacctgctggcaacgttttctgagttccaagagaaggggttcaggattcagtgggtggatgatactcacgcactcggcatctttccctgcctggcctcagctgcggaagccctgacccgggagttctcggtgctcaagatccggcccctcacacagggaaccaagcagtcaaagctcaaagccttgcagaggccaaaactcctgcgtctggtgaaggagaggccacagacaaatgcgactgtggcccggcggctggtggcccgggccctgggactccaacacaaaaagaaagagcggcctgctgtccggggtccgctgccgccctgaggcctggagacccaactggcctgg

SEQ ID NO: 172884 - DNA, 953 bp, Homo sapiens
  Payload ID: 13978
  Gene Symbol: R3HCC1
  Gene Name: R3H domain and coiled-coil containing 1
  ENST ID: ENST00000521588
  CDS Start-End: 103-953
gccctttcggtgccggcgttgcggggtcgcgggagatccgggggtctgtgctctgattcccggccctgcccgtctctcttacaggctctcccacctgtcaccctggcccttctctgcttggatggtgtcttcctctcctcagccgagaatgacttcgtccaccggatccaggaggaactggaccgctttctgctgcagaagcagctgtcaaaggttcttcttttccccccactctccagtcgcctccggtacctgatccatagaacagcagagaattttgatctcttgagcagcttctccgttggggagggctggaagaggaggacggtcatctgtcaccaggacatcagggtacccagttcggatggcctctctggcccctgccgcgctcctgcctcctgccccagcaggtaccacggtcctcggcccatctccaaccaaggagcagctgcggttccccgaggtgcccgggctggccggtggtatcgtggacgcaagcctgaccagcctttgtatgtgccccgggtgctgcgcaggcaggaagaatgggggctgacctctacctcggtgctcaagagagaggccccagctggcagggacccagaagagcctggagatgttggtgctggagaccccaactctgatcagggactccctgtgctgatgactcagggaacagaggacctaaagggcccaggacaaaggtgtgagaatgagccactgctggaccctgttggccctgagcctctggggcctgagagtcagtcagggaagggagacatggtggagatggccacacggtttgggtccaccctgcagctagacctggaaaaggggaaggagagtctgttggagaagaggctggtggcagaggaggaagaggacgaagaggaggtggaagaggatggccccagcagctgctcggaggacgattacagtgagctgctgcagga

SEQ ID NO: 172885 - DNA, 985 bp, Homo sapiens
  Payload ID: 13978
  Gene Symbol: R3HCC1
  Gene Name: R3H domain and coiled-coil containing 1
  ENST ID: ENST00000519952
  CDS Start-End: 53-985
gccgagggcggctgcgacgcgccgagaggccgcggctctcccacctgtcaccctggcccttctctgcttggatggtgtcttcctctcctcagccgagaatgacttcgtccaccggatccaggaggaactggaccgctttctgctgcagaagcagctgtcaaatcgcctccggtacctgatccatagaacagcagagaattttgatctcttgagcagcttctccgttggggagggctggaagaggaggacggtcatctgtcaccaggacatcagggtacccagttcggatggcctctctggcccctgccgcgctcctgcctcctgccccagcaggtaccacggtcctcggcccatctccaaccaaggagcagctgcggttccccgaggtgcccgggctggccggtggtatcgtggacgcaagcctgaccagcctttgtatgtgccccgggtgctgcgcaggcaggaagaatgggggctgacctctacctcggtgctcaagagagaggccccagctggcagggacccagaagagcctggagatgttggtgctggagaccccaactctgatcagggactccctgtgctgatgactcagggaacagaggacctaaagggcccaggacaaaggtgtgagaatgagccactgctggaccctgttggccctgagcctctggggcctgagagtcagtcagggaagggagacatggtggagatggccacacggtttgggtccaccctgcagctagacctggaaaaggggaaggagagtctgttggagaagaggctggtggcagaggaggaagaggacgaagaggaggtggaagaggatggccccagcagctgctcggaggacgattacagtgagctgctgcaggagatcacagacaacctgacgaagaaggagattcagatagagaagatccatttggacacatcctccttcgtggaggagctgcctggagagaaggaccttgcccacgtggta

SEQ ID NO: 172886 - DNA, 781 bp, Homo sapiens
  Payload ID: 13978
  Gene Symbol: R3HCC1
  Gene Name: R3H domain and coiled-coil containing 1
  ENST ID: ENST00000518840
  CDS Start-End: 111-781
gtcgtcccgacccccgggctcccgggtgggaaggagcagctgggctgcgcggagcaggcccccgtgagccccgggaaggagcgcagcgcagggctctcccacctgtcaccctggcccttctctgcttggatggtgtcttcctctcctcagccgagaatgacttcgtccaccggatccaggaggaactggaccgctttctgctgcagaagcagctgtcaaaggttcttcttttccccccactctccagtcgcctccggtacctgatccatagaacagcagagaattttgatctcttgagcagcttctccgttggggagggctggaagaggaggacggtcatctgtcaccaggacatcagggtacccagttcggatggcctctctggcccctgccgcgctcctgcctcctgccccagcaggtaccacggtcctcggcccatctccaaccaaggagcagctgcggttccccgaggtgcccgggctggccggtggtatcgtggacgcaagcctgaccagcctttgtatgtgccccgggtgctgcgcaggcaggaagaatgggggctgacctctacctcggtgctcaagagagaggccccagctggcagggacccagaagagcctggagatgttggtgctggagaccccaactctgatcagggactccctgtgctgatgactcagggaacagaggacctaaagggcccaggacaaaggtgtgagaatgagccactgctggaccctgttggccctgagcctctggggcctgagagtcagtcagggaa

SEQ ID NO: 172887 - DNA, 569 bp, Homo sapiens
  Payload ID: 13978
  Gene Symbol: R3HCC1
  Gene Name: R3H domain and coiled-coil containing 1
  ENST ID: ENST00000520480
  CDS Start-End: 1-447
gaagaggatggccccagcagctgctcggaggacgattacagtgagctgctgcaggagatcacagacaacctgacgaagaaggagattcagatagagaagatccatttggacacatcctccttcgtggaggagctgcctggagagaaggaccttgcccacgtggtagagatctatgactttgaaccagcgctcaagacggaggacctgctggcaacgttttctgagttccaagagaaggggttcaggattcagtgggtggatgatactcacgcactcggcatctttccctgcctggcctcagctgcggaagccctgacccgggagttctcggtgctcaagatccggcccctcacacagggaaccaagcagtcaaagctcaaagccttgcagaggccaaaaaccatggtgagagattttagacacgagttttccatgacttcaaagtagtaactagtaaaatggacctgcaagaggcctgccgaggccagctgtgctctcgtgggtggttacgtagccaacatggtccagggtttcttggaacaataaatatcctgtccgtaggtctgtga

SEQ ID NO: 172888 - DNA, 1489 bp, Homo sapiens
  Payload ID: 13978
  Gene Symbol: R3HCC1
  Gene Name: R3H domain and coiled-coil containing 1
  ENST ID: ENST00000625275
  CDS Start-End: 269-1465
tgtctgggtctcggttttgccatgaatatgaaagctagtcgtgtcactctaggagaagcggtttgtgttggtggcaggtgcgccccctcccaataggtgacaagaacacgcactctcccgttcctgcgttacctcccccaggccgcgcggtggcgctgcgtctctgcagcggcccgggtctctctagggcgctcgggcgcgctggcccctggggacgccgagggcggctgcgacgcgccgagaggccgcggctctcccacctgtcaccctggcccttctctgcttggatggtgtcttcctctcctcagccgagaatgacttcgtccaccggatccaggaggaactggaccgctttctgctgcagaagcagctgtcaaaggttcttcttttccccccactctccagtcgcctccggtacctgatccatagaacagcagagaattttgatctcttgagcagcttctccgttggggagggctggaagaggaggacggtcatctgtcaccaggacatcagggtacccagttcggatggcctctctggcccctgccgcgctcctgcctcctgccccagcaggcaggaagaatgggggctgacctctacctcggtgctcaagagagaggccccagctggcagggacccagaagagcctggagatgttggtgctggagaccccaactctgatcagggactccctgtgctgatgactcagggaacagaggacctaaagggcccaggacaaaggtgtgagaatgagccactgctggaccctgttggccctgagcctctggggcctgagagtcagtcagggaagggagacatggtggagatggccacacggtttgggtccaccctgcagctagacctggaaaaggggaaggagagtctgttggagaagaggctggtggcagaggaggaagaggacgaagaggaggtggaagaggatggccccagcagctgctcggaggacgattacagtgagctgctgcaggagatcacagacaacctgacgaagaaggagattcagatagagaagatccatttggacacatcctccttcgtggaggagctgcctggagagaaggaccttgcccacgtggtagagatctatgactttgaaccagcgctcaagacggaggacctgctggcaacgttttctgagttccaagagaaggggttcaggattcagtgggtggatgatactcacgcactcggcatctttccctgcctggcctcagctgcggaagccctgacccgggagttctcggtgctcaagatccggcccctcacacagggaaccaagcagtcaaagctcaaagccttgcagaggccaaaactcctgcgtctggtgaaggagaggccacagacaaatgcgactgtggcccggcggctggtggcccgggccctgggactccaacacaaaaagaaagagcggcctgctgtccggggtccgctgccgccctgaggcctggagacccaactggcctgg

SEQ ID NO: 172889 - DNA, 271 bp, Homo sapiens
  Payload ID: 13978
  Gene Symbol: R3HCC1
  Gene Name: R3H domain and coiled-coil containing 1
  ENST ID: ENST00000517633
  CDS Start-End: 143-271
gtggttatctgagcttcagtgggcacattcctatctcttgggctttactaacccttgtacttggaagttcatccagagaactcacaacgatactgggggctgctctcacatactcactttgcaggctctcccacctgtcaccctggcccttctctgcttggatggtgtcttcctctcctcagccgagaatgacttcgtccaccggatccaggaggaactggaccgctttctgctgcagaagcagctgtcaaaggttcttcttttcccccca

SEQ ID NO: 172890 - DNA, 1500 bp, Homo sapiens
  Payload ID: 13978
  Gene Symbol: R3HCC1
  Gene Name: R3H domain and coiled-coil containing 1
  ENST ID: ENST00000522012
  CDS Start-End: 269-874
tgtctgggtctcggttttgccatgaatatgaaagctagtcgtgtcactctaggagaagcggtttgtgttggtggcaggtgcgccccctcccaataggtgacaagaacacgcactctcccgttcctgcgttacctcccccaggccgcgcggtggcgctgcgtctctgcagcggcccgggtctctctagggcgctcgggcgcgctggcccctggggacgccgagggcggctgcgacgcgccgagaggccgcggctctcccacctgtcaccctggcccttctctgcttggatggtgtcttcctctcctcagccgagaatgacttcgtccaccggatccaggaggaactggaccgctttctgctgcagaagcagctgtcaaaggttcttcttttccccccactctccagtcgcctccggtacctgatccatagaacagcagagaattttgatctcttgagcagcttctccgttggggagggctggaagaggaggacggtcatctgtcaccaggacatcagggtacccagttcggatggcctctctggcccctgccgcgctcctgcctcctgccccagcaggtaccacggtcctcggcccatctccaaccaaggagcagctgcggttccccgaggtgcccgggctggccggtggtatcgtggacgcaagcctgaccagcctttgtatgtgccccgggtgctgcgcaggcaggaagaatgggggctgacctctacctcggtgctcaagagagaggccccagctggcagggacccagaagagcctggagatgttggtgctggagaccccaactctgatcagggactccctgtgctgatgactcagggaacagaggacctaaagggcccaggacaaagctagacctggaaaaggggaaggagagtctgttggagaagaggctggtggcagaggaggaagaggacgaagaggaggtggaagaggatggccccagcagctgctcggaggacgattacagtgagctgctgcaggagatcacagacaacctgacgaagaaggagattcagatagagaagatccatttggacacatcctccttcgtggaggagctgcctggagagaaggaccttgcccacgtggtagagatctatgactttgaaccagcgctcaagacggaggacctgctggcaacgttttctgagttccaagagaaggggttcaggattcagtgggtggatgatactcacgcactcggcatctttccctgcctggcctcagctgcggaagccctgacccgggagttctcggtgctcaagatccggcccctcacacagggaaccaagcagtcaaagctcaaagccttgcagaggccaaaactcctgcgtctggtgaaggagaggccacagacaaatgcgactgtggcccggcggctggtggcccgggccctgggactccaacacaaaaagaaagagcggcctgctgtccggggtccgctgccgccctgaggcctggagacccaactggcctgg

SEQ ID NO: 172891 - DNA, 3379 bp, Homo sapiens
  Payload ID: 13979
  Gene Symbol: R3HCC1L
  Gene Name: R3H domain and coiled-coil containing 1-like
  Uniprot ID: Q7Z5L2
  ENST ID: ENST00000298999
  CDS Start-End: 304-2640
gcggagacggcggaagcggagagcaacagcgcgccgagacttccagtgtcctactattgaagcctgcacctgctgcattgctgttttcctgagacggagttttgccatgttgtccaggctggtgtcgaaatcctgagctcaagtggtctgcctgcctcggcttcccaaagtgctgggattacaggtgaggctgctgtcagaaaggaacttttacacagtttgccttcagagacagtctatcggcatgttgtagagttttattactaagaaaataaatgttacttacatgattgtggtggtgccatgcagcaagaatcagagagatgcagagttagagccagaaggcctgacatggcactttatgtacctaaagctcgtaggggtgcagtactccttaagacaggtgatgaagaagaaagctgtggttcacctaactctgtggtgaaagaaaagcaaaaagaaagttctctctcccaaaaagaagtctttaaagacaaaccggaggctcgaagactaaatatcaatcctgatagaaaggagcataattgtagagaagaaaagaaatcttcaacaaaattaagaatggacacatgccttcaaaaaacaaatagagtttgttctaagagaggaaccactgaatccaaagaagtattatcccaaggacaacagcagggagccccaaatgctggggttataactaatgcacctttgcagagacattttaaaccaaagaaggtggagtgtttggaagttgaaactacggatgtgacaggacatgagaggatacttctttcacaggcctgtttagaaatcagcgaggctcaagttccaagcaaaccattccaaaatgtggaattctgtgacttcagtaggcatgaacctgatggggaagcatttgaagacaaagatttggaaggcagaattgaaactgataccaaggttttggagatactatatgagtttcctagagtttttagttctgtcatgaaacctgagaatatgattgtaccaataaaactaagctctgattctgaaattgtacaacaaagcatgcaaacatcagatggaatattgaatcccagcagcggaggcatcaccactacttctgttcctggaagtccagatggtgtctttgatcaaacttgcgtagattttgaagttgagagtgtaggtggtatagccaatagtacaggtttcatcttagatcaaaaagatacagattccattcctgcaactatgggtcacatctctctgtcagagagcacaaatgacactgttagtccagtaatgattagagaatgtgagaagaatgacagcactgctgatgagttacatgtaaagcacgaacctcctgatacagctgtccttgctcatgaaacacatagagatagtggatttaagaatgtaggtgacattaccaataaagcatgtatgatggacactacaggtatgtcctgtagtgatcatgtaactgttgatagcccttatgtagttgcagttagaatagctgatgagacctctattaatacacgaagtttctcaaagtttgtaggaatgagtgcagatgcaacccctcttcatgtagctagaagtgggaatgacactgaagatttcagcaacccttctgcttgctcagatatttatggtgagagtatttcatctcattttacagagtcaacaggaaagttgatagagagcttgtcagattgtgcttcctccttacctataaaaaagattgctggtagtaattataacacttttttggactctgaactcagtatgttaaatgggacaaaagttctttcagacagtgccgtgggcattgacctgggtagtactggtgatacaacagaagcattgcacgaactaagaactgccgaagagttcaaaacagaagagcaagatgactcagggagtatagaatttggtgtatcttttcctgatagggaatcatcatctatggaaacatccatcgaaccaaaagcaactgaaacttctcacacagagggaattactgccattgaggagagctgggagtctatgtttaacgatgatggtgactgcctggatccacgtcttctacaagagttatcagggaataccaagagcagagagagcatccaggaacctagatctgattactacaatcatgaagttcctgatattgacctcagtgattgtgaattcccacatgtcattgaaatttatgactttccccaagaatttcatactgaagaccttctacgggttttctgcagttatcaaaagaaaggatttgatattaaatgggtggatgatacacatgccctaggagtattctccagtccaattacagctcgtgatgcgttgggtattaaacacaccatggtgaagattcgtcccttgtcacaggccacaagagcagccaaggccaaagctagagcttatgctgagttcctccagccagcaaaggagcgtcctgagacttcagcagccctagccagaaggttagtcatcagtgcccttggggttcgaagtaagcagagcaaaaccgaacgagaagcagagctcaagaaactgcaagaagccagagagagaaagcggttggaagccaagcaacgggaagacatctgggaaggcagagaccagtctacagtttgaacatcactcaatgaaagggataattccatgaatcagaaaatgtttccatagccttcagataagatgatccttccagagctctatgtacatgcagatgtgcatgttaaagagataaagtgatcgagacaaggactgactgggtatagaaggaagacagactcctgtcttcactcctaaatgcagttctttggaatcaccctactgtggtgggcgtagtagggagccatcagctaggaagaaacgtgggagatgtgaattccaagagttgcctggacagggcaagtcatgttagcgtgggtcacacttccaagatatttaaagcaaatacaaaacagaacagaggattcaaaccgcaagtatgggagatttaggccctgcagaggcagaccattccttagtatctcacaaagcagagtaatactggaggcagagtagggggtggttggagagcagttagtacaaagaggcagaacagtgtctggtttacttggcatacacagaatctgcactgccggttccagaactgcaaagttggtgaactacaggagatgtgggtatttagactccaaagtttatactgagctcagtgcctgggaccgctccagctgcactgcagccaggggggataccagcttcattcctcagagtaaaccaaccttgggagctgtgtgccagttccagtgtaagcagtaataccatgttgtaagagggaacattaaagcccattttatgacatata

SEQ ID NO: 172892 - DNA, 3198 bp, Homo sapiens
  Payload ID: 13979
  Gene Symbol: R3HCC1L
  Gene Name: R3H domain and coiled-coil containing 1-like
  Uniprot ID: Q7Z5L2
  ENST ID: ENST00000314594
  CDS Start-End: 126-2462
tttcaggtgaggctgctgtcagaaaggaacttttacacagtttgccttcagagacagtctatcggcatgttgtagagttttattactaagaaaataaatgttacttacatgattgtggtggtgccatgcagcaagaatcagagagatgcagagttagagccagaaggcctgacatggcactttatgtacctaaagctcgtaggggtgcagtactccttaagacaggtgatgaagaagaaagctgtggttcacctaactctgtggtgaaagaaaagcaaaaagaaagttctctctcccaaaaagaagtctttaaagacaaaccggaggctcgaagactaaatatcaatcctgatagaaaggagcataattgtagagaagaaaagaaatcttcaacaaaattaagaatggacacatgccttcaaaaaacaaatagagtttgttctaagagaggaaccactgaatccaaagaagtattatcccaaggacaacagcagggagccccaaatgctggggttataactaatgcacctttgcagagacattttaaaccaaagaaggtggagtgtttggaagttgaaactacggatgtgacaggacatgagaggatacttctttcacaggcctgtttagaaatcagcgaggctcaagttccaagcaaaccattccaaaatgtggaattctgtgacttcagtaggcatgaacctgatggggaagcatttgaagacaaagatttggaaggcagaattgaaactgataccaaggttttggagatactatatgagtttcctagagtttttagttctgtcatgaaacctgagaatatgattgtaccaataaaactaagctctgattctgaaattgtacaacaaagcatgcaaacatcagatggaatattgaatcccagcagcggaggcatcaccactacttctgttcctggaagtccagatggtgtctttgatcaaacttgcgtagattttgaagttgagagtgtaggtggtatagccaatagtacaggtttcatcttagatcaaaaagatacagattccattcctgcaactatgggtcacatctctctgtcagagagcacaaatgacactgttagtccagtaatgattagagaatgtgagaagaatgacagcactgctgatgagttacatgtaaagcacgaacctcctgatacagctgtccttgctcatgaaacacatagagatagtggatttaagaatgtaggtgacattaccaataaagcatgtatgatggacactacaggtatgtcctgtagtgatcatgtaactgttgatagcccttatgtagttgcagttagaatagctgatgagacctctattaatacacgaagtttctcaaagtttgtaggaatgagtgcagatgcaacccctcttcatgtagctagaagtgggaatgacactgaagatttcagcaacccttctgcttgctcagatatttatggtgagagtatttcatctcattttacagagtcaacaggaaagttgatagagagcttgtcagattgtgcttcctccttacctataaaaaagattgctggtagtaattataacacttttttggactctgaactcagtatgttaaatgggacaaaagttctttcagacagtgccgtgggcattgacctgggtagtactggtgatacaacagaagcattgcacgaactaagaactgccgaagagttcaaaacagaagagcaagatgactcagggagtatagaatttggtgtatcttttcctgatagggaatcatcatctatggaaacatccatcgaaccaaaagcaactgaaacttctcacacagagggaattactgccattgaggagagctgggagtctatgtttaacgatgatggtgactgcctggatccacgtcttctacaagagttatcagggaataccaagagcagagagagcatccaggaacctagatctgattactacaatcatgaagttcctgatattgacctcagtgattgtgaattcccacatgtcattgaaatttatgactttccccaagaatttcatactgaagaccttctacgggttttctgcagttatcaaaagaaaggatttgatattaaatgggtggatgatacacatgccctaggagtattctccagtccaattacagctcgtgatgcgttgggtattaaacacaccatggtgaagattcgtcccttgtcacaggccacaagagcagccaaggccaaagctagagcttatgctgagttcctccagccagcaaaggagcgtcctgagacttcagcagccctagccagaaggttagtcatcagtgcccttggggttcgaagtaagcagagcaaaaccgaacgagaagcagagctcaagaaactgcaagaagccagagagagaaagcggttggaagccaagcaacgggaagacatctgggaaggcagagaccagtctacagtttgaacatcactcaatgaaagggataattccatgaatcagaaaatgtttccatagccttcagataagatgatccttccagagctctatgtacatgcagatgtgcatgttaaagagataaagtgatcgagacaaggactgactgggtatagaaggaagacagactcctgtcttcactcctaaatgcagttctttggaatcaccctactgtggtgggcgtagtagggagccatcagctaggaagaaacgtgggagatgtgaattccaagagttgcctggacagggcaagtcatgttagcgtgggtcacacttccaagatatttaaagcaaatacaaaacagaacagaggattcaaaccgcaagtatgggagatttaggccctgcagaggcagaccattccttagtatctcacaaagcagagtaatactggaggcagagtagggggtggttggagagcagttagtacaaagaggcagaacagtgtctggtttacttggcatacacagaatctgcactgccggttccagaactgcaaagttggtgaactacaggagatgtgggtatttagactccaaagtttatactgagctcagtgcctgggaccgctccagctgcactgcagccaggggggataccagcttcattcctcagagtaaaccaaccttgggagctgtgtgccagttccagtgtaagcagtaataccatgttgtaagagggaacattaaagcccattttatgacat

SEQ ID NO: 172893 - DNA, 3372 bp, Homo sapiens
  Payload ID: 13979
  Gene Symbol: R3HCC1L
  Gene Name: R3H domain and coiled-coil containing 1-like
  Uniprot ID: Q7Z5L2
  ENST ID: ENST00000370584
  CDS Start-End: 300-2636
aggcctgacgcgcgccccagcggcgcgagcggaagagatagagcttcgcggagacggcggaagcggagagcaacagcgcgccggtgaggctgctgtcagaaaggaacttttacacagtttgccttcagagacagtctatcggcatgttgtagagttttattactaagaaaataaatgttacttacatgatggttttactcagcatttggtgtggtggatcttacataaacctttagaacttacattagagtgttcaagtcttctgagactccagagtcacctaagattgtggtggtgccatgcagcaagaatcagagagatgcagagttagagccagaaggcctgacatggcactttatgtacctaaagctcgtaggggtgcagtactccttaagacaggtgatgaagaagaaagctgtggttcacctaactctgtggtgaaagaaaagcaaaaagaaagttctctctcccaaaaagaagtctttaaagacaaaccggaggctcgaagactaaatatcaatcctgatagaaaggagcataattgtagagaagaaaagaaatcttcaacaaaattaagaatggacacatgccttcaaaaaacaaatagagtttgttctaagagaggaaccactgaatccaaagaagtattatcccaaggacaacagcagggagccccaaatgctggggttataactaatgcacctttgcagagacattttaaaccaaagaaggtggagtgtttggaagttgaaactacggatgtgacaggacatgagaggatacttctttcacaggcctgtttagaaatcagcgaggctcaagttccaagcaaaccattccaaaatgtggaattctgtgacttcagtaggcatgaacctgatggggaagcatttgaagacaaagatttggaaggcagaattgaaactgataccaaggttttggagatactatatgagtttcctagagtttttagttctgtcatgaaacctgagaatatgattgtaccaataaaactaagctctgattctgaaattgtacaacaaagcatgcaaacatcagatggaatattgaatcccagcagcggaggcatcaccactacttctgttcctggaagtccagatggtgtctttgatcaaacttgcgtagattttgaagttgagagtgtaggtggtatagccaatagtacaggtttcatcttagatcaaaaagatacagattccattcctgcaactatgggtcacatctctctgtcagagagcacaaatgacactgttagtccagtaatgattagagaatgtgagaagaatgacagcactgctgatgagttacatgtaaagcacgaacctcctgatacagctgtccttgctcatgaaacacatagagatagtggatttaagaatgtaggtgacattaccaataaagcatgtatgatggacactacaggtatgtcctgtagtgatcatgtaactgttgatagcccttatgtagttgcagttagaatagctgatgagacctctattaatacacgaagtttctcaaagtttgtaggaatgagtgcagatgcaacccctcttcatgtagctagaagtgggaatgacactgaagatttcagcaacccttctgcttgctcagatatttatggtgagagtatttcatctcattttacagagtcaacaggaaagttgatagagagcttgtcagattgtgcttcctccttacctataaaaaagattgctggtagtaattataacacttttttggactctgaactcagtatgttaaatgggacaaaagttctttcagacagtgccgtgggcattgacctgggtagtactggtgatacaacagaagcattgcacgaactaagaactgccgaagagttcaaaacagaagagcaagatgactcagggagtatagaatttggtgtatcttttcctgatagggaatcatcatctatggaaacatccatcgaaccaaaagcaactgaaacttctcacacagagggaattactgccattgaggagagctgggagtctatgtttaacgatgatggtgactgcctggatccacgtcttctacaagagttatcagggaataccaagagcagagagagcatccaggaacctagatctgattactacaatcatgaagttcctgatattgacctcagtgattgtgaattcccacatgtcattgaaatttatgactttccccaagaatttcatactgaagaccttctacgggttttctgcagttatcaaaagaaaggatttgatattaaatgggtggatgatacacatgccctaggagtattctccagtccaattacagctcgtgatgcgttgggtattaaacacaccatggtgaagattcgtcccttgtcacaggccacaagagcagccaaggccaaagctagagcttatgctgagttcctccagccagcaaaggagcgtcctgagacttcagcagccctagccagaaggttagtcatcagtgcccttggggttcgaagtaagcagagcaaaaccgaacgagaagcagagctcaagaaactgcaagaagccagagagagaaagcggttggaagccaagcaacgggaagacatctgggaaggcagagaccagtctacagtttgaacatcactcaatgaaagggataattccatgaatcagaaaatgtttccatagccttcagataagatgatccttccagagctctatgtacatgcagatgtgcatgttaaagagataaagtgatcgagacaaggactgactgggtatagaaggaagacagactcctgtcttcactcctaaatgcagttctttggaatcaccctactgtggtgggcgtagtagggagccatcagctaggaagaaacgtgggagatgtgaattccaagagttgcctggacagggcaagtcatgttagcgtgggtcacacttccaagatatttaaagcaaatacaaaacagaacagaggattcaaaccgcaagtatgggagatttaggccctgcagaggcagaccattccttagtatctcacaaagcagagtaatactggaggcagagtagggggtggttggagagcagttagtacaaagaggcagaacagtgtctggtttacttggcatacacagaatctgcactgccggttccagaactgcaaagttggtgaactacaggagatgtgggtatttagactccaaagtttatactgagctcagtgcctgggaccgctccagctgcactgcagccaggggggataccagcttcattcctcagagtaaaccaaccttgggagctgtgtgccagttccagtgtaagcagtaataccatgttgtaagagggaacattaaagcccattttatgacat

SEQ ID NO: 172894 - DNA, 941 bp, Homo sapiens
  Payload ID: 13979
  Gene Symbol: R3HCC1L
  Gene Name: R3H domain and coiled-coil containing 1-like
  Uniprot ID: Q7Z5L2
  ENST ID: ENST00000370586
  CDS Start-End: 196-750
agacggagttttgccatgttgtccaggctggtgtcgaaatcctgagctcaagtggtctgcctgcctcggcttcccaaagtgctgggattacaggtgaggctgctgtcagaaaggaacttttacacagtttgccttcagagacagtctatcggcatgttgtagagttttattactaagaaaataaatgttacttacatgttatcagggaataccaagagcagagagagcatccaggaacctagatctgattactacaatcatgaagttcctgatattgacctcagtgattgtgaattcccacatgtcattgaaatttatgactttccccaagaatttcatactgaagaccttctacgggttttctgcagttatcaaaagaaaggatttgatattaaatgggtggatgatacacatgccctaggagtattctccagtccaattacagctcgtgatgcgttgggtattaaacacaccatggtgaagattcgtcccttgtcacaggccacaagagcagccaaggccaaagctagagcttatgctgagttcctccagccagcaaaggagcgtcctgagacttcagcagccctagccagaaggttagtcatcagtgcccttggggttcgaagtaagcagagcaaaaccgaacgagaagcagagctcaagaaactgcaagaagccagagagagaaagcggttggaagccaagcaacgggaagacatctgggaaggcagagaccagtctacagtttgaacatcactcaatgaaagggataattccatgaatcagaaaatgtttccatagccttcagataagatgatccttccagagctctatgtacatgcagatgtgcatgttaaagagataaagtgatcgagacaaggactgactgggtatagaaggaagacagactcctgtcttcactcctaaatgcagttctttgg

SEQ ID NO: 172895 - DNA, 1397 bp, Homo sapiens
  Payload ID: 13979
  Gene Symbol: R3HCC1L
  Gene Name: R3H domain and coiled-coil containing 1-like
  Uniprot ID: Q7Z5L2
  ENST ID: ENST00000613938
  CDS Start-End: 109-663
tttcaggtgaggctgctgtcagaaaggaacttttacacagtttgccttcagagacagtctatcggcatgttgtagagttttattactaagaaaataaatgttacttacatgttatcagggaataccaagagcagagagagcatccaggaacctagatctgattactacaatcatgaagttcctgatattgacctcagtgattgtgaattcccacatgtcattgaaatttatgactttccccaagaatttcatactgaagaccttctacgggttttctgcagttatcaaaagaaaggatttgatattaaatgggtggatgatacacatgccctaggagtattctccagtccaattacagctcgtgatgcgttgggtattaaacacaccatggtgaagattcgtcccttgtcacaggccacaagagcagccaaggccaaagctagagcttatgctgagttcctccagccagcaaaggagcgtcctgagacttcagcagccctagccagaaggttagtcatcagtgcccttggggttcgaagtaagcagagcaaaaccgaacgagaagcagagctcaagaaactgcaagaagccagagagagaaagcggttggaagccaagcaacgggaagacatctgggaaggcagagaccagtctacagtttgaacatcactcaatgaaagggataattccatgaatcagaaaatgtttccatagccttcagataagatgatccttccagagctctatgtacatgcagatgtgcatgttaaagagataaagtgatcgagacaaggactgactgggtatagaaggaagacagactcctgtcttcactcctaaatgcagttctttggaatcaccctactgtggtgggcgtagtagggagccatcagctaggaagaaacgtgggagatgtgaattccaagagttgcctggacagggcaagtcatgttagcgtgggtcacacttccaagatatttaaagcaaatacaaaacagaacagaggattcaaaccgcaagtatgggagatttaggccctgcagaggcagaccattccttagtatctcacaaagcagagtaatactggaggcagagtagggggtggttggagagcagttagtacaaagaggcagaacagtgtctggtttacttggcatacacagaatctgcactgccggttccagaactgcaaagttggtgaactacaggagatgtgggtatttagactccaaagtttatactgagctcagtgcctgggaccgctccagctgcactgcagccaggggggataccagcttcattcctcagagtaaaccaaccttgggagctgtgtgccagttccagtgtaagcagtaataccatgttgtaagagggaacattaaagcccattttatgac

SEQ ID NO: 172896 - DNA, 3337 bp, Homo sapiens
  Payload ID: 13979
  Gene Symbol: R3HCC1L
  Gene Name: R3H domain and coiled-coil containing 1-like
  ENST ID: ENST00000612478
  CDS Start-End: 223-2601
tttcaggtgaggctgctgtcagaaaggaacttttacacagtttgccttcagagacagtctatcggcatgttgtagagttttattactaagaaaataaatgttacttacatgatggttttactcagcatttggtgtggtggatcttacataaacctttagaacttacattagagtgttcaagtcttctgagactccagagtcacctaagattgtggtggtgccatgcagcaagaatcagagagatgcagagttagagccagaaggcctgacatggcactttatgtacctaaagctcgtaggggtgcagtactccttaagacaggtgatgaagaagaaagctgtggttcacctaactctgtggtgaaagaaaagcaaaaagaaagttctctctcccaaaaagaagtctttaaagacaaaccggaggctcgaagactaaatatcaatcctgatagaaaggagcataattgtagagaagaaaagaaatcttcaacaaaattaagaatggacacatgccttcaaaaaacaaatagagtttgttctaagagaggaaccactgaatccaaagaagtattatcccaaggacaacagcagggagccccaaatgctggggttataactaatgcacctttgcagagacattttaaaccaaagaaggtggagtgtttggaagttgaaactacggatgtgacaggacatgagaggatacttctttcacaggcctgtttagaaatcagcgaggctcaagttccaagcaaaccattccaaaatgtggaattctgtgacttcagtaggcatgaacctgatggggaagcatttgaagacaaagatttggaaggcagaattgaaactgataccaaggttttggagatactatatgagtttcctagagtttttagttctgtcatgaaacctgagaatatgattgtaccaataaaactaagctctgattctgaaattgtacaacaaagcatgcaaacatcagatggaatattgaatcccagcagcggaggcatcaccactacttctgttcctggaagtccagatggtgtctttgatcaaacttgcgtagattttgaagttgagagtgtaggtggtatagccaatagtacaggtttcatcttagatcaaaaagatacagattccattcctgcaactatgggtcacatctctctgtcagagagcacaaatgacactgttagtccagtaatgattagagaatgtgagaagaatgacagcactgctgatgagttacatgtaaagcacgaacctcctgatacagctgtccttgctcatgaaacacatagagatagtggatttaagaatgtaggtgacattaccaataaagcatgtatgatggacactacaggtatgtcctgtagtgatcatgtaactgttgatagcccttatgtagttgcagttagaatagctgatgagacctctattaatacacgaagtttctcaaagtttgtaggaatgagtgcagatgcaacccctcttcatgtagctagaagtgggaatgacactgaagatttcagcaacccttctgcttgctcagatatttatggtgagagtatttcatctcattttacagagtcaacaggaaagttgatagagagcttgtcagattgtgcttcctccttacctataaaaaagattgctggtagtaattataacacttttttggactctgaactcagtatgttaaatgggacaaaagttctttcagacagtgccgtgggcattgacctgggtagtactggtgatacaacagaagcattgcacgaactaagaactgccgaagagttcaaaacagaagagcaagatgactcagggagtatagaatttggtgtatcttttcctgatagggaatcatcatctatggaaacatccatcgaaccaaaagcaactgaaacttctcacacagagggaattactgccattgaggagagctgggagtctatgtttaacgatgatggtgactgcctggatccacgtcttctacaagaggggattctgatgcacataaagcccgagaaccactgctcaaagttatcagggaataccaagagcagagagagcatccaggaacctagatctgattactacaatcatgaagttcctgatattgacctcagtgattgtgaattcccacatgtcattgaaatttatgactttccccaagaatttcatactgaagaccttctacgggttttctgcagttatcaaaagaaaggatttgatattaaatgggtggatgatacacatgccctaggagtattctccagtccaattacagctcgtgatgcgttgggtattaaacacaccatggtgaagattcgtcccttgtcacaggccacaagagcagccaaggccaaagctagagcttatgctgagttcctccagccagcaaaggagcgtcctgagacttcagcagccctagccagaaggttagtcatcagtgcccttggggttcgaagtaagcagagcaaaaccgaacgagaagcagagctcaagaaactgcaagaagccagagagagaaagcggttggaagccaagcaacgggaagacatctgggaaggcagagaccagtctacagtttgaacatcactcaatgaaagggataattccatgaatcagaaaatgtttccatagccttcagataagatgatccttccagagctctatgtacatgcagatgtgcatgttaaagagataaagtgatcgagacaaggactgactgggtatagaaggaagacagactcctgtcttcactcctaaatgcagttctttggaatcaccctactgtggtgggcgtagtagggagccatcagctaggaagaaacgtgggagatgtgaattccaagagttgcctggacagggcaagtcatgttagcgtgggtcacacttccaagatatttaaagcaaatacaaaacagaacagaggattcaaaccgcaagtatgggagatttaggccctgcagaggcagaccattccttagtatctcacaaagcagagtaatactggaggcagagtagggggtggttggagagcagttagtacaaagaggcagaacagtgtctggtttacttggcatacacagaatctgcactgccggttccagaactgcaaagttggtgaactacaggagatgtgggtatttagactccaaagtttatactgagctcagtgcctgggaccgctccagctgcactgcagccaggggggataccagcttcattcctcagagtaaaccaaccttgggagctgtgtgccagttccagtgtaagcagtaataccatgttgtaagagggaacattaaagcccattttatgacat

SEQ ID NO: 172897 - DNA, 4648 bp, Homo sapiens
  Payload ID: 13980
  Gene Symbol: R3HDM1
  Gene Name: R3H domain containing 1
  Uniprot ID: Q15032
  ENST ID: ENST00000264160
  CDS Start-End: 371-3670
cggtgtccgggctggtgatggggttaattccctttcgtaagactcttacttgcacccacccagccccgccgtcgccccgccgcgccgcgctccaaccgcctcctcctcctcagtaacgcgggccacggaaaggtatgatatatttgatccaagacagtccattccagtccgggaatctacagtggtgacaaggacatgggactcctcctgccagattacagatggttcactacagttgacatcctggctgacaactgtgaaaaagaaccttggattattttattttatttttgtgggacaccacaatcccaaatccaaaggacgcatcaggcttcaagctccctgtagaattcgaaaataaccttttctaatgaggatgtctgatactgttactgtaaaagatgaaactgcaacaatgaaggatttggaggcagaagtgaaagatacaaccagagttgaaaatcttatcaaatcagaaaactatgggaagattttggtagagaagaatgaacattgtattgagaacaatatagatttgcagcggccattgcagtcatttggacagacaggaaaaaggtctaagtcaagctcaaagttaaagctagttcggagccttgcagtgtgtgaagaatctccaccaccccctgcaccagagatatcacaggagaaccaggagaaaattcagatccagttaacacaatcatttgagaaagaagagaagccctcaaaagatgaagcagaaaaagaaaaggccagtgataagttgcccagaaaaatgttatcaagagattccagtcaagaatacactgattcaactggcatagatctacatgaatttttagtaaatacattaaaaaacaatcccagggacagaatgatgctgctgaaattggaacaagaaattttagatttcattggtaataatgagtctccacgtaaaaaattccccccaatgacatcttaccataggatgctattacacagagtagccgcttactttggattagaccacaatgttgatcagagtgggaagtctgtcatagtaaacaaaactagcaatacaagaatacctgatcagaaatttaatgaacatattaaggatgataaaggtgaagactttcagaaacgttatatcctcaagagagataactctagctttgacaaagatgataaccagatgagaatacgtttgaaagatgacagaagaagcaaatctatagaagaaagagaagaagagtaccagagagccagagaccgaatattttcccaagattccctgtgttcccaagagaattacattattgacaaaagactccaagacgaggatgccagtagtacccagcagaggcgccagatatttagagttaataaagatgcttcagggagatctacaaatagccatcaaagcagcactgagaatgagttgaagtactcggaaccacgaccctggagcagcacagattcagacagctctcttcgaaacctgaaacctgctgtaaccaaagccagcagcttcagtggaatctcagtcctgacaagaggtgatagttctggaagcagcaaaagcataggcaggctttcaaaaacaggttctgagtcttctggtagtgtagggtcatctacaggctctctttctcacatccagcagcctcttccaggtacagctctcagccagtcttctcatggcgcacctgtcgtctatccaactgtcagcactcatagttctctttcctttgatggtggcctaaatgggcaagtcgcatctcctagcactagcttctttttgcttcccttggaagcggcaggcataccacctggcagtattctgatcaacccacaaacaggtcagcccttcataaacccagatgggagtccagttgtgtataatcctcctatgactcaacaaccagttagatcccaagtgcctggacctccacagccacctctgccagccccacctcaacaaccagcagctaatcacattttctcacaggataacctagggtctcagtttagccacatgagtcttgctcgccagccatctgctgatggttctgaccctcatgccgccatgttccagtccactgtggttcttcagtctccacagcagtctggttatatcatgacagcagcccctccaccacatcctcctccaccgccaccaccaccacctcctcctcctcccctaccacctgggcagccagtccctactgctggatatcctgcctctggtcatcctgtcagccagcctgtgctccagcagcagggatatattcagcagccatcaccacagatgccagcctgttattgcgctccaggccactatcactccagccaacctcagtatcgcccagtcccttctgttcattacaattcacatctaaaccaaccactgccacaacctgcgcagcagacaggttatcaagttatacccaaccagcagcaaaactaccaaggaatagttggagttcagcaaccccagagtcagagcctagtcagtggccaacccaacagcattggaaatcagattcaaggagtggtcatcccctatacttcagtgccaacatatcaggtttcactgcctcaaggttctcaaggaattccccatcagacttatcaacagcctgttatgttccctaatcagtctaatcaaggatctatgcccacaacaggaatgcctgtttactatagtgtcattccacctggtcaacaaaacaatttaagctcttcagtaggttacctgcaacatccaggatcagaacaagtacaatttcctcgaaccacttcaccatgcagttcccagcagcttcaaggccaccaatgtacagctggaccaccaccgccacctggtggggggatggtgatgatgcagctcagtgtaccaaacaatccacaatcttgtgcccactcacccccgcagtggaaacaaaacaaatattactgtgatcaccagagaggacagaagtgtgtagaatttagcagtgtagacaatattgtccagcacagccctcaactcagtagccccattatttcaccagctcagtcgccagcaccagctcagctgtccaccctgaaaactgtacgtccctctggaccaccactttccatcatgccccaattttctagaccttttgtccccgggcaaggagattccaggtatccattacttggccagccactgcagtacaatcctcctgctgttctgcacggacacattccaaaccaacagggtcagcctggcagcaggcatggaaaccgaggaaggagacaagctaaaaaagctgcatccacagaccttggagcaggagaaacagttgttgggaaggtcttggaaattactgaactaccagatggaataactcgcatggaagctgaaaagctttttggggaactctttaaaattggcgccaagatccggtggctccgggacccccagtcccaaccacgtcgtcaccccctctgctgtggcagtggggacaacactgccaaccctgaacgctctaaacccagtgacttggcctccacctacaccgtcttagccacattcccctccatttcagctgcacagaatgcactgaagaaacaaattaactcagttaacaagtttaagctgagaacaagcaagaagcactatgactttcacattttggaaagggcaagttctcagtaacagccacctttggacccttcgcctttatggttcccctgccctctcccatctttgattggcttggtatttggagcttctgttaacattatagagactcctaggatgtgtgttcatggcattatagcttttgaagaaaggccagtgatccagcaaagggggaaaaatatgcatttcaccccacatgactaggaatccacatcagaatgatacagagttagcaggtttttctaaggaaatgccattcaaatgcctcctaacttttatagttattttgttttatatttctaaattcttgtatcagatccaaagctctattgtacagcaaattattcttcaaaatgattataaccagttgcaccctgtatttctttttgcagccagcacaatgtgacccaacttaaaatttgggggaaaaagaatgcaggagtgaaataaccaagtcaaaaccatgtactatctccttgggggttagggatgctaagaagagcccacaaatagaggattactcttcccctgaatctctaaactcagaaacaattaccaaaaaatacataactcttccttgtagggccctttccttattcatttaggtagtgtgaacattaagtataaaataaattatgttcttaatgcctcttaaaccacttacattcaaaggggaacagaaatcattctaagcaggaaaatacttccactttttttttttcaagtatctctctaataactaaatgccacttatttgcattctccttgtggattttttgtcacctaaggaaatgcatttgatgagtgctggaaacttcttaagtgctttacagtttgttttcattgtttgcagcggatcactggacatcaaagattcattgcacttatgaacaaggaaccttcttttcaatttctgtgtaatttgcaaggctgtacaatgtgtgctgatgcaagcctttttcagttcaagagaataaatgtttacaaatatag

SEQ ID NO: 172898 - DNA, 4272 bp, Homo sapiens
  Payload ID: 13980
  Gene Symbol: R3HDM1
  Gene Name: R3H domain containing 1
  Uniprot ID: Q15032
  ENST ID: ENST00000409478
  CDS Start-End: 383-3298
tgccgctggagccggtgtccgggctggtgatggggttaattccctttcgtaagactcttacttgcacccacccagccccgccgtcgccccgccgcgccgcgctccaaccgcctcctcctcctcagtaacgcgggccacggaaaggtatgatatatttgatccaagacagtccattccagtccgggaatctacagtggtgacaaggacatgggactcctcctgccagattacagatggttcactacagttgacatcctggctgacaactgtgaaaaagaaccttggattattttattttatttttgtgggacaccacaatcccaaatccaaaggacgcatcaggcttcaagctccctgtagaattcgaaaataaccttttctaatgaggatgtctgatactgttactgtaaaagatgaaactgcaacaatgaaggatttggaggcagaagtgaaagatacaaccagagttgaaaatcttatcaaatcagaaaactatgggaagattttggtagagaagaatgaacattgtattgagaacaatatagatttgcaggagaaaattcagatccagttaacacaatcatttgagaaagaagagaagccctcaaaagatgaagcagaaaaagaaaaggccagtgataagttgcccagaaaaatgttatcaagagattccagtcaagaatacactgattcaactggcatagatctacatgaatttttagtaaatacattaaaaaacaatcccagggacagaatgatgctgctgaaattggaacaagaaattttagatttcattggtaataatgagtctccacgtaaaaaattccccccaatgacatcttaccataggatgctattacacagagtagccgcttactttggattagaccacaatgttgatcagagtgggaagtctgtcatagtaaacaaaactagcaatacaagaatacctgatcagaaatttaatgaacatattaaggatgataaaggtgaagactttcagaaacgttatatcctcaagagagataactctagctttgacaaagatgataaccagatgagaatacgtttgaaagatgacagaagaagcaaatctatagaagaaagagaagaagagtaccagagagccagagaccgaatattttcccaagattccctgtgttcccaagagaattacattattgacaaaagactccaagacgaggatgccagtagtacccagcagaggcgccagatatttagagttaataaagatgcttcagggagatctacaaatagccatcaaagcagcactgagaatgagttgaagtactcggaaccacgaccctggagcagcacagattcagacagctctcttcgaaacctgaaacctgctgtaaccaaagccagcagcttcagtggaatctcagtcctgacaagaggtgatagttctggaagcagcaaaagcataggcaggctttcaaaaacaggtcagcccttcataaacccagatgggagtccagttgtgtataatcctcctatgactcaacaaccagttagatcccaagtgcctggacctccacagccacctctgccagccccacctcaacaaccagcagctaatcacattttctcacagcaggataacctagggtctcagtttagccacatgagtcttgctcgccagccatctgctgatggttctgaccctcatgccgccatgttccagtccactgtggttcttcagtctccacagcagtctggttatatcatgacagcagcccctccaccacatcctcctccaccgccaccaccaccacctcctcctcctcccctaccacctgggcagccagtccctactgctggatatcctgcctctggtcatcctgtcagccagcctgtgctccagcagcagggatatattcagcagccatcaccacagatgccagcctgttattgcgctccaggccactatcactccagccaacctcagtatcgcccagtcccttctgttcattacaattcacatctaaaccaaccactgccacaacctgcgcagcagacaggttatcaagttatacccaaccagcagcaaaactaccaaggaatagttggagttcagcaaccccagagtcagagcctagtcagtggccaacccaacagcattggaaatcagattcaaggagtggtcatcccctatacttcagtgccaacatatcaggtttcactgcctcaaggttctcaaggaattccccatcagacttatcaacagcctgttatgttccctaatcagtctaatcaaggatctatgcccacaacaggaatgcctgtttactatagtgtcattccacctggtcaacaaaacaatttaagctcttcagtaggttacctgcaacatccaggatcagaacaagtacaatttcctcgaaccacttcaccatgcagttcccagcagcttcaaggccaccaatgtacagctggaccaccaccgccacctggtggggggatggtgatgatgcagctcagtgtaccaaacaatccacaatcttgtgcccactcacccccgcagtggaaacaaaacaaatattactgtgatcaccagagaggacagaagtgtgtagaatttagcagtgtagacaatattgtccagcacagccctcaactcagtagccccattatttcaccagctcagtcgccagcaccagctcagctgtccaccctgaaaactgtacgtccctctggaccaccactttccatcatgccccaattttctagaccttttgtccccgggcaaggagattccaggtatccattacttggccagccactgcagtacaatcctcctgctgttctgcacggacacattccaaaccaacagggtcagcctggcagcaggcatggaaaccgaggaaggagacaagctaaaaaagctgcatccacagaccttggagcaggagaaacagttgttgggaaggtcttggaaattactgaactaccagatggaataactcgcatggaagctgaaaagctttttggggaactctttaaaattggcgccaagatccggtggctccgggacccccagtcccaaccacgtcgtcaccccctctgctgtggcagtggggacaacactgccaaccctgaacgctctaaacccagtgacttggcctccacctacaccgtcttagccacattcccctccatttcagctgcacagaatgcactgaagaaacaaattaactcagttaacaagtttaagctgagaacaagcaagaagcactatgactttcacattttggaaagggcaagttctcagtaacagccacctttggacccttcgcctttatggttcccctgccctctcccatctttgattggcttggtatttggagcttctgttaacattatagagactcctaggatgtgtgttcatggcattatagcttttgaagaaaggccagtgatccagcaaagggggaaaaatatgcatttcaccccacatgactaggaatccacatcagaatgatacagagttagcaggtttttctaaggaaatgccattcaaatgcctcctaacttttatagttattttgttttatatttctaaattcttgtatcagatccaaagctctattgtacagcaaattattcttcaaaatgattataaccagttgcaccctgtatttctttttgcagccagcacaatgtgacccaacttaaaatttgggggaaaaagaatgcaggagtgaaataaccaagtcaaaaccatgtactatctccttgggggttagggatgctaagaagagcccacaaatagaggattactcttcccctgaatctctaaactcagaaacaattaccaaaaaatacataactcttccttgtagggccctttccttattcatttaggtagtgtgaacattaagtataaaataaattatgttcttaatgcctcttaaaccacttacattcaaaggggaacagaaatcattctaagcaggaaaatacttccactttttttttttcaagtatctctctaataactaaatgccacttatttgcattctccttgtggattttttgtcacctaaggaaatgcatttgatgagtgctggaaacttcttaagtgctttacagtttgttttcattgtttgcagcggatcactggacatcaaagattcattgcacttatgaacaaggaaccttcttttcaatttctgtgtaatttgcaaggctgtacaatgtgtgctgatgcaagcctttttcagttcaagagaataaatgtttacaaat

SEQ ID NO: 172899 - DNA, 4442 bp, Homo sapiens
  Payload ID: 13980
  Gene Symbol: R3HDM1
  Gene Name: R3H domain containing 1
  Uniprot ID: Q15032
  ENST ID: ENST00000410054
  CDS Start-End: 332-3466
gcatttcagatattctgggtggtgactggctagagtgttactgacatcacaacatacagctgttgactttctattgtctgagtcctcctcggcaagtgctttagactgctctagcaggcactcccaatgccagactaatcagctggatgtgtgcagtgagctctatagaggagcaatgcagagcatcagtttacaggtactatggaaagaacatctccttaactctgtatgatgaagcaaataccaatacaatgaaggccacggaaaggtatgatatatttgatccaagacagtccattccagtccgggaatctacagtggtgacaaggacatgggactcctcctgccagattacagatggttcactacagttgacatcctggctgacaactgtgaaaaagaaccttggattattttattttatttttgtgggacaccacaatcccaaatccaaaggacgcatcaggagaaaattcagatccagttaacacaatcatttgagaaagaagagaagccctcaaaagatgaagcagaaaaagaaaaggccagtgataagttgcccagaaaaatgttatcaagagattccagtcaagaatacactgattcaactggcatagatctacatgaatttttagtaaatacattaaaaaacaatcccagggacagaatgatgctgctgaaattggaacaagaaattttagatttcattggtaataatgagtctccacgtaaaaaattccccccaatgacatcttaccataggatgctattacacagagtagccgcttactttggattagaccacaatgttgatcagagtgggaagtctgtcatagtaaacaaaactagcaatacaagaatacctgatcagaaatttaatgaacatattaaggatgataaaggtgaagactttcagaaacgttatatcctcaagagagataactctagctttgacaaagatgataaccagatgagaatacgtttgaaagatgacagaagaagcaaatctatagaagaaagagaagaagagtaccagagagccagagaccgaatattttcccaagattccctgtgttcccaagagaattacattattgacaaaagactccaagacgaggatgccagtagtacccagcagaggcgccagatatttagagttaataaagatgcttcagggagatctacaaatagccatcaaagcagcactgagaatgagttgaagtactcggaaccacgaccctggagcagcacagattcagacagctctcttcgaaacctgaaacctgctgtaaccaaagccagcagcttcagtggaatctcagtcctgacaagaggtgatagttctggaagcagcaaaagcataggcaggctttcaaaaacaggttctgagtcttctggtagtgtagggtcatctacaggctctctttctcacatccagcagcctcttccaggtacagctctcagccagtcttctcatggcgcacctgtcgtctatccaactgtcagcactcatagttctctttcctttgatggtggcctaaatgggcaagtcgcatctcctagcactagcttctttttgcttcccttggaagcggcaggcataccacctggcagtattctgatcaacccacaaacaggtcagcccttcataaacccagatgggagtccagttgtgtataatcctcctatgactcaacaaccagttagatcccaagtgcctggacctccacagccacctctgccagccccacctcaacaaccagcagctaatcacattttctcacagcaggataacctagggtctcagtttagccacatgagtcttgctcgccagccatctgctgatggttctgaccctcatgccgccatgttccagtccactgtggttcttcagtctccacagcagtctggttatatcatgacagcagcccctccaccacatcctcctccaccgccaccaccaccacctcctcctcctcccctaccacctgggcagccagtccctactgctggatatcctgcctctggtcatcctgtcagccagcctgtgctccagcagcagggatatattcagcagccatcaccacagatgccagcctgttattgcgctccaggccactatcactccagccaacctcagtatcgcccagtcccttctgttcattacaattcacatctaaaccaaccactgccacaacctgcgcagcagacaggttatcaagttatacccaaccagcagcaaaactaccaaggaatagttggagttcagcaaccccagagtcagagcctagtcagtggccaacccaacagcattggaaatcagattcaaggagtggtcatcccctatacttcagtgccaacatatcaggtttcactgcctcaaggttctcaaggaattccccatcagacttatcaacagcctgttatgttccctaatcagtctaatcaaggatctatgcccacaacaggaatgcctgtttactatagtgtcattccacctggtcaacaaaacaatttaagctcttcagtaggttacctgcaacatccaggatcagaacaagtacaatttcctcgaaccacttcaccatgcagttcccagcagcttcaaggccaccaatgtacagctggaccaccaccgccacctggtggggggatggtgatgatgcagctcagtgtaccaaacaatccacaatcttgtgcccactcacccccgcagtggaaacaaaacaaatattactgtgatcaccagagaggacagaagtgtgtagaatttagcagtgtagacaatattgtccagcacagccctcaactcagtagccccattatttcaccagctcagtcgccagcaccagctcagctgtccaccctgaaaactgtacgtccctctggaccaccactttccatcatgccccaattttctagaccttttgtccccgggcaaggagattccaggtatccattacttggccagccactgcagtacaatcctcctgctgttctgcacggacacattccaaaccaacagggtcagcctggcagcaggcatggaaaccgaggaaggagacaagctaaaaaagctgcatccacagaccttggagcaggagaaacagttgttgggaaggtcttggaaattactgaactaccagatggaataactcgcatggaagctgaaaagctttttggggaactctttaaaattggcgccaagatccggtggctccgggacccccagtcccaaccacgtcgtcaccccctctgctgtggcagtggggacaacactgccaaccctgaacgctctaaacccagtgacttggcctccacctacaccgtcttagccacattcccctccatttcagctgcacagaatgcactgaagaaacaaattaactcagttaacaagtttaagctgagaacaagcaagaagcactatgactttcacattttggaaagggcaagttctcagtaacagccacctttggacccttcgcctttatggttcccctgccctctcccatctttgattggcttggtatttggagcttctgttaacattatagagactcctaggatgtgtgttcatggcattatagcttttgaagaaaggccagtgatccagcaaagggggaaaaatatgcatttcaccccacatgactaggaatccacatcagaatgatacagagttagcaggtttttctaaggaaatgccattcaaatgcctcctaacttttatagttattttgttttatatttctaaattcttgtatcagatccaaagctctattgtacagcaaattattcttcaaaatgattataaccagttgcaccctgtatttctttttgcagccagcacaatgtgacccaacttaaaatttgggggaaaaagaatgcaggagtgaaataaccaagtcaaaaccatgtactatctccttgggggttagggatgctaagaagagcccacaaatagaggattactcttcccctgaatctctaaactcagaaacaattaccaaaaaatacataactcttccttgtagggccctttccttattcatttaggtagtgtgaacattaagtataaaataaattatgttcttaatgcctcttaaaccacttacattcaaaggggaacagaaatcattctaagcaggaaaatacttccactttttttttttcaagtatctctctaataactaaatgccacttatttgcattctccttgtggattttttgtcacctaaggaaatgcatttgatgagtgctggaaacttcttaagtgctttacagtttgttttcattgtttgcagcggatcactggacatcaaagattcattgcacttatgaacaaggaaccttcttttcaatttctgtgtaatttgcaaggctgtacaatgtgtgctgatgcaagcctttttcagttcaagagaataaatgtttacaaatat

SEQ ID NO: 172900 - DNA, 3673 bp, Homo sapiens
  Payload ID: 13980
  Gene Symbol: R3HDM1
  Gene Name: R3H domain containing 1
  Uniprot ID: Q15032
  ENST ID: ENST00000409606
  CDS Start-End: 320-3622
agtttacaggtactatggaaagaacatctccttaactctgtatgatgaagcaaataccaatacaatgaaggccacggaaaggtatgatatatttgatccaagacagtccattccagtccgggaatctacagtggtgacaaggacatgggactcctcctgccagattacagatggttcactacagttgacatcctggctgacaactgtgaaaaagaaccttggattattttattttatttttgtgggacaccacaatcccaaatccaaaggacgcatcaggcttcaagctccctgtagaattcgaaaataaccttttctaatgaggatgtctgatactgttactgtaaaagatgaaactgcaacaatgaaggatttggaggcagaagtgaaagatacaaccagagttgaaaatcttatcaaatcagaaaactatgggaagattttggtagagaagaatgaacattgtattgagaacaatatagatttgcagcggccattgcagtcatttggacagacaggaaaaaggtctaagtcaagctcaaagttaaagctagttcggagccttgcagtgtgtgaagaatctccaccaccccctgcaccagagatatcacaggagaaccaggagaaaattcagatccagttaacacaatcatttgagaaagaagagaagccctcaaaagatgaagcagaaaaagaaaaggccagtgataagttgcccagaaaaatgttatcaagagattccagtcaagaatacactgattcaactggcatagatctacatgaatttttagtaaatacattaaaaaacaatcccagggacagaatgatgctgctgaaattggaacaagaaattttagatttcattggtaataatgagtctccacgtaaaaaattccccccaatgacatcttaccataggatgctattacacagagtagccgcttactttggattagaccacaatgttgatcagagtgggaagtctgtcatagtaaacaaaactagcaatacaagaatacctgatcagaaatttaatgaacatattaaggatgataaaggtgaagactttcagaaacgttatatcctcaagagagataactctagctttgacaaagatgataaccagatgagaatacgtttgaaagatgacagaagaagcaaatctatagaagaaagagaagaagagtaccagagagccagagaccgaatattttcccaagattccctgtgttcccaagagaattacattattgacaaaagactccaagacgaggatgccagtagtacccagcagaggcgccagatatttagagttaataaagatgcttcagggagatctacaaatagccatcaaagcagcactgagaatgagttgaagtactcggaaccacgaccctggagcagcacagattcagacagctctcttcgaaacctgaaacctgctgtaaccaaagccagcagcttcagtggaatctcagtcctgacaagaggtgatagttctggaagcagcaaaagcataggcaggctttcaaaaacaggttctgagtcttctggtagtgtagggtcatctacaggctctctttctcacatccagcagcctcttccaggtacagctctcagccagtcttctcatggcgcacctgtcgtctatccaactgtcagcactcatagttctctttcctttgatggtggcctaaatgggcaagtcgcatctcctagcactagcttctttttgcttcccttggaagcggcaggcataccacctggcagtattctgatcaacccacaaacaggtcagcccttcataaacccagatgggagtccagttgtgtataatcctcctatgactcaacaaccagttagatcccaagtgcctggacctccacagccacctctgccagccccacctcaacaaccagcagctaatcacattttctcacagcaggataacctagggtctcagtttagccacatgagtcttgctcgccagccatctgctgatggttctgaccctcatgccgccatgttccagtccactgtggttcttcagtctccacagcagtctggttatatcatgacagcagcccctccaccacatcctcctccaccgccaccaccaccacctcctcctcctcccctaccacctgggcagccagtccctactgctggatatcctgcctctggtcatcctgtcagccagcctgtgctccagcagcagggatatattcagcagccatcaccacagatgccagcctgttattgcgctccaggccactatcactccagccaacctcagtatcgcccagtcccttctgttcattacaattcacatctaaaccaaccactgccacaacctgcgcagcagacaggttatcaagttatacccaaccagcagcaaaactaccaaggaatagttggagttcagcaaccccagagtcagagcctagtcagtggccaacccaacagcattggaaatcagattcaaggagtggtcatcccctatacttcagtgccaacatatcaggtttcactgcctcaaggttctcaaggaattccccatcagacttatcaacagcctgttatgttccctaatcagtctaatcaaggatctatgcccacaacaggaatgcctgtttactatagtgtcattccacctggtcaacaaaacaatttaagctcttcagtaggttacctgcaacatccaggatcagaacaagtacaatttcctcgaaccacttcaccatgcagttcccagcagcttcaaggccaccaatgtacagctggaccaccaccgccacctggtggggggatggtgatgatgcagctcagtgtaccaaacaatccacaatcttgtgcccactcacccccgcagtggaaacaaaacaaatattactgtgatcaccagagaggacagaagtgtgtagaatttagcagtgtagacaatattgtccagcacagccctcaactcagtagccccattatttcaccagctcagtcgccagcaccagctcagctgtccaccctgaaaactgtacgtccctctggaccaccactttccatcatgccccaattttctagaccttttgtccccgggcaaggagattccaggtatccattacttggccagccactgcagtacaatcctcctgctgttctgcacggacacattccaaaccaacagggtcagcctggcagcaggcatggaaaccgaggaaggagacaagctaaaaaagctgcatccacagaccttggagcaggagaaacagttgttgggaaggtcttggaaattactgaactaccagatggaataactcgcatggaagctgaaaagctttttggggaactctttaaaattggcgccaagatccggtggctccgggacccccagtcccaaccacgtcgtcaccccctctgctgtggcagtggggacaacactgccaaccctgaacgctctaaacccagtgacttggcctccacctacaccgtcttagccacattcccctccatttcagctgcacagaatgcactgaagaaacaaattaactcagttaacaagtttaagctgagaacaagcaagaagcactatgactttcacattttggaaagggcaagttctcagtaacagccacctttggacccttcgcctttatggttcccctgccctctcccatct

SEQ ID NO: 172901 - DNA, 581 bp, Homo sapiens
  Payload ID: 13980
  Gene Symbol: R3HDM1
  Gene Name: R3H domain containing 1
  ENST ID: ENST00000425804
  CDS Start-End: 1-581
taataaagatgcttcagggagatctacaaatagccatcaaagcagcactgagaatgagttgaagtactcggaaccacgaccctggagcagcacagattcagacagctctcttcgaaacctgaaacctgctgtaaccaaagccagcagcttcagtggaatctcagtcctgacaagaggtgatagttctggaagcagcaaaagcataggcaggctttcaaaaacaggtcagcccttcataaacccagatgggagtccagttgtgtataatcctcctatgactcaacaaccagttagatcccaagtgcctggacctccacagccacctctgccagccccacctcaacaaccagcagctaatcacattttctcacaggataacctagggtctcagtttagccacatgagtcttgctcgccagccatctgctgatggttctgaccctcatgccgccatgttccagtccactgtggttcttcagtctccacagcagtctggttatatcatgacagcagcccctccaccacatcctcctccaccgccaccaccaccacctcctcctcctcccctaccacctgggcagc

SEQ ID NO: 172902 - DNA, 556 bp, Homo sapiens
  Payload ID: 13980
  Gene Symbol: R3HDM1
  Gene Name: R3H domain containing 1
  ENST ID: ENST00000441871
  CDS Start-End: 1-556
cattattgacaaaagactccaagacgaggatgccagtagtacccagcagaggcgccagatatttagagttaataaagatgcttcagggagatctacaaatagccatcaaagcagcactgagaatgagttgaagtactcggaaccacgaccctggagcagcacagattcagacagctctcttcgaaacctgaaacctgctgtaaccaaagccagcagcttcagtggaatctcagtcctgacaagaggtgatagttctggaagcagcaaaagcataggcaggctttcaaaaacaggttctgagtcttctggtagtgtagggtcatctacaggctctctttctcacatccagcagcctcttccaggtcagcccttcataaacccagatgggagtccagttgtgtataatcctcctatgactcaacaaccagttagatcccaagtgcctggacctccacagccacctctgccagccccacctcaacaaccagcagctaatcacattttctcacagcaggataacctagggtctcagtttagccacatgagtcttgctcgc

SEQ ID NO: 172903 - DNA, 3443 bp, Homo sapiens
  Payload ID: 13980
  Gene Symbol: R3HDM1
  Gene Name: R3H domain containing 1
  ENST ID: ENST00000429703
  CDS Start-End: 1-2470
caacagactccaagacgaggatgccagtagtacccagcagaggcgccagatatttagagttaataaagatgcttcagggagatctacaaatagccatcaaagcagcactgagaatgagttgaagtactcggaaccacgaccctggagcagcacagattcagacagctctcttcgaaacctgaaacctgctgtaaccaaagccagcagcttcagtggaatctcagtcctgacaagaggtgatagttctggaagcagcaaaagcataggcaggctttcaaaaacaggttctgagtcttctggtagtgtagggtcatctacaggctctctttctcacatccagcagcctcttccaggtacagctctcagccagtcttctcatggcgcacctgtcgtctatccaactgtcagcactcatagttctctttcctttgatggtggcctaaatgggcaagtcgcatctcctagcactagcttctttttgcttcccttggaagcggcaggcataccacctggcagtattctgatcaacccacaaacaggtcagcccttcataaacccagatgggagtccagttgtgtataatcctcctatgactcaacaaccagttagatcccaagtgcctggacctccacagccacctctgccagccccacctcaacaaccagcagctaatcacattttctcacagcctgttcatcctctgcagtcctcttcacagcctgttcagtactctacagccccttacccatccccgttcctgccagtctcacccacccagcaatactctgtgcaggataacctagggtctcagtttagccacatgagtcttgctcgccagccatctgctgatggttctgaccctcatgccgccatgttccagtccactgtggttcttcagtctccacagcagtctggttatatcatgacagcagcccctccaccacatcctcctccaccgccaccaccaccacctcctcctcctcccctaccacctgggcagccagtccctactgctggatatcctgcctctggtcatcctgtcagccagcctgtgctccagcagcagggatatattcagcagccatcaccacagatgccagcctgttattgcgctccaggccactatcactccagccaacctcagtatcgcccagtcccttctgttcattacaattcacatctaaaccaaccactgccacaacctgcgcagcagacaggttatcaagttatacccaaccagcagcaaaactaccaaggaatagttggagttcagcaaccccagagtcagagcctagtcagtggccaacccaacagcattggaaatcagattcaaggagtggtcatcccctatacttcagtgccaacatatcaggtttcactgcctcaaggttctcaaggaattccccatcagacttatcaacagcctgttatgttccctaatcagtctaatcaaggatctatgcccacaacaggaatgcctgtttactatagtgtcattccacctggtcaacaaaacaatttaagctcttcagtaggttacctgcaacatccaggatcagaacaagtacaatttcctcgaaccacttcaccatgcagttcccagcagcttcaaggccaccaatgtacagctggaccaccaccgccacctggtggggggatggtgatgatgcagctcagtgtaccaaacaatccacaatcttgtgcccactcacccccgcagtggaaacaaaacaaatattactgtgatcaccagagaggacagaagtgtgtagaatttagcagtgtagacaatattgtccagcacagccctcaactcagtagccccattatttcaccagctcagtcgccagcaccagctcagctgtccaccctgaaaactgtacgtccctctggaccaccactttccatcatgccccaattttctagaccttttgtccccgggcaaggagattccaggtatccattacttggccagccactgcagtacaatcctcctgctgttctgcacggacacattccaaaccaacagggtcagcctggcagcaggcatggaaaccgaggaaggagacaagctaaaaaagctgcatccacagaccttggagcaggagaaacagttgttgggaaggtcttggaaattactgaactaccagatggaataactcgcatggaagctgaaaagctttttggggaactctttaaaattggcgccaagatccggtggctccgggacccccagtcccaaccacgtcgtcaccccctctgctgtggcagtggggacaacactgccaaccctgaacgctctaaacccagtgacttggcctccacctacaccgtcttagccacattcccctccatttcagctgcacagaatgcactgaagaaacaaattaactcagttaacaagtttaagctgagaacaagcaagaagcactatgactttcacattttggaaagggcaagttctcagtaacagccacctttggacccttcgcctttatggttcccctgccctctcccatctttgattggcttggtatttggagcttctgttaacattatagagactcctaggatgtgtgttcatggcattatagcttttgaagaaaggccagtgatccagcaaagggggaaaaatatgcatttcaccccacatgactaggaatccacatcagaatgatacagagttagcaggtttttctaaggaaatgccattcaaatgcctcctaacttttatagttattttgttttatatttctaaattcttgtatcagatccaaagctctattgtacagcaaattattcttcaaaatgattataaccagttgcaccctgtatttctttttgcagccagcacaatgtgacccaacttaaaatttgggggaaaaagaatgcaggagtgaaataaccaagtcaaaaccatgtactatctccttgggggttagggatgctaagaagagcccacaaatagaggattactcttcccctgaatctctaaactcagaaacaattaccaaaaaatacataactcttccttgtagggccctttccttattcatttaggtagtgtgaacattaagtataaaataaattatgttcttaatgcctcttaaaccacttacattcaaaggggaacagaaatcattctaagcaggaaaatacttccactttttttttttcaagtatctctctaataactaaatgccacttatttgcattctccttgtggattttttgtcacctaaggaaatgcatttgatgagtgctggaaacttcttaagtgctttacagtttgttttcattgtttgcagcggatcactggacatcaaagattcattgcacttatgaacaaggaaccttcttttcaatttctgtgtaatttgcaaggctgtacaatgtgtgctgatgcaagcctttttcagttcaagagaataaatgtttacaaa

SEQ ID NO: 172904 - DNA, 582 bp, Homo sapiens
  Payload ID: 13980
  Gene Symbol: R3HDM1
  Gene Name: R3H domain containing 1
  ENST ID: ENST00000438014
  CDS Start-End: 433-582
gtccgggctggtgatggggttaattccctttcgtaagactcttacttgcacccacccagccccgccgtcgccccgccgcgccgcgctccaaccgcctcctcctcctcagtaacgcggtttcaacagtaagaaactaaatcactgccttgtacaataaaaagctctatgttggggtgatcagacccaacaccaggtcatgggggcgatgagtccggtggagtcaaaggaatgagaaaaagacagtttgagagagaaagtgggaccggggagcctacgctatttattggtgatcaaacaaagaaacagggcgtattggtgacctctcggaagaaagggataaggagtcgtcacttggccggccacggaaaggtatgatatatttgatccaagacagtccattccagtccgggaatctacagtggtgacaaggacatgggactcctcctgccagattacagatggttcactacagttgacatcctggctgacaactgtgaaaaagaaccttggattattttattttatttttgtgggacaccacaatcccaaatccaaaggacgcatcaggcttcaagctccctg

SEQ ID NO: 172905 - DNA, 851 bp, Homo sapiens
  Payload ID: 13980
  Gene Symbol: R3HDM1
  Gene Name: R3H domain containing 1
  ENST ID: ENST00000456040
  CDS Start-End: 1-851
ctgatactgttactgtaaaagatgaaactgcaacaatgaaggatttggaggcagaagtgaaagatacaaccagagttgaaaatcttatcaaatcagaaaactatgggaagattttggtagagaagaatgaacattgtattgagaacaatatagatttgcagtcaagctcaaagttaaagctagttcggagccttgcagtgtgtgaagaatctccaccaccccctgcaccagagatatcacaggagaaccaggagaaaattcagatccagttaacacaatcatttgagaaagaagagaagccctcaaaagatgaagcagaaaaagaaaaggccagtgataagttgcccagaaaaatgttatcaagagattccagtcaagaatacactgattcaactggcatagatctacatgaatttttagtaaatacattaaaaaacaatcccagggacagaatgatgctgctgaaattggaacaagaaattttagatttcattggtaataatgagtctccacgtaaaaaattccccccaatgacatcttaccataggatgctattacacagagtagccgcttactttggattagaccacaatgttgatcagagtgggaagtctgtcatagtaaacaaaactagcaatacaagaatacctgatcagaaatttaatgaacatattaaggatgataaaggtgaagactttcagaaacgttatatcctcaagagagataactctagctttgacaaagatgataaccagatgagaatacgtttgaaagatgacagaagaagcaaatctatagaagaaagagaagaagagtaccagagagccagagaccgaatattttcccaagat

SEQ ID NO: 172906 - DNA, 670 bp, Homo sapiens
  Payload ID: 13980
  Gene Symbol: R3HDM1
  Gene Name: R3H domain containing 1
  ENST ID: ENST00000445855
  CDS Start-End: 1-670
gtcagagcctagtcagtggccaacccaacagcattggaaatcagattcaaggagtggtcatcccctatacttcagtgccaacatatcaggtttcactgcctcaaggttctcaaggaattccccatcagacttatcaacagcctgttatgttccctaatcagtctaatcaaggatctatgcccacaacaggaatgcctgtttactatagtgtcattccacctggtcaacaaaacaatttaagctcttcagtaggttacctgcaacatccaggatcagaacaagtacaatttcctcgaaccacttcaccatgcagttcccagcagcttcaaggccaccaatgtacagctggaccaccaccgccacctggtggggggatggtgatgatgcagctcagtgtaccaaacaatccacaatcttgtgcccactcacccccgcagtggaaacaaaacaaatattactgtgatcaccagagaggacagaagtgtgtagaatttagcagtgtagacaatattgtccaggagattccaggtatccattacttggccagccactgcagtacaatcctcctgctgttctgcacggacacattccaaaccaacagggtcagcctggcagcaggcatggaaaccgaggaaggagacaagctaaaaaagctgcatccacagacctt

SEQ ID NO: 172907 - DNA, 601 bp, Homo sapiens
  Payload ID: 13980
  Gene Symbol: R3HDM1
  Gene Name: R3H domain containing 1
  ENST ID: ENST00000436436
  CDS Start-End: 405-601
agactgctctagcaggcactcccaatgccagactaatcagctggatgtgtgcagtgagctctatagaggagcaatgcagagcatcagtttacaggtactatggaaagaacatctccttaactctgtatgatgaagcaaataccaatacaatgaaggccacggaaaggtatgatatatttgatccaagacagtccattccagtccgggaatctacagtggtgacaaggacatgggactcctcctgccagattacagatggttcactacagttgacatcctggctgacaactgtgaaaaagaaccttggattattttattttatttttgtgggacaccacaatcccaaatccaaaggacgcatcaggcttcaagctccctgtagaattcgaaaataaccttttctaatgaggatgtctgatactgttactgtaaaagatgaaactgcaacaatgaaggatttggaggcagaagtgaaagatacaaccagagttgaaaatcttatcaaatcagaaaactatgggaagattttggtagagaagaatgaacattgtattgagaacaatatagatttgcagggacagaatgatgctgctgaaattgg

SEQ ID NO: 172908 - DNA, 4325 bp, Homo sapiens
  Payload ID: 13980
  Gene Symbol: R3HDM1
  Gene Name: R3H domain containing 1
  Uniprot ID: Q15032
  ENST ID: ENST00000628915
  CDS Start-End: 434-3349
ttgtctgagtcctcctcggcaagtgctttagactgctctagcaggcactcccaatgccagactaatcagctggatgtgtgcagtgagctctatagaggagcaatgcagagcatcagtttacaggtactatggaaagaacatctccttaactctgtatgatgaagcaaataccaatacaatgaaggccacggaaaggtatgatatatttgatccaagacagtccattccagtccgggaatctacagtggtgacaaggacatgggactcctcctgccagattacagatggttcactacagttgacatcctggctgacaactgtgaaaaagaaccttggattattttattttatttttgtgggacaccacaatcccaaatccaaaggacgcatcaggcttcaagctccctgtagaattcgaaaataaccttttctaatgaggatgtctgatactgttactgtaaaagatgaaactgcaacaatgaaggatttggaggcagaagtgaaagatacaaccagagttgaaaatcttatcaaatcagaaaactatgggaagattttggtagagaagaatgaacattgtattgagaacaatatagatttgcaggagaaaattcagatccagttaacacaatcatttgagaaagaagagaagccctcaaaagatgaagcagaaaaagaaaaggccagtgataagttgcccagaaaaatgttatcaagagattccagtcaagaatacactgattcaactggcatagatctacatgaatttttagtaaatacattaaaaaacaatcccagggacagaatgatgctgctgaaattggaacaagaaattttagatttcattggtaataatgagtctccacgtaaaaaattccccccaatgacatcttaccataggatgctattacacagagtagccgcttactttggattagaccacaatgttgatcagagtgggaagtctgtcatagtaaacaaaactagcaatacaagaatacctgatcagaaatttaatgaacatattaaggatgataaaggtgaagactttcagaaacgttatatcctcaagagagataactctagctttgacaaagatgataaccagatgagaatacgtttgaaagatgacagaagaagcaaatctatagaagaaagagaagaagagtaccagagagccagagaccgaatattttcccaagattccctgtgttcccaagagaattacattattgacaaaagactccaagacgaggatgccagtagtacccagcagaggcgccagatatttagagttaataaagatgcttcagggagatctacaaatagccatcaaagcagcactgagaatgagttgaagtactcggaaccacgaccctggagcagcacagattcagacagctctcttcgaaacctgaaacctgctgtaaccaaagccagcagcttcagtggaatctcagtcctgacaagaggtgatagttctggaagcagcaaaagcataggcaggctttcaaaaacaggtcagcccttcataaacccagatgggagtccagttgtgtataatcctcctatgactcaacaaccagttagatcccaagtgcctggacctccacagccacctctgccagccccacctcaacaaccagcagctaatcacattttctcacagcaggataacctagggtctcagtttagccacatgagtcttgctcgccagccatctgctgatggttctgaccctcatgccgccatgttccagtccactgtggttcttcagtctccacagcagtctggttatatcatgacagcagcccctccaccacatcctcctccaccgccaccaccaccacctcctcctcctcccctaccacctgggcagccagtccctactgctggatatcctgcctctggtcatcctgtcagccagcctgtgctccagcagcagggatatattcagcagccatcaccacagatgccagcctgttattgcgctccaggccactatcactccagccaacctcagtatcgcccagtcccttctgttcattacaattcacatctaaaccaaccactgccacaacctgcgcagcagacaggttatcaagttatacccaaccagcagcaaaactaccaaggaatagttggagttcagcaaccccagagtcagagcctagtcagtggccaacccaacagcattggaaatcagattcaaggagtggtcatcccctatacttcagtgccaacatatcaggtttcactgcctcaaggttctcaaggaattccccatcagacttatcaacagcctgttatgttccctaatcagtctaatcaaggatctatgcccacaacaggaatgcctgtttactatagtgtcattccacctggtcaacaaaacaatttaagctcttcagtaggttacctgcaacatccaggatcagaacaagtacaatttcctcgaaccacttcaccatgcagttcccagcagcttcaaggccaccaatgtacagctggaccaccaccgccacctggtggggggatggtgatgatgcagctcagtgtaccaaacaatccacaatcttgtgcccactcacccccgcagtggaaacaaaacaaatattactgtgatcaccagagaggacagaagtgtgtagaatttagcagtgtagacaatattgtccagcacagccctcaactcagtagccccattatttcaccagctcagtcgccagcaccagctcagctgtccaccctgaaaactgtacgtccctctggaccaccactttccatcatgccccaattttctagaccttttgtccccgggcaaggagattccaggtatccattacttggccagccactgcagtacaatcctcctgctgttctgcacggacacattccaaaccaacagggtcagcctggcagcaggcatggaaaccgaggaaggagacaagctaaaaaagctgcatccacagaccttggagcaggagaaacagttgttgggaaggtcttggaaattactgaactaccagatggaataactcgcatggaagctgaaaagctttttggggaactctttaaaattggcgccaagatccggtggctccgggacccccagtcccaaccacgtcgtcaccccctctgctgtggcagtggggacaacactgccaaccctgaacgctctaaacccagtgacttggcctccacctacaccgtcttagccacattcccctccatttcagctgcacagaatgcactgaagaaacaaattaactcagttaacaagtttaagctgagaacaagcaagaagcactatgactttcacattttggaaagggcaagttctcagtaacagccacctttggacccttcgcctttatggttcccctgccctctcccatctttgattggcttggtatttggagcttctgttaacattatagagactcctaggatgtgtgttcatggcattatagcttttgaagaaaggccagtgatccagcaaagggggaaaaatatgcatttcaccccacatgactaggaatccacatcagaatgatacagagttagcaggtttttctaaggaaatgccattcaaatgcctcctaacttttatagttattttgttttatatttctaaattcttgtatcagatccaaagctctattgtacagcaaattattcttcaaaatgattataaccagttgcaccctgtatttctttttgcagccagcacaatgtgacccaacttaaaatttgggggaaaaagaatgcaggagtgaaataaccaagtcaaaaccatgtactatctccttgggggttagggatgctaagaagagcccacaaatagaggattactcttcccctgaatctctaaactcagaaacaattaccaaaaaatacataactcttccttgtagggccctttccttattcatttaggtagtgtgaacattaagtataaaataaattatgttcttaatgcctcttaaaccacttacattcaaaggggaacagaaatcattctaagcaggaaaatacttccactttttttttttcaagtatctctctaataactaaatgccacttatttgcattctccttgtggattttttgtcacctaaggaaatgcatttgatgagtgctggaaacttcttaagtgctttacagtttgttttcattgtttgcagcggatcactggacatcaaagattcattgcacttatgaacaaggaaccttcttttcaatttctgtgtaatttgcaaggctgtacaatgtgtgctgatgcaagcctttttcagttcaagagaataaatgtttacaaatat

SEQ ID NO: 172909 - DNA, 4331 bp, Homo sapiens
  Payload ID: 13981
  Gene Symbol: R3HDM2
  Gene Name: R3H domain containing 2
  Uniprot ID: Q9Y2K5
  ENST ID: ENST00000347140
  CDS Start-End: 392-3322
ggcttttcttccccttctgattttcccctccccccttttctccctttccgggtttggttccccccttttcttcccctctcccccctccttcccaagcccctttcccctcccccgtcccagtcccccctgcttcccagccctcggccccggggaagccccggccgagaaaagcccgcccccagaagcgcgccgccgccggccgtcggggccgagccgcagccgagcggccgtgggcccgggcggcgggcggagacgtgggcgccctccccgccaaggcccgtgcgagaggttagacttgtttcttatatgtgatgccattccagcactggactcatggaggctgagcatttattcaggagtccatagaggccactgtattctattgaagaacatgtctaacagtaacactactcaagagaccctggaaataatgaaagaatcagaaaaaaaactggtggaagaatctgtaaacaaaaacaagtttatatctaagactccaagtaaggaagaaattgagaaagaatgtgaagataccagtttgcgtcaggagacacagaggcggacatctaaccatggtcatgccaggaaaagagccaagtctaattccaagctaaagttggtgcgtagcctggcagtgtgtgaggagtcctccaccccatttgctgatgggccattagaaacccaggatataattcaattgcacatcagttgcccttctgacaaggaggaagaaaagtccacaaaagatgtctctgaaaaggaagacaaggacaaaaacaaagaaaagatcccaaggaagatgctgtccagagactccagccaggaatatacggactccactggaatagacctacatgaatttcttgtaaatacactgaaaaagaacccaagggacagaatgatgctgctaaaattagaacaggagattctggaatttattaatgacaacaataatcagttcaagaagttccctcagatgacctcatatcaccggatgctattacaccgggtagctgcctattttgggatggaccacaatgttgatcaaactgggaaagctgtcatcatcaacaaaactagtaacacaagaatccctgaacagaggttctcagaacatataaaggatgagaagaatacagaatttcaacagaggttcattctcaagagagatgatgccagtatggaccgagatgataaccagactggccagaacggatatctaaatgacatcagactctccaaagaagccttttcttctagctctcacaagagaaggcagatttttagggggaaccgtgaaggactgagccgcacctcaagcagccgccagagcagcacagacagcgaactcaaatccctggagccacgcccttggagcagcacagactctgatggctctgtccggagcatgcgaccccctgtcaccaaagctagcagcttcagtggaatctctatccttacccgaggtgacagcatcggcagcagtaaaggcggcagtgcgggaaggatctccaggccaggtatggcactaggtgccccagaagtgtgcaaccaggtcacctcatcccagtctgtccgggggcttctcccttgtactgcccagcagcaacagcagcagcagcagcagcaacttcctgctctcccacccacgcctcagcaacagccacccttgaataatcacatgatctcacaggcagatgacctcagcaacccctttggacaaatgagccttagtcgccaaggttctactgaagcagctgacccatctgcagctctattccagaccccacttatctcccagcaccctcagcagactagcttcatcatggcttccacgggtcagcccctccccacttccaactattccacctctagccatgcaccacctactcagcaagttctgccaccccaggggtacatgcagccccctcaacagatccaggtttcttactatccccctggacaatatcctaactccaaccagcaatatcgacctctctctcacccggtggcctatagcccccaacgtggtcagcagctgcctcagccatcccagcagcctggtttacagcccatgatgcctaaccagcagcaggcggcttaccaaggcatgattggggtccagcagccacagaaccagggcctgctcagcagccagaggagcagcatggggggccagatgcaaggcctggtggttcagtacactccactgccttcttaccaagttccagtgggtagtgactcgcaaaatgtggtccagccgcctttccagcaacccatgctggtccctgtgagccagtctgtgcaaggaggcctcccagcagcgggggtaccagtgtactatagcatgatcccacctgctcagcagaacggtacgagcccttctgtagggtttctgcaaccccctggctctgagcagtaccagatgcctcagtctccctctccctgcagtccaccacagatgccacagcagtactcaggagtgtcaccttctggaccaggtgtagtggtcatgcagctgaatgtccctaatggaccccagccccctcagaacccatccatggtccagtggagtcattgtaaatactacagcatggaccagcgggggcagaagcctggagacctgtacagtcctgacagcagcccccaggccaacacacaaatgagcagcagccctgtcacatctcctacccagtctccagcaccctctcctgtcaccagcctcagcagtgtctgcacaggactcagtcccctgcctgtcctcacacagttcccccggcctgggggtccagcacagggtgatgggcgctactcccttttgggccagccattacagtacaatctgtccatctgccctcccttgctccatggccagtcaacttacacggtgcaccagggacagagtggactgaagcatggaaaccggggcaagagacaagcactcaaatctgcctccactgacctggggacagcagatgttgtcctggggcgggtgctggaggtgacagatctccctgagggcatcacccgtactgaggcggacaaactcttcacgcagctcgccatgtctggcgccaagatccagtggctcaaggatgctcaggggctgcctggagggggtgggggggacaacagtgggactgctgagaatggccgccactcggacctcgctgccttgtacaccattgtggctgtgttccccagccccctggctgcccaaaatgcctcccttcgtctcaacaactccgtgagtcgcttcaaacttcgaatggccaaaaagaactatgacctgaggatcctggagcgagccagctcccaataaatggaggaggggaaagggactgtcacagaaggagcaagggcagggtggagggggttgaaggatcctgacagaccatggacagaggcaggaagtaaggaaactgatgttaaactggaacctaagacagtgatgaagatggaaacacagatacctacactggcattggactccttcttgctcccctgccatgggtcctctctttttccctggttgaccccccttgcatcactcttcttcccatcctcttctttttttttttttttttttttttgagacggagtttcgctcttgtcaccccagctggagtgcagtagcacgatcttggctaactgcaacctccagctcctgggttcaggtgattctcctgcctcagcctcccaagtagctggcactacagacacgcgccaccatgcccggctaatttttgtatttttagtagagacggagtttcaccatgttggccaggctggcctcaaactcctgacctcaggtgatccacctgccttggccttccagagtgctgggattacaggcgtgagccactgtgcctggcttccatcctcttctatcatttttttaaatctcttctcctatcataaaattaatttctcattttttggtcaggtagaattgggaaagtcccacactgtcctcctattaccttaacatcccaagcttcctttccttttttggtctttatgaatatatttatatggacagaattaagataaacaaaattgattgccccattctctcacttccccatcttgtcttcctagaccccacagagttaaaacttgggattcccctggcccccccagaacacttgtatattgtttgtttgaggttcgtgccgcagtaacagacacagtatttaattgcacatacagatgtttgctgggtatattcactgtaaattttatttaatctgtttttttgtttgtttgggggttatttggggggaggttggttttgtttttaaatataaaaaaaaaaatctgtcactgga

SEQ ID NO: 172910 - DNA, 3974 bp, Homo sapiens
  Payload ID: 13981
  Gene Symbol: R3HDM2
  Gene Name: R3H domain containing 2
  Uniprot ID: Q9Y2K5
  ENST ID: ENST00000358907
  CDS Start-End: 36-2966
gagtccatagaggccactgtattctattgaagaacatgtctaacagtaacactactcaagagaccctggaaataatgaaagaatcagaaaaaaaactggtggaagaatctgtaaacaaaaacaagtttatatctaagactccaagtaaggaagaaattgagaaagaatgtgaagataccagtttgcgtcaggagacacagaggcggacatctaaccatggtcatgccaggaaaagagccaagtctaattccaagctaaagttggtgcgtagcctggcagtgtgtgaggagtcctccaccccatttgctgatgggccattagaaacccaggatataattcaattgcacatcagttgcccttctgacaaggaggaagaaaagtccacaaaagatgtctctgaaaaggaagacaaggacaaaaacaaagaaaagatcccaaggaagatgctgtccagagactccagccaggaatatacggactccactggaatagacctacatgaatttcttgtaaatacactgaaaaagaacccaagggacagaatgatgctgctaaaattagaacaggagattctggaatttattaatgacaacaataatcagttcaagaagttccctcagatgacctcatatcaccggatgctattacaccgggtagctgcctattttgggatggaccacaatgttgatcaaactgggaaagctgtcatcatcaacaaaactagtaacacaagaatccctgaacagaggttctcagaacatataaaggatgagaagaatacagaatttcaacagaggttcattctcaagagagatgatgccagtatggaccgagatgataaccagactggccagaacggatatctaaatgacatcagactctccaaagaagccttttcttctagctctcacaagagaaggcagatttttagggggaaccgtgaaggactgagccgcacctcaagcagccgccagagcagcacagacagcgaactcaaatccctggagccacgcccttggagcagcacagactctgatggctctgtccggagcatgcgaccccctgtcaccaaagctagcagcttcagtggaatctctatccttacccgaggtgacagcatcggcagcagtaaaggcggcagtgcgggaaggatctccaggccaggtatggcactaggtgccccagaagtgtgcaaccaggtcacctcatcccagtctgtccgggggcttctcccttgtactgcccagcagcaacagcagcagcagcagcagcaacttcctgctctcccacccacgcctcagcaacagccacccttgaataatcacatgatctcacaggcagatgacctcagcaacccctttggacaaatgagccttagtcgccaaggttctactgaagcagctgacccatctgcagctctattccagaccccacttatctcccagcaccctcagcagactagcttcatcatggcttccacgggtcagcccctccccacttccaactattccacctctagccatgcaccacctactcagcaagttctgccaccccaggggtacatgcagccccctcaacagatccaggtttcttactatccccctggacaatatcctaactccaaccagcaatatcgacctctctctcacccggtggcctatagcccccaacgtggtcagcagctgcctcagccatcccagcagcctggtttacagcccatgatgcctaaccagcagcaggcggcttaccaaggcatgattggggtccagcagccacagaaccagggcctgctcagcagccagaggagcagcatggggggccagatgcaaggcctggtggttcagtacactccactgccttcttaccaagttccagtgggtagtgactcgcaaaatgtggtccagccgcctttccagcaacccatgctggtccctgtgagccagtctgtgcaaggaggcctcccagcagcgggggtaccagtgtactatagcatgatcccacctgctcagcagaacggtacgagcccttctgtagggtttctgcaaccccctggctctgagcagtaccagatgcctcagtctccctctccctgcagtccaccacagatgccacagcagtactcaggagtgtcaccttctggaccaggtgtagtggtcatgcagctgaatgtccctaatggaccccagccccctcagaacccatccatggtccagtggagtcattgtaaatactacagcatggaccagcgggggcagaagcctggagacctgtacagtcctgacagcagcccccaggccaacacacaaatgagcagcagccctgtcacatctcctacccagtctccagcaccctctcctgtcaccagcctcagcagtgtctgcacaggactcagtcccctgcctgtcctcacacagttcccccggcctgggggtccagcacagggtgatgggcgctactcccttttgggccagccattacagtacaatctgtccatctgccctcccttgctccatggccagtcaacttacacggtgcaccagggacagagtggactgaagcatggaaaccggggcaagagacaagcactcaaatctgcctccactgacctggggacagcagatgttgtcctggggcgggtgctggaggtgacagatctccctgagggcatcacccgtactgaggcggacaaactcttcacgcagctcgccatgtctggcgccaagatccagtggctcaaggatgctcaggggctgcctggagggggtgggggggacaacagtgggactgctgagaatggccgccactcggacctcgctgccttgtacaccattgtggctgtgttccccagccccctggctgcccaaaatgcctcccttcgtctcaacaactccgtgagtcgcttcaaacttcgaatggccaaaaagaactatgacctgaggatcctggagcgagccagctcccaataaatggaggaggggaaagggactgtcacagaaggagcaagggcagggtggagggggttgaaggatcctgacagaccatggacagaggcaggaagtaaggaaactgatgttaaactggaacctaagacagtgatgaagatggaaacacagatacctacactggcattggactccttcttgctcccctgccatgggtcctctctttttccctggttgaccccccttgcatcactcttcttcccatcctcttctttttttttttttttttttttttgagacggagtttcgctcttgtcaccccagctggagtgcagtagcacgatcttggctaactgcaacctccagctcctgggttcaggtgattctcctgcctcagcctcccaagtagctggcactacagacacgcgccaccatgcccggctaatttttgtatttttagtagagacggagtttcaccatgttggccaggctggcctcaaactcctgacctcaggtgatccacctgccttggccttccagagtgctgggattacaggcgtgagccactgtgcctggcttccatcctcttctatcatttttttaaatctcttctcctatcataaaattaatttctcattttttggtcaggtagaattgggaaagtcccacactgtcctcctattaccttaacatcccaagcttcctttccttttttggtctttatgaatatatttatatggacagaattaagataaacaaaattgattgccccattctctcacttccccatcttgtcttcctagaccccacagagttaaaacttgggattcccctggcccccccagaacacttgtatattgtttgtttgaggttcgtgccgcagtaacagacacagtatttaattgcacatacagatgtttgctgggtatattcactgtaaattttatttaatctgtttttttgtttgtttgggggttatttggggggaggttggttttgtttttaaatataaaaaaaaaaatctgtcactgg

SEQ ID NO: 172911 - DNA, 3347 bp, Homo sapiens
  Payload ID: 13981
  Gene Symbol: R3HDM2
  Gene Name: R3H domain containing 2
  ENST ID: ENST00000403821
  CDS Start-End: 298-3330
ccctctacctccagtgacgtagtgattttgtttgcagtctttttcttctgagagggaggggacggagagaaggaagaagaaaaatccatctgaagcggtgcgttcttccttctgtgacttgatgttggtaactgggtgccattgaatagagctgaagccaaagtgggatgttttaaaggtgctataattttgtttgtttccttttaaaatagggtcagaccgaagtcagaattgctgaagcagggtgcctgaattaaccctatattccatagaggccactgtattctattgaagaacatgtctaacagtaacactactcaagagaccctggaaataatgaaagaatcagaaaaaaaactggtggaagaatctgtaaacaaaaacaagtttatatctaagactccaagtaaggaagaaattgagaaagaatgtgaagataccagtttgcgtcaggagacacagaggcggacatctaaccatggtcatgccaggaaaagagccaagtctaattccaagctaaagttggtgcgtagcctggcagtgtgtgaggagtcctccaccccatttgctgatgggccattagaaacccaggatataattcaattgcacatcagttgcccttctgacaaggaggaagaaaagtccacaaaagatgtctctgaaaaggaagacaaggacaaaaacaaagaaaagatcccaaggaagatgctgtccagagactccagccaggaatatacggactccactggaatagacctacatgaatttcttgtaaatacactgaaaaagaacccaagggacagaatgatgctgctaaaattagaacaggagattctggaatttattaatgacaacaataatcagttcaagaagttccctcagatgacctcatatcaccggatgctattacaccgggtagctgcctattttgggatggaccacaatgttgatcaaactgggaaagctgtcatcatcaacaaaactagtaacacaagaatccctgaacagaggttctcagaacatataaaggatgagaagaatacagaatttcaacagaggttcattctcaagagagatgatgccagtatggaccgagatgataaccagactggccagaacggatatctaaatgacatcagactctccaaagaagccttttcttctagctctcacaagagaaggcagatttttagggggaaccgtgaaggactgagccgcacctcaagcagccgccagagcagcacagacagcgaactcaaatccctggagccacgcccttggagcagcacagactctgatggctctgtccggagcatgcgaccccctgtcaccaaagctagcagcttcagtggaatctctatccttacccgaggtgacagcatcggcagcagtaaaggcggcagtgcgggaaggatctccaggccaggtatggcactaggtgccccagaagtgtgcaaccaggtcacctcatcccagtctgtccgggggcttctcccttgtactgcccagcagcaacagcagcagcagcagcagcaacttcctgctctcccacccacgcctcagcaacagccacccttgaataatcacatgatctcacagccagtcccggctctgcagccctctccgcagcctgttcagttctctccaagctcctgtccccaagtccttctgccagtctctccgccccagcagtacaacatggcagatgacctcagcaacccctttggacaaatgagccttagtcgccaaggttctactgaagcagctgacccatctgcagctctattccagaccccacttatctcccagcaccctcagcagactagcttcatcatggcttccacgggtcagcccctccccacttccaactattccacctctagccatgcaccacctactcagcaagttctgccaccccaggggtacatgcagccccctcaacagatccaggtttcttactatccccctggacaatatcctaactccaaccagcaatatcgacctctctctcacccggtggcctatagcccccaacgtggtcagcagctgcctcagccatcccagcagcctggtttacagcccatgatgcctaaccagcagcaggcggcttaccaaggcatgattggggtccagcagccacagaaccagggcctgctcagcagccagaggagcagcatggggggccagatgcaaggcctggtggttcagtacactccactgccttcttaccaagttccagtgggtagtgactcgcaaaatgtggtccagccgcctttccagcaacccatgctggtccctgtgagccagtctgtgcaaggaggcctcccagcagcgggggtaccagtgtactatagcatgatcccacctgctcagcagaacggtacgagcccttctgtagggtttctgcaaccccctggctctgagcagtaccagatgcctcagtctccctctccctgcagtccaccacagatgccacagcagtactcaggagtgtcaccttctggaccaggtgtagtggtcatgcagctgaatgtccctaatggaccccagccccctcagaacccatccatggtccagtggagtcattgtaaatactacagcatggaccagcgggggcagaagcctggagacctgtacagtcctgacagcagcccccaggccaacacacaaatgagcagcagccctgtcacatctcctacccagtctccagcaccctctcctgtcaccagcctcagcagtgtctgcacaggactcagtcccctgcctgtcctcacacagttcccccggcctgggggtccagcacagggtgatgggcgctactcccttttgggccagccattacagtacaatctgtccatctgccctcccttgctccatggccagtcaacttacacggtgcaccagggacagagtggactgaagcatggaaaccggggcaagagacaagcactcaaatctgcctccactgacctggggacagcagatgttgtcctggggcgggtgctggaggtgacagatctccctgagggcatcacccgtactgaggcggacaaactcttcacgcagctcgccatgtctggcgccaagatccagtggctcaaggatgctcaggggctgcctggagggggtgggggggacaacagtgggactgctgagaatggccgccactcggacctcgctgccttgtacaccattgtggctgtgttccccagccccctggctgcccaaaatgcctcccttcgtctcaacaactccgtgagtcgcttcaaacttcgaatggccaaaaagaactatgacctgaggatcctggagcgagccagctcccaataaatggaggaggggaaagg

SEQ ID NO: 172912 - DNA, 4372 bp, Homo sapiens
  Payload ID: 13981
  Gene Symbol: R3HDM2
  Gene Name: R3H domain containing 2
  ENST ID: ENST00000402412
  CDS Start-End: 392-3364
ggcttttcttccccttctgattttcccctccccccttttctccctttccgggtttggttccccccttttcttcccctctcccccctccttcccaagcccctttcccctcccccgtcccagtcccccctgcttcccagccctcggccccggggaagccccggccgagaaaagcccgcccccagaagcgcgccgccgccggccgtcggggccgagccgcagccgagcggccgtgggcccgggcggcgggcggagacgtgggcgccctccccgccaaggcccgtgcgagaggttagacttgtttcttatatgtgatgccattccagcactggactcatggaggctgagcatttattcaggagtccatagaggccactgtattctattgaagaacatgtctaacagtaacactactcaagagaccctggaaataatgaaagaatcagaaaaaaaactggtggaagaatctgtaaacaaaaacaagtttatatctaagactccaagtaaggaagaaattgagaaagaatgtgaagataccagtttgcgtcaggagacacagaggcggacatctaaccatggtcatgccaggaaaagagccaagtctaattccaagctaaagttggtgcgtagcctggcagtgtgtgaggagtcctccaccccatttgctgatgggccattagaaacccaggatataattcaattgcacatcagttgcccttctgacaaggaggaagaaaagtccacaaaagatgtctctgaaaaggaagacaaggacaaaaacaaagaaaagatcccaaggaagatgctgtccagagactccagccaggaatatacggactccactggaatagacctacatgaatttcttgtaaatacactgaaaaagaacccaagggacagaatgatgctgctaaaattagaacaggagattctggaatttattaatgacaacaataatcagttcaagaagttccctcagatgacctcatatcaccggatgctattacaccgggtagctgcctattttgggatggaccacaatgttgatcaaactgggaaagctgtcatcatcaacaaaactagtaacacaagaatccctgaacagaggttctcagaacatataaaggatgagaagaatacagaatttcaacagaggttcattctcaagagagatgatgccagtatggaccgagatgataaccagatcagagttccattgcaggatggaaggaggagcaagtcaatagaagagagagaggaggaatatcaaagggtccgagagagaatatttgcccgagagactggccagaacggatatctaaatgacatcagggggaaccgtgaaggactgagccgcacctcaagcagccgccagagcagcacagacagcgaactcaaatccctggagccacgcccttggagcagcacagactctgatggctctgtccggagcatgcgaccccctgtcaccaaagctagcagcttcagtggaatctctatccttacccgaggtgacagcatcggcagcagtaaaggcggcagtgcgggaaggatctccaggccaggtatggcactaggtgccccagaagtgtgcaaccaggtcacctcatcccagtctgtccgggggcttctcccttgtactgcccagcagcaacagcagcagcagcagcagcaacttcctgctctcccacccacgcctcagcaacagccacccttgaataatcacatgatctcacaggcagatgacctcagcaacccctttggacaaatgagccttagtcgccaaggttctactgaagcagctgacccatctgcagctctattccagaccccacttatctcccagcaccctcagcagactagcttcatcatggcttccacgggtcagcccctccccacttccaactattccacctctagccatgcaccacctactcagcaagttctgccaccccaggggtacatgcagccccctcaacagatccaggtttcttactatccccctggacaatatcctaactccaaccagcaatatcgacctctctctcacccggtggcctatagcccccaacgtggtcagcagctgcctcagccatcccagcagcctggtttacagcccatgatgcctaaccagcagcaggcggcttaccaaggcatgattggggtccagcagccacagaaccagggcctgctcagcagccagaggagcagcatggggggccagatgcaaggcctggtggttcagtacactccactgccttcttaccaagttccagtgggtagtgactcgcaaaatgtggtccagccgcctttccagcaacccatgctggtccctgtgagccagtctgtgcaaggaggcctcccagcagcgggggtaccagtgtactatagcatgatcccacctgctcagcagaacggtacgagcccttctgtagggtttctgcaaccccctggctctgagcagtaccagatgcctcagtctccctctccctgcagtccaccacagatgccacagcagtactcaggagtgtcaccttctggaccaggtgtagtggtcatgcagctgaatgtccctaatggaccccagccccctcagaacccatccatggtccagtggagtcattgtaaatactacagcatggaccagcgggggcagaagcctggagacctgtacagtcctgacagcagcccccaggccaacacacaaatgagcagcagccctgtcacatctcctacccagtctccagcaccctctcctgtcaccagcctcagcagtgtctgcacaggactcagtcccctgcctgtcctcacacagttcccccggcctgggggtccagcacagggtgatgggcgctactcccttttgggccagccattacagtacaatctgtccatctgccctcccttgctccatggccagtcaacttacacggtgcaccagggacagagtggactgaagcatggaaaccggggcaagagacaagcactcaaatctgcctccactgacctggggacagcagatgttgtcctggggcgggtgctggaggtgacagatctccctgagggcatcacccgtactgaggcggacaaactcttcacgcagctcgccatgtctggcgccaagatccagtggctcaaggatgctcaggggctgcctggagggggtgggggggacaacagtgggactgctgagaatggccgccactcggacctcgctgccttgtacaccattgtggctgtgttccccagccccctggctgcccaaaatgcctcccttcgtctcaacaactccgtgagtcgcttcaaacttcgaatggccaaaaagaactatgacctgaggatcctggagcgagccagctcccaataaatggaggaggggaaagggactgtcacagaaggagcaagggcagggtggagggggttgaaggatcctgacagaccatggacagaggcaggaagtaaggaaactgatgttaaactggaacctaagacagtgatgaagatggaaacacagatacctacactggcattggactccttcttgctcccctgccatgggtcctctctttttccctggttgaccccccttgcatcactcttcttcccatcctcttctttttttttttttttttttttttgagacggagtttcgctcttgtcaccccagctggagtgcagtagcacgatcttggctaactgcaacctccagctcctgggttcaggtgattctcctgcctcagcctcccaagtagctggcactacagacacgcgccaccatgcccggctaatttttgtatttttagtagagacggagtttcaccatgttggccaggctggcctcaaactcctgacctcaggtgatccacctgccttggccttccagagtgctgggattacaggcgtgagccactgtgcctggcttccatcctcttctatcatttttttaaatctcttctcctatcataaaattaatttctcattttttggtcaggtagaattgggaaagtcccacactgtcctcctattaccttaacatcccaagcttcctttccttttttggtctttatgaatatatttatatggacagaattaagataaacaaaattgattgccccattctctcacttccccatcttgtcttcctagaccccacagagttaaaacttgggattcccctggcccccccagaacacttgtatattgtttgtttgaggttcgtgccgcagtaacagacacagtatttaattgcacatacagatgtttgctgggtatattcactgtaaattttatttaatctgtttttttgtttgtttgggggttatttggggggaggttggttttgtttttaaatataaaaaaaaaaatctgtcactgg

SEQ ID NO: 172913 - DNA, 2266 bp, Homo sapiens
  Payload ID: 13981
  Gene Symbol: R3HDM2
  Gene Name: R3H domain containing 2
  ENST ID: ENST00000429355
  CDS Start-End: 1-2226
aaggatgagaagaatacagaatttcaacagaggttcattctcaagagagatgatgccagtatggaccgagatgataaccaggatggaaggaggagcaagtcaatagaagagagagaggaggaatatcaaagggtccgagagagaatatttgcccgagagactggccagaacggatatctaaatgacatcagggggaaccgtgaaggactgagccgcacctcaagcagccgccagagcagcacagacagcgaactcaaatccctggagccacgcccttggagcagcacagactctgatggctctgtccggagcatgcgaccccctgtcaccaaagctagcagcttcagtggaatctctatccttacccgaggtgacagcatcggcagcagtaaaggcggcagtgcgggaaggatctccaggccaggtatggcactaggtgccccagaagtgtgcaaccaggtcacctcatcccagtctgtccgggggcttctcccttgtactgcccagcagcaacagcagcagcagcagcagcaacttcctgctctcccacccacgcctcagcaacagccacccttgaataatcacatgatctcacaggcagatgacctcagcaacccctttggacaaatgagccttagtcgccaaggttctactgaagcagctgacccatctgcagctctattccagaccccacttatctcccagcaccctcagcagactagcttcatcatggcttccacgggtcagcccctccccacttccaactattccacctctagccatgcaccacctactcagcaagttctgccaccccaggggtacatgcagccccctcaacagatccaggtttcttactatccccctggacaatatcctaactccaaccagcaatatcgacctctctctcacccggtggcctatagcccccaacgtggtcagcagctgcctcagccatcccagcagcctggtttacagcccatgatgcctaaccagcagcaggcggcttaccaaggcatgattggggtccagcagccacagaaccagggcctgctcagcagccagaggagcagcatggggggccagatgcaaggcctggtggttcagtacactccactgccttcttaccaagttccagtgggtagtgactcgcaaaatgtggtccagccgcctttccagcaacccatgctggtccctgtgagccagtctgtgcaaggaggcctcccagcagcgggggtaccagtgtactatagcatgatcccacctgctcagcagaacggtacgagcccttctgtagggtttctgcaaccccctggctctgagcagtaccagatgcctcagtctccctctccctgcagtccaccacagatgccacagcagtactcaggagtgtcaccttctggaccaggtgtagtggtcatgcagctgaatgtccctaatggaccccagccccctcagaacccatccatggtccagtggagtcattgtaaatactacagcatggaccagcgggggcagaagcctggagacctgtacagtcctgacagcagcccccaggccaacacacaaatgagcagcagccctgtcacatctcctacccagtctccagcaccctctcctgtcaccagcctcagcagtgtctgcacaggactcagtcccctgcctgtcctcacacagttcccccggcctgggggtccagcacagggtgatgggcgctactcccttttgggccagccattacagtacaatctgtccatctgccctcccttgctccatggccagtcaacttacacggtgcaccagggacagagtggactgaagcatggaaaccggggcaagagacaagcactcaaatctgcctccactgacctggggacagcagatgttgtcctggggcgggtgctggaggtgacagatctccctgagggcatcacccgtactgaggcggacaaactcttcacgcagctcgccatgtctggcgccaagatccagtggctcaaggatgctcaggggctgcctggagggggtgggggggacaacagtgggactgctgagaatggccgccactcggacctcgctgccttgtacaccattgtggctgtgttccccagccccctggctgcccaaaatgcctcccttcgtctcaacaactccgtgagtcgcttcaaacttcgaatggccaaaaagaactatgacctgaggatcctggagcgagccagctcccaataaatggaggaggggaaagggactgtcacagaaggagcaaggg

SEQ ID NO: 172914 - DNA, 195 bp, Homo sapiens
  Payload ID: 13981
  Gene Symbol: R3HDM2
  Gene Name: R3H domain containing 2
  ENST ID: ENST00000448732
  CDS Start-End: 107-195
gcagccgagcggccgtgggcccgggcggcgggcggagacgtgggcgccctccccgccaaggcccgtgcgaggagtccatagaggccactgtattctattgaagaacatgtctaacagtaacactactcaagagaccctggaaataatgaaagaatcagaaaaaaaactggtggaagaatctgtaaacaaaaacaa

SEQ ID NO: 172915 - DNA, 4076 bp, Homo sapiens
  Payload ID: 13981
  Gene Symbol: R3HDM2
  Gene Name: R3H domain containing 2
  Uniprot ID: Q9Y2K5
  ENST ID: ENST00000441731
  CDS Start-End: 1053-3068
gagtccatagaggccactgtattctattgaagaacatgtctaacagtaacactactcaagagaccctggaaataatgaaagaatcagaaaaaaaactggtggaagaatctgtaaacaaaaacaagtttatatctaagactccaagtaaggaagaaattgagaaagaatgtgaagataccagtttgcgtcaggagacacagaggcggacatctaaccatggtcatgccaggaaaagagccaagtctaattccaagctaaagttggtgcgtagcctggcagtgtgtgaggagtcctccaccccatttgctgatgggccattagaaacccaggatataattcaattgcacatcagttgcccttctgacaaggaggaagaaaagtccacaaaagatgtctctgaaaaggaagacaaggacaaaaacaaagaaaagatcccaaggaagatgctgtccagagactccagccaggaatatacggactccactggaatagacctacatgaatttcttgtaaatacactgaaaaagaacccaagggacagaatgatgctgctaaaattagaacaggagattctggaatttattaatgacaacaataatcagttcaagaagttccctcagatgacctcatatcaccggatgctattacaccgggtagctgcctattttgggatggaccacaatgttgatcaaactgggaaagctgtcatcatcaacaaaactagtaacacaagaatccctgaacagaggttctcagaacatataaaggatgagaagaatacagaatttcaacagaggttcattctcaagagagatgatgccagtatggaccgagatgataaccagactggccagaacggatatctaaatgacatcagactctccaaagaagccttttcttctagctctcacaagagaaggcagatttttagggggaaccgtgaaggactgagccgcacctcaagcagccgccagagcagcacagacagcgaactcaaatccctggagccacgcccttggagcagcacagactctgatggctctgtccggagcatgcgaccccctgtcaccaaagctagcagcttcagtggaatctctatccttacccgaggtgacagcatcggcagcagtaaaggcggcagtgcgggaaggatctccaggccaggtatggcactaggtgccccagaagtgtgcaaccaggtcacctcatcccagtctgtccgggggcttctcccttgtactgcccagcagcaacagcagcagcagcagcagcaacttcctgctctcccacccacgcctcagcaacagccacccttgaataatcacatgatctcacagccagtcccggctctgcagccctctccgcagcctgttcagttctctccaagctcctgtccccaagtccttctgccagtctctccgccccagcagtacaacatggcagatgacctcagcaacccctttggacaaatgagccttagtcgccaaggttctactgaagcagctgacccatctgcagctctattccagaccccacttatctcccagcaccctcagcagactagcttcatcatggcttccacgggtcagcccctccccacttccaactattccacctctagccatgcaccacctactcagcaagttctgccaccccaggggtacatgcagccccctcaacagatccaggtttcttactatccccctggacaatatcctaactccaaccagcaatatcgacctctctctcacccggtggcctatagcccccaacgtggtcagcagctgcctcagccatcccagcagcctggtttacagcccatgatgcctaaccagcagcaggcggcttaccaaggcatgattggggtccagcagccacagaaccagggcctgctcagcagccagaggagcagcatggggggccagatgcaaggcctggtggttcagtacactccactgccttcttaccaagttccagtgggtagtgactcgcaaaatgtggtccagccgcctttccagcaacccatgctggtccctgtgagccagtctgtgcaaggaggcctcccagcagcgggggtaccagtgtactatagcatgatcccacctgctcagcagaacggtacgagcccttctgtagggtttctgcaaccccctggctctgagcagtaccagatgcctcagtctccctctccctgcagtccaccacagatgccacagcagtactcaggagtgtcaccttctggaccaggtgtagtggtcatgcagctgaatgtccctaatggaccccagccccctcagaacccatccatggtccagtggagtcattgtaaatactacagcatggaccagcgggggcagaagcctggagacctgtacagtcctgacagcagcccccaggccaacacacaaatgagcagcagccctgtcacatctcctacccagtctccagcaccctctcctgtcaccagcctcagcagtgtctgcacaggactcagtcccctgcctgtcctcacacagttcccccggcctgggggtccagcacagggtgatgggcgctactcccttttgggccagccattacagtacaatctgtccatctgccctcccttgctccatggccagtcaacttacacggtgcaccagggacagagtggactgaagcatggaaaccggggcaagagacaagcactcaaatctgcctccactgacctggggacagcagatgttgtcctggggcgggtgctggaggtgacagatctccctgagggcatcacccgtactgaggcggacaaactcttcacgcagctcgccatgtctggcgccaagatccagtggctcaaggatgctcaggggctgcctggagggggtgggggggacaacagtgggactgctgagaatggccgccactcggacctcgctgccttgtacaccattgtggctgtgttccccagccccctggctgcccaaaatgcctcccttcgtctcaacaactccgtgagtcgcttcaaacttcgaatggccaaaaagaactatgacctgaggatcctggagcgagccagctcccaataaatggaggaggggaaagggactgtcacagaaggagcaagggcagggtggagggggttgaaggatcctgacagaccatggacagaggcaggaagtaaggaaactgatgttaaactggaacctaagacagtgatgaagatggaaacacagatacctacactggcattggactccttcttgctcccctgccatgggtcctctctttttccctggttgaccccccttgcatcactcttcttcccatcctcttctttttttttttttttttttttttgagacggagtttcgctcttgtcaccccagctggagtgcagtagcacgatcttggctaactgcaacctccagctcctgggttcaggtgattctcctgcctcagcctcccaagtagctggcactacagacacgcgccaccatgcccggctaatttttgtatttttagtagagacggagtttcaccatgttggccaggctggcctcaaactcctgacctcaggtgatccacctgccttggccttccagagtgctgggattacaggcgtgagccactgtgcctggcttccatcctcttctatcatttttttaaatctcttctcctatcataaaattaatttctcattttttggtcaggtagaattgggaaagtcccacactgtcctcctattaccttaacatcccaagcttcctttccttttttggtctttatgaatatatttatatggacagaattaagataaacaaaattgattgccccattctctcacttccccatcttgtcttcctagaccccacagagttaaaacttgggattcccctggcccccccagaacacttgtatattgtttgtttgaggttcgtgccgcagtaacagacacagtatttaattgcacatacagatgtttgctgggtatattcactgtaaattttatttaatctgtttttttgtttgtttgggggttatttggggggaggttggttttgtttttaaatataaaaaaaaaaatctgtcactgg

SEQ ID NO: 172916 - DNA, 840 bp, Homo sapiens
  Payload ID: 13981
  Gene Symbol: R3HDM2
  Gene Name: R3H domain containing 2
  ENST ID: ENST00000547262
  CDS Start-End: 1-840
gaagaaaagtccacaaaagatgtctctgaaaaggaagacaaggacaaaaacaaagaaaagatcccaaggaagatgctgtccagagactccagccaggaatatacggactccactggaatagacctacatgaatttcttgtaaatacactgaaaaagaacccaagggacagaatgatgctgctaaaattagaacaggagattctggaatttattaatgacaacaataatcagttcaagaagttccctcagatgacctcatatcaccggatgctattacaccgggtagctgcctattttgggatggaccacaatgttgatcaaactgggaaagctgtcatcatcaacaaaactagtaacacaagaatccctgaacagaggttctcagaacatataaaggatgagaagaatacagaatttcaacagaggttcattctcaagagagatgatgccagtatggaccgagatgataaccagactggccagaacggatatctaaatgacatcagggggaaccgtgaaggactgagccgcacctcaagcagccgccagagcagcacagacagcgaactcaaatccctggagccacgcccttggagcagcacagactctgatggctctgtccggagcatgcgaccccctgtcaccaaagctagcagcttcagtggaatctctatccttacccgaggtgacagcatcggcagcagtaaaggcggcagtgcgggaaggatctccaggccaggtatggcactaggtgccccagaagtgtgcaaccaggtcacctcatcccagtctgtccgggggcttctcccttgtactgcccagcagcaacagcagcagcag

SEQ ID NO: 172917 - DNA, 4092 bp, Homo sapiens
  Payload ID: 13981
  Gene Symbol: R3HDM2
  Gene Name: R3H domain containing 2
  ENST ID: ENST00000634871
  CDS Start-End: 195-3095
ggccgtcggggccgagccgcagccgagcggccgtgggcccgggcggcgggcggagacgtgggcgccctccccgccaaggcccgtgcgagaggttagacttgtttcttatatgtgatgccattccagcactggactcatggaggctgagcatttattcaggagtccatagaggccactgtattctattgaagaacatgtctaacagtaacactactcaagagaccctggaaataatgaaagaatcagaaaaaaaactggtggaagaatctgtaaacaaaaacaagtttatatctaagactccaagtaaggaagaaattgagaaagaatgtgaagataccagtttgcgtcaggagacacaggattatgagttcctttttgacaagaggcggacatctaaccatggtcatgccaggaaaagagccaagtctaattccaagctaaagttggtgcgtagcctggcagtgtgtgaggagtcctccaccccatttgctgatgggccattagaaacccaggatataattcaattgcacatcagttgcccttctgacaaggaggaagaaaagtccacaaaagatgtctctgaaaaggaagacaaggacaaaaacaaagaaaagatcccaaggaagatgctgtccagagactccagccaggaatatacggactccactggaatagacctacatgaatttcttgtaaatacactgaaaaagaacccaagggacagaatgatgctgctaaaattagaacaggagattctggaatttattaatgacaacaataatcagttcaagaagttccctcagatgacctcatatcaccggatgctattacaccgggtagctgcctattttgggatggaccacaatgttgatcaaactgggaaagctgtcatcatcaacaaaactagtaacacaagaatccctgaacagaggttctcagaacatataaaggatgagaagaatacagaatttcaacagaggttcattctcaagagagatgatgccagtatggaccgagatgataaccagactggccagaacggatatctaaatgacatcagggggaaccgtgaaggactgagccgcacctcaagcagccgccagagcagcacagacagcgaactcaaatccctggagccacgcccttggagcagcacagactctgatggctctgtccggagcatgcgaccccctgtcaccaaagctagcagcttcagtggaatctctatccttacccgaggtgacagcatcggcagcagtaaaggcggcagtgcgggaaggatctccaggccaggtatggcactaggtgccccagaagtgtgcaaccaggtcacctcatcccagtctgtccgggggcttctcccttgtactgcccagcagcaacagcagcagcagcagcagcaacttcctgctctcccacccacgcctcagcaacagccacccttgaataatcacatgatctcacaggcagatgacctcagcaacccctttggacaaatgagccttagtcgccaaggttctactgaagcagctgacccatctgcagctctattccagaccccacttatctcccagcaccctcagcagactagcttcatcatggcttccacgggtcagcccctccccacttccaactattccacctctagccatgcaccacctactcagcaagttctgccaccccaggggtacatgcagccccctcaacagatccaggtttcttactatccccctggacaatatcctaactccaaccagcaatatcgacctctctctcacccggtggcctatagcccccaacgtggtcagcagctgcctcagccatcccagcagcctggtttacagcccatgatgcctaaccagcagcaggcggcttaccaaggcatgattggggtccagcagccacagaaccagggcctgctcagcagccagaggagcagcatggggggccagatgcaaggcctggtggttcagtacactccactgccttcttaccaagttccagtgggtagtgactcgcaaaatgtggtccagccgcctttccagcaacccatgctggtccctgtgagccagtctgtgcaaggaggcctcccagcagcgggggtaccagtgtactatagcatgatcccacctgctcagcagaacggtacgagcccttctgtagggtttctgcaaccccctggctctgagcagtaccagatgcctcagtctccctctccctgcagtccaccacagatgccacagcagtactcaggagtgtcaccttctggaccaggtgtagtggtcatgcagctgaatgtccctaatggaccccagccccctcagaacccatccatggtccagtggagtcattgtaaatactacagcatggaccagcgggggcagaagcctggagacctgtacagtcctgacagcagcccccaggccaacacacaaatgagcagcagccctgtcacatctcctacccagtctccagcaccctctcctgtcaccagcctcagcagtgtctgcacaggactcagtcccctgcctgtcctcacacagttcccccggcctgggggtccagcacagggtgatgggcgctactcccttttgggccagccattacagtacaatctgtccatctgccctcccttgctccatggccagtcaacttacacggtgcaccagggacagagtggactgaagcatggaaaccggggcaagagacaagcactcaaatctgcctccactgacctggggacagcagatgttgtcctggggcgggtgctggaggtgacagatctccctgagggcatcacccgtactgaggcggacaaactcttcacgcagctcgccatgtctggcgccaagatccagtggctcaaggatgctcaggggctgcctggagggggtgggggggacaacagtgggactgctgagaatggccgccactcggacctcgctgccttgtacaccattgtggctgtgttccccagccccctggctgcccaaaatgcctcccttcgtctcaacaactccgtgagtcgcttcaaacttcgaatggccaaaaagaactatgacctgaggatcctggagcgagccagctcccaataaatggaggaggggaaagggactgtcacagaaggagcaagggcagggtggagggggttgaaggatcctgacagaccatggacagaggcaggaagtaaggaaactgatgttaaactggaacctaagacagtgatgaagatggaaacacagatacctacactggcattggactccttcttgctcccctgccatgggtcctctctttttccctggttgaccccccttgcatcactcttcttcccatcctcttctttttttttttttttttttttttgagacggagtttcgctcttgtcaccccagctggagtgcagtagcacgatcttggctaactgcaacctccagctcctgggttcaggtgattctcctgcctcagcctcccaagtagctggcactacagacacgcgccaccatgcccggctaatttttgtatttttagtagagacggagtttcaccatgttggccaggctggcctcaaactcctgacctcaggtgatccacctgccttggccttccagagtgctgggattacaggcgtgagccactgtgcctggcttccatcctcttctatcatttttttaaatctcttctcctatcataaaattaatttctcattttttggtcaggtagaattgggaaagtcccacactgtcctcctattaccttaacatcccaagcttcctttccttttttggtctttatgaatatatttatatggacagaattaagataaacaaaattgattgccccattctctcacttccccatcttgtcttcctagaccccacagagttaaaacttgggattcccctggcccccccagaacacttgtatattgtttgtttgaggttcgtgccgcagtaacagacacagtatttaattgcacatacagatgtttgctgggtatattcactgtaaattttatttaatctgtttttttgtttgtttgggggttatttggggggaggttggttttgtttttaaatataaaaaaaaaaa

SEQ ID NO: 172918 - DNA, 1815 bp, Homo sapiens
  Payload ID: 13982
  Gene Symbol: R3HDM4
  Gene Name: R3H domain containing 4
  Uniprot ID: Q96D70
  ENST ID: ENST00000361574
  CDS Start-End: 75-881
cgggcgcccgtcacttcctgcccggcccggtgaaggccctgccgggcggcggcggcggcgacagcgtgcgagccatggtcgcgctggagaaccccgagtgcggcccggaggcggcggagggcaccccgggcgggcggcggctgctgccccttcccagctgcctgcctgccctagccagctcccaggtgaagagactctcggcttccaggcggaaacagcacttcatcaaccaggcagtgcggaactcagacctcgtgcccaaggccaaggggcggaagagcctccagcgcctggagaacacccagtacctcctgaccctgctggagacagacgggggcctgcctggcctggaggatggggacttggcaccccctgcatcaccaggcatctttgccgaggcctgcaacaacgccacctatgtggaggtctggaacgatttcatgaaccgctccggggaggagcaggagcgggttcttcgctacctggaggatgagggcaggagcaaggcgcggaggaggggccctggccgtggggaggaccggaggagagaggaccccgcctatacaccccgcgagtgcttccagcgcatcagccggcgtctgcgagccgtcctcaagcgcagccgcatccccatggaaacgctggagacctgggaggagcggctgcttcggttcttctccgtgtccccccaggccgtgtacacagcaatgctagacaacagcttcgagaggcttctgctgcacgctgtctgccagtacatggacctcatctcggccagtgctgacctggaggggaagcggcagatgaaggtcagtaatcggcacctggatttcctgccgccggggctgctcctgtccgcctacctggagcagcacagctgatggcggccccgcggagaccccgctgccacctcgcccagccatcaagccctccgataccttcggctaaaatatctttcatatttttagaatttgtcctcggaaacctttttcgcttggggtggtctctctcactctgccccctcctcacgcagctcttggcagtcaacagacgctggcggctggggctgcccatgccatcccagctccaagcttcccactccgggacttgtgtttgggtggggagacctgacctgggcatgttcctgtttcttcatcgttgagcttttctggcccggtctgaagctcaagtgaggagggggaggctgggtttttatcacttttaatgaatttggtgtgatttgttgtagatttttaaatttcccttttggagagaaaaaccaaaaaaactcgccccactggtaaaacatgggtcttggtcccagcccctgctcagcccctcccagtttttagcttgaatgagggtggggtctctgggaccctgcccctcatgccagaagcatcttgtgttgtatatgtgtgcgcgcgtgtgccctgagacccaggacagaagccacggtcctaagagccggttttatcctcgtcattctgcgtgtcctcccccacgccacctgtgtcggggctcagggtctcctgctttatatgagcccccttcctttcctcccctcctttatgctgggggtccaggacttccagccagaagcctctgcccttgcactaccttgtctgtcaccccatcccgtgtcccctcgtcccccagcctgactcctgcctgatagctcctgtgtccccatgctggtcctcctggcccaggctgcaggagccaggctggggggcctccgcacccccttgctgcgtgtgggtaattgtgttttgggggaaagtggggaatttaataaatttctggtgctctggc

SEQ ID NO: 172919 - DNA, 1765 bp, Homo sapiens
  Payload ID: 13982
  Gene Symbol: R3HDM4
  Gene Name: R3H domain containing 4
  ENST ID: ENST00000587975
  CDS Start-End: 89-832
cccctgcccgcctccgggcgcccgtcacttcctgcccggcccggtgaaggccctgccgggcggcggcggcggcgacagcgtgcgagccatggtcgcgctggagaaccccgagtgcggcccggaggcggcggagggcaccccgggcgggcggcggctgctgcggaaacagcacttcatcaaccaggcagtgcggaactcagacctcgtgcccaaggccaaggggcggaagagcctccagcgcctggagaacacccagtacctcctgaccctgctggagacagacgggggcctgcctggcctggaggatggggacttggcaccccctgcatcaccaggcatctttgccgaggcctgcaacaacgccacctatgtggaggtctggaacgatttcatgaaccgctccggggaggagcaggagcgggttcttcgctacctggaggatgagggcaggagcaaggcgcggaggaggggccctggccgtggggaggaccggaggagagaggaccccgcctatacaccccgcgagtgcttccagcgcatcagccggcgtctgcgagccgtcctcaagcgcagccgcatccccatggaaacgctggagacctgggaggagcggctgcttcggttcttctccgtgtccccccaggccgtgtacacagcaatgctagacaacagcttcgagaggcttctgctgcacgctgtctgccagtacatggacctcatctcggccagtgctgacctggaggggaagcggcagatgaaggtcagtaatcggcacctggatttcctgccgccggggctgctcctgtccgcctacctggagcagcacagctgatggcggccccgcggagaccccgctgccacctcgcccagccatcaagccctccgataccttcggctaaaatatctttcatatttttagaatttgtcctcggaaacctttttcgcttggggtggtctctctcactctgccccctcctcacgcagctcttggcagtcaacagacgctggcggctggggctgcccatgccatcccagctccaagcttcccactccgggacttgtgtttgggtggggagacctgacctgggcatgttcctgtttcttcatcgttgagcttttctggcccggtctgaagctcaagtgaggagggggaggctgggtttttatcacttttaatgaatttggtgtgatttgttgtagatttttaaatttcccttttggagagaaaaaccaaaaaaactcgccccactggtaaaacatgggtcttggtcccagcccctgctcagcccctcccagtttttagcttgaatgagggtggggtctctgggaccctgcccctcatgccagaagcatcttgtgttgtatatgtgtgcgcgcgtgtgccctgagacccaggacagaagccacggtcctaagagccggttttatcctcgtcattctgcgtgtcctcccccacgccacctgtgtcggggctcagggtctcctgctttatatgagcccccttcctttcctcccctcctttatgctgggggtccaggacttccagccagaagcctctgcccttgcactaccttgtctgtcaccccatcccgtgtcccctcgtcccccagcctgactcctgcctgatagctcctgtgtccccatgctggtcctcctggcccaggctgcaggagccaggctggggggcctccgcacccccttgctgcgtgtgggtaattgtgttttgggggaaagtggggaatttaataaatttctggtgctctgg

SEQ ID NO: 172920 - DNA, 1704 bp, Homo sapiens
  Payload ID: 13982
  Gene Symbol: R3HDM4
  Gene Name: R3H domain containing 4
  ENST ID: ENST00000589428
  CDS Start-End: 89-382
cccctgcccgcctccgggcgcccgtcacttcctgcccggcccggtgaaggccctgccgggcggcggcggcggcgacagcgtgcgagccatggtcgcgctggagaaccccgagtgcggcccggaggcggcggagggcaccccgggcgggcggcggctgctgccccttcccagctgcctgcctgccctagccagctcccaggtgaagagactctcggcttccaggcggaaacagcacttcatcaaccaggcagtgcggaactcagacctcgtgcccaaggccaaggggcggaagagcctccagcgcctggagaacagtctggaacgatttcatgaaccgctccggggaggagcaggagcgggttcttcgctacctggaggatgagggcaggagcaaggcgcggaggaggggccctggccgtggggaggaccggaggagagaggaccccgcctatacaccccgcgagtgcttccagcgcatcagccggcgtctgcgagccgtcctcaagcgcagccgcatccccatggaaacgctggagacctgggaggagcggctgcttcggttcttctccgtgtccccccaggccgtgtacacagcaatgctagacaacagcttcgagaggcttctgctgcacgctgtctgccagtacatggacctcatctcggccagtgctgacctggaggggaagcggcagatgaaggtcagtaatcggcacctggatttcctgccgccggggctgctcctgtccgcctacctggagcagcacagctgatggcggccccgcggagaccccgctgccacctcgcccagccatcaagccctccgataccttcggctaaaatatctttcatatttttagaatttgtcctcggaaacctttttcgcttggggtggtctctctcactctgccccctcctcacgcagctcttggcagtcaacagacgctggcggctggggctgcccatgccatcccagctccaagcttcccactccgggacttgtgtttgggtggggagacctgacctgggcatgttcctgtttcttcatcgttgagcttttctggcccggtctgaagctcaagtgaggagggggaggctgggtttttatcacttttaatgaatttggtgtgatttgttgtagatttttaaatttcccttttggagagaaaaaccaaaaaaactcgccccactggtaaaacatgggtcttggtcccagcccctgctcagcccctcccagtttttagcttgaatgagggtggggtctctgggaccctgcccctcatgccagaagcatcttgtgttgtatatgtgtgcgcgcgtgtgccctgagacccaggacagaagccacggtcctaagagccggttttatcctcgtcattctgcgtgtcctcccccacgccacctgtgtcggggctcagggtctcctgctttatatgagcccccttcctttcctcccctcctttatgctgggggtccaggacttccagccagaagcctctgcccttgcactaccttgtctgtcaccccatcccgtgtcccctcgtcccccagcctgactcctgcctgatagctcctgtgtccccatgctggtcctcctggcccaggctgcaggagccaggctggggggcctccgcacccccttgctgcgtgtgggtaattgtgttttgggggaaagtggggaatttaataaatttctggtgctctggc

SEQ ID NO: 172921 - DNA, 1006 bp, Homo sapiens
  Payload ID: 13982
  Gene Symbol: R3HDM4
  Gene Name: R3H domain containing 4
  ENST ID: ENST00000590454
  CDS Start-End: 48-185
cggtgaaggccctgccgggcggcggcggcggcgacagcgtgcgagccatggtcgcgctggagaaccccgagtgcggcccggaggcggcggagggcaccccgggcgggcggcggctgcttcttgctctgttgcccaggctggagtgcagtggtgccatcatgccaacctcgacctcctggacttaagtgatcctcctgcctcaggcccctgagtagctgggactacagtcttgctatgttgctcaggctggtcttgaacccctgagctcaagtgatccaccggcctcagcctcccacaatgctgggatcaccggcatgagccaccacacccagcccgtcttcacaattgtatctgcttcctgtgatgtgaggatgaaacaaaataggattttaagggcccaggacttcacacaccgtaggggtgagctctccattgctgggggaaaccaagcgggccatggctgtggtagggcccttctcggagatcctggccggccttgaccctgaggaccacccctgccccggcccacaggccccttcccagctgcctgcctgccctagccagctcccaggtgaagagactctcggcttccaggcggaaacagcacttcatcaaccaggcagtgcggaactcagacctcgtgcccaaggccaaggggcggaagagcctccagcgcctggagaacacccagtacctcctgaccctgctggagacagacgggggcctgcctggcctggaggatggggacttggcaccccctgcatcaccaggcatctttgccgaggcctgcaacaacgccacctatgtggaggtgtctggaacgatttcatgaaccgctccggggaggagcaggagcgggttcttcgctacctggaggatgagggcaggagcaaggcgcggaggaggggccctggccgtggggaggaccggaggagagaggaccccgcctatacaccccgcgagtgcttccagcgcatcagccggcgtctgcgagccgtcctcaagc

SEQ ID NO: 172922 - DNA, 138 bp, Homo sapiens
  Payload ID: 13982
  Gene Symbol: R3HDM4
  Gene Name: R3H domain containing 4
  ENST ID: ENST00000626716
  CDS Start-End: 1-138
atggtcgcgctggagaaccccgagtgcggcccggaggcggcggagggcaccccgggcgggcggcggctgcttcttgctctgttgcccaggctggagtgcagtggtgccatcatgccaacctcgacctcctggacttaa

SEQ ID NO: 172923 - DNA, 1377 bp, Homo sapiens
  Payload ID: 13983
  Gene Symbol: R3HDML
  Gene Name: R3H domain containing-like
  Uniprot ID: Q9H3Y0
  ENST ID: ENST00000217043
  CDS Start-End: 173-934
tgggcatctggaccagagctgcatctggaggtctttgccaagttcccaggaggcagcatcctctgggtcggcactgttggagaacgctcagggtctggtgctctcgtgcctgccccttccaggcagccggctctgattgcacaaggcagacctgtgactcctccatccagctatgcccctgctgcccagcaccgtgggcctggcaggcctgctcttctgggctggccaggcagtgaacgccttgataatgcctaatgctaccccagccccggcccagcccgagagcacggctatgcggctcctgagtggcctggaggtgcccaggtaccgccggaagcgccacatctctgtgagagacatgaatgccttactggattatcacaaccacatccgggccagtgtgtacccacctgccgccaacatggaatacatggtctgggacaagcggctggccagggctgccgaagcctgggccacccagtgcatctgggcacatgggccttcacagctgatgagatacgtgggccagaacctctccatccattctggccagtaccggtccgtagtggatctcatgaagtcctggtctgaggagaagtggcattacttgtttccggccccaagggactgtaacccacactgcccctggcgctgcgatggccccacctgctcccattatacccagatggtgtgggcatcctccaatcggctgggctgtgccatccacacctgtagtagcatcagtgtctggggcaacacctggcatcgggcggcatacctggtctgcaactatgccattaagggcaactggattggcgagtccccgtacaagatgggaaagccgtgctcctcctgtccccccagttatcaaggcagctgcaatagcaacatgtgcttcaaggggctgaaatccaacaagttcacgtggttctgaattttctctgggctttggtgcgcctccagctgggcctgaccctccatgtcctgccctcaaaaaactgggtggagaaataattgtttctttaaaggatatgagttagaatcaccccctgttgaattttccctcctagatccccttcttaaatgtccaacatgggtcaaaagaaaatgacctccttgccttccttctttcctagttgcatctttcttttcttgggcctctgggaaagagccctgcatctttcattaattcggttctcagagaaccaaggctggaaggcatagaactggcaccttgggaccaggcataatggctcacacctataatcccagtattttgggaggctgaggtgggagaatcacttgagtcctggagttggagaacagcctggaaagcctggcgataccccatctctatttagaaacaaacaaacaaac

SEQ ID NO: 172924 - DNA, 821 bp, Homo sapiens
  Payload ID: 13984
  Gene Symbol: RABAC1
  Gene Name: Rab acceptor 1 (prenylated)
  Uniprot ID: Q9UI14
  ENST ID: ENST00000222008
  CDS Start-End: 99-656
acgtcgactccgctgggtggggccggcgtcgggcggggccggcggggtcttcagggtaccgggctggttacagcagctctacccctcacgacgcagacatggcagcgcagaaggaccagcagaaagatgccgaggcggaagggctgagcggcacgaccctgctgccgaagctgattccctccggtgcaggccgggagtggctggagcggcgccgcgcgaccatccggccctggagcaccttcgtggaccagcagcgcttctcacggccccgcaacctgggagagctgtgccagcgcctcgtacgcaacgtggagtactaccagagcaactatgtgttcgtgttcctgggcctcatcctgtactgtgtggtgacgtcccctatgttgctggtggctctggctgtctttttcggcgcctgttacattctctatctgcgcaccttggagtccaagcttgtgctctttggccgagaggtgagcccagcgcatcagtatgctctggctggaggcatctccttccccttcttctggctggctggtgcgggctcggccgtcttctgggtgctgggagccaccctggtggtcatcggctcccacgctgccttccaccagattgaggctgtggacggggaggagctgcagatggaacccgtgtgaggtgtcttctgggacctgccggcctcccgggccagctgccccacccctgcccatgcctgtcctgcacggctctgctgctcgggcccacagcgccgtcccatcacaagcccggggagggatcccgcctttgaaaataaagctgttatgggtgtcattcaggaaata

SEQ ID NO: 172925 - DNA, 530 bp, Homo sapiens
  Payload ID: 13984
  Gene Symbol: RABAC1
  Gene Name: Rab acceptor 1 (prenylated)
  ENST ID: ENST00000601028
  CDS Start-End: 1-330
ggccgggagtggctggagcggcgccgcgcgaccatccggccctggagcaccttcgtggaccagcagcgcttctcacggccccgcaacctgggagagctgtgccagcgcctcgtacgcaacgtggagtactaccagagcaactatgtgttcgtgttcctgggcctcatcctgtactgtgtgccgagaggtgagcccagcgcatcagtatgctctggctggaggcatctccttccccttcttctggctggctggtgcgggctcggccgtcttctgggtgctgggagccaccctggtggtcatcggctcccacgctgccttccaccagattgaggctgtggacggggaggagctgcagatggaacccgtgtgaggtgtcttctgggacctgccggcctcccgggccagctgccccacccctgcccatgcctgtcctgcacggctctgctgctcgggcccacagcgccgtcccatcacaagcccggggagggatcccgcctttgaaaataaagctgttatgggtgtcattcagg

SEQ ID NO: 172926 - DNA, 728 bp, Homo sapiens
  Payload ID: 13984
  Gene Symbol: RABAC1
  Gene Name: Rab acceptor 1 (prenylated)
  ENST ID: ENST00000601078
  CDS Start-End: 388-663
ccagcagaaagatgccgaggcggaagggctgagcggcacgtgagcgagctggctctaggccctcggaccagagacccgggagtccgggcccccggccccctcctccctcctccctcgagagcctggagtcccagccccgagccgcagaagtgttggccccggaccctgctgccgaagctgattccctccggtgcaggccgggagtggctggagcggcgccgcgcgaccatccggccctggagcaccttcgtggaccagcagcgcttctcacggccccgcaacctgggagagctgtgccagcgcctcgtacgcaacgtggagtactaccagagcaactatgtgttcgtgttcctgggcctcatcctgtactgtgtggtgacgtcccctatgttgctggtggctctggctgtctttttcggcgcctgttacattctctatctgcgcaccttggagtccaagcttgtgctctttggccgagaggtgagcccagcgcatcagtatgctctggctggaggcatctccttccccttcttctggctggctggtgcgggctcggccgtcttctgggtgctgggagccaccctggtggtcatcggctcccacgctgccttccaccagattgaggctgtggacggggaggagctgcagatggaacccgtgtgaggtgtcttctgggacctgccggcctcccgggccagctgccccacccctgcccatgcctgtcctgc

SEQ ID NO: 172927 - DNA, 653 bp, Homo sapiens
  Payload ID: 13984
  Gene Symbol: RABAC1
  Gene Name: Rab acceptor 1 (prenylated)
  ENST ID: ENST00000600292
  CDS Start-End: 1-448
agatgccgaggcggaagggctgagcggcacgaccctgctgccgaagctgattccctccggtgcaggccgggagtggctggagcggcgccgcgcgaccatccggccctggagcaccttcgtggaccagcagcgcttctcacggccccgcaacctgggagagctgtgccagcgcctcgtacgcaacgtggagtactaccagagcaactatgtgttcgtgttcctgggcctcatcctgtactgtgtggtgacgtcccctatgttgctggtggctctggctgtctttttcggcgcctgttacattctctatctgcgcaccttggagtccaagcttgtgctctttggccgagaggtgagcccagcgcatcagtatgctctggctggaggcatctccttccccttcttctggctggctggtgcgggctcggccgtcttctgggtgctggattgaggctgtggacggggaggagctgcagatggaacccgtgtgaggtgtcttctgggacctgccggcctcccgggccagctgccccacccctgcccatgcctgtcctgcacggctctgctgctcgggcccacagcgccgtcccatcacaagcccggggagggatcccgcctttgaaaataaagctgttatgggtgtcattcaggaaata

SEQ ID NO: 172928 - DNA, 628 bp, Homo sapiens
  Payload ID: 13984
  Gene Symbol: RABAC1
  Gene Name: Rab acceptor 1 (prenylated)
  ENST ID: ENST00000601891
  CDS Start-End: 8-463
cgcagacatggcagcgcagaaggaccagcagaaagatgccgaggcggaagggctgagcggcacgaccctgctgccgaagctgattccctccggtgcaggccgggagtggctggagcggcgccgcgcgaccatccggccctggagcaccttcgtggaccagcagcgcttctcacggccccgcaacctgggagagctgtgccagcgcctcgtacgcaacgtggagtactaccagagcaactatgtgttcgtgttcctgggcctcatcctgtactgtgtggtgacgtcccctatgttgctggtggctctggctgtctttttcggcgcctgttacattctctatctgcgcaccttggagtccaagcttgtgctctttggagccaccctggtggtcatcggctcccacgctgccttccaccagattgaggctgtggacggggaggagctgcagatggaacccgtgtgaggtgtcttctgggacctgccggcctcccgggccagctgccccacccctgcccatgcctgtcctgcacggctctgctgctcgggcccacagcgccgtcccatcacaagcccggggagggatcccgcctttgaaaataaagctgttatgggtgtcattcaggaaata

SEQ ID NO: 172929 - DNA, 2088 bp, Homo sapiens
  Payload ID: 13985
  Gene Symbol: RABGGTA
  Gene Name: Rab geranylgeranyltransferase, alpha subunit
  Uniprot ID: Q92696
  ENST ID: ENST00000216840
  CDS Start-End: 308-2011
acacgcacgctacagtcgcccgtgcgcactcgtacacaccaggtggctaacaggtacgaggcgtttccggacagcgagcgcagagcccccgcgcacgcgcctccgagccggcctcttccgccgcaagtccctccccaagcctgcagagtgcgctgcgtttcgatgagccgggacgtggcgccgctctagccagcgcctgggctctgtggcgggcgccgcagctccgcgtcccccgcgcctcctcccagcgcagacttcaagggctaccactggacccttcccctgtcttgaaccctgagccggcaccatgcacggacgcctgaaggtgaagacgtcagaagagcaggcggaggccaaaaggctagagcgagagcagaagctgaagctataccagtcagccacccaggccgtattccagaagcgccaggctggtgagctggatgagtccgtgctggaactgacaagccagattctgggagccaaccctgattttgccaccctctggaactgccgacgagaggtgctccagcagctggagactcagaagtctcctgaagagttggctgctctggtgaaggcagaactgggcttcctggagagctgcctgcgggtgaaccccaagtcttatggtacctggcaccaccgatgctggctgctaggccgcctgcctgagcccaactggacccgagagctggagctctgtgcccgtttcctggaggtggatgagcggaactttcactgctgggactatcggcggtttgtggccacacaggcagccgtgccccctgcagaagagctagccttcactgacagcctcatcacccgaaacttctccaactactcttcctggcattaccgctcctgtctcttgccccagctgcacccccagccggattctggaccacaggggcgcctccctgaggatgtgctgctcaaagagctggagctggtgcagaatgccttcttcactgaccccaatgaccagagtgcctggttttatcaccgttggctcctaggccgagctgacccccaggatgcactgcgctgcctgcatgtgagccgggacgaggcctgtctgactgtctccttctctcggcccctcttagtgggctccaggatggagatcttgctgctcatggttgatgattctcccctgattgtggagtggaggaccccagatggcaggaaccggcccagccatgtctggctctgtgacctgcctgctgcctccctcaacgaccagttgccccaacatacatttcgcgtcatttggacagcaggcgatgtccagaaagaatgcgtgcttttaaaaggccgccaggagggctggtgccgggactccacgacagacgagcagctattcaggtgtgagctgtcagtggagaagtccacagtgctgcagtctgagctggaatcctgtaaggagctgcaggagctggagcctgagaataaatggtgcctgcttaccatcatcctgctgatgcgggcactggaccccctgctgtatgagaaggagaccctgcagtacttccagaccctcaaggccgtggaccccatgcgggcaacgtatctggatgacctgcgcagcaagttcttgctggagaatagcgtgctcaagatggagtatgccgaggtgcgtgtgctgcacctggctcacaaggatctgacagtgctctgccatctggaacagctgctcttggtcacccatcttgacttgtcacacaatcgcctccgaaccctgccacctgcactggctgccctgcgctgccttgaggtgctgcaggccagtgataatgccatagagtccctggacggcgtcaccaacctaccccggctgcaggagctgctactgtgcaacaaccgcctccagcagcctgcagtgctccagcctcttgcctcctgccccaggctggtcctcctcaacctgcagggtaacccgctgtgccaagcggtgggcatcttggagcaactggctgaactgctgccttcagttagcagcgtcctcacctaagaggccctgccccctacccttgccctttaacttattgggactgaataaagaatggagaggccctctcaggctaccaa

SEQ ID NO: 172930 - DNA, 2265 bp, Homo sapiens
  Payload ID: 13985
  Gene Symbol: RABGGTA
  Gene Name: Rab geranylgeranyltransferase, alpha subunit
  Uniprot ID: Q92696
  ENST ID: ENST00000399409
  CDS Start-End: 485-2188
ctgcagagtgcgctgcgtttcgatgagccgggacgtggcgccgctctagccagcgcctgggctctgtggcgggcgccgcagctccgcgtcccccgcgcctcctcccagcgcaggtgggtccgcccgcggggggcgggggtgcccgggagccgtgggacgggcgggtagcggcaacctttggggagcagagtggtccccaacgcccaggtgccccggctcgcgctctggcccgggcgaatcgggctataggaagggccacacggatggaagtcctagtccgggtgctcacctcttgtggaacgtgcaaagcctgtcccaggacctctttacactctgggggtctctgcccaggcacgcttgctgcttccggacacagctgtgggcggagctagtaggggcggggctacgtgattgacacttctctcctcagacttcaagggctaccactggacccttcccctgtcttgaaccctgagccggcaccatgcacggacgcctgaaggtgaagacgtcagaagagcaggcggaggccaaaaggctagagcgagagcagaagctgaagctataccagtcagccacccaggccgtattccagaagcgccaggctggtgagctggatgagtccgtgctggaactgacaagccagattctgggagccaaccctgattttgccaccctctggaactgccgacgagaggtgctccagcagctggagactcagaagtctcctgaagagttggctgctctggtgaaggcagaactgggcttcctggagagctgcctgcgggtgaaccccaagtcttatggtacctggcaccaccgatgctggctgctaggccgcctgcctgagcccaactggacccgagagctggagctctgtgcccgtttcctggaggtggatgagcggaactttcactgctgggactatcggcggtttgtggccacacaggcagccgtgccccctgcagaagagctagccttcactgacagcctcatcacccgaaacttctccaactactcttcctggcattaccgctcctgtctcttgccccagctgcacccccagccggattctggaccacaggggcgcctccctgaggatgtgctgctcaaagagctggagctggtgcagaatgccttcttcactgaccccaatgaccagagtgcctggttttatcaccgttggctcctaggccgagctgacccccaggatgcactgcgctgcctgcatgtgagccgggacgaggcctgtctgactgtctccttctctcggcccctcttagtgggctccaggatggagatcttgctgctcatggttgatgattctcccctgattgtggagtggaggaccccagatggcaggaaccggcccagccatgtctggctctgtgacctgcctgctgcctccctcaacgaccagttgccccaacatacatttcgcgtcatttggacagcaggcgatgtccagaaagaatgcgtgcttttaaaaggccgccaggagggctggtgccgggactccacgacagacgagcagctattcaggtgtgagctgtcagtggagaagtccacagtgctgcagtctgagctggaatcctgtaaggagctgcaggagctggagcctgagaataaatggtgcctgcttaccatcatcctgctgatgcgggcactggaccccctgctgtatgagaaggagaccctgcagtacttccagaccctcaaggccgtggaccccatgcgggcaacgtatctggatgacctgcgcagcaagttcttgctggagaatagcgtgctcaagatggagtatgccgaggtgcgtgtgctgcacctggctcacaaggatctgacagtgctctgccatctggaacagctgctcttggtcacccatcttgacttgtcacacaatcgcctccgaaccctgccacctgcactggctgccctgcgctgccttgaggtgctgcaggccagtgataatgccatagagtccctggacggcgtcaccaacctaccccggctgcaggagctgctactgtgcaacaaccgcctccagcagcctgcagtgctccagcctcttgcctcctgccccaggctggtcctcctcaacctgcagggtaacccgctgtgccaagcggtgggcatcttggagcaactggctgaactgctgccttcagttagcagcgtcctcacctaagaggccctgccccctacccttgccctttaacttattgggactgaataaagaatggagaggccctctcaggctaccaa

SEQ ID NO: 172931 - DNA, 573 bp, Homo sapiens
  Payload ID: 13985
  Gene Symbol: RABGGTA
  Gene Name: Rab geranylgeranyltransferase, alpha subunit
  ENST ID: ENST00000560127
  CDS Start-End: 107-328
ctctgtggcgggcgccgcagctccgcgtcccccgcgcctcctcccagcgcagacttcaagggctaccactggacccttcccctgtcttgaaccctgagccggcaccatgcacggacgcctgaaggtgaagacgtcagaagagcaggcggaggccaaaaggctagagcgagagcagaagctgaagctataccagtcagccacccaggccgtattccagaagcgccaggctggtgagctggatgagtccgtgctggaactgacaagccagattctgggagccaaccctgattttgccaccctctggaactgccgacgagaggtctcctgaagagttggctgctctggtgaaggcagaactgggcttcctggagagctgcctgcgggtgaaccccaagtcttatggtacctggcaccaccgatgctggctgctaggccgcctgcctgagcccaactggacccgagagctggagctctgtgcccgtttcctggaggtggatgagcggaactttcactgctgggactatcggcggtttgtggccacacaggcagccgtgccccctgcagaagagctag

SEQ ID NO: 172932 - DNA, 704 bp, Homo sapiens
  Payload ID: 13985
  Gene Symbol: RABGGTA
  Gene Name: Rab geranylgeranyltransferase, alpha subunit
  ENST ID: ENST00000560243
  CDS Start-End: 1-411
cagtctgagctggaatcctgtaaggagctgcaggagctggagcctgagaataaatggtgcctgcttaccatcatcctgctgatgcgggcactggaccccctgctgtatgagaaggagaccctgcagtacttccagaccctcaaggccgtggaccccatgcgggcaacgtatctggatgacctgcgcagcaagttcttgctggagaatagcgtgctcaagatggagtatgccgaggtgcgtgtgctgcacctggctcacaaggatctgacagtgctctgccatctggaacagctgctcttggtcacccatcttgacttgtcacacaatcgcctccgaaccctgccacctgcactggctgccctgcgctgccttgaggaccctccaccccgaacaggtgctgcaggccagtgataatgccatagagtccctggacggcgtcaccaacctaccccggctgcaggagctgctactgtgcaacaaccgcctccagcagcctgcagtgctccagcctcttgcctcctgccccaggctggtcctcctcaacctgcagggtaacccgctgtgccaagcggtgggcatcttggagcaactggctgaactgctgccttcagttagcagcgtcctcacctaagaggccctgccccctacccttgccctttaacttattgggactgaataaagaatggagaggccctctcaggcta

SEQ ID NO: 172933 - DNA, 1197 bp, Homo sapiens
  Payload ID: 13985
  Gene Symbol: RABGGTA
  Gene Name: Rab geranylgeranyltransferase, alpha subunit
  ENST ID: ENST00000560777
  CDS Start-End: 620-1150
cgagagctggagctctgtgcccgtttcctggaggtggatgagcggaactttcactgctgggactatcggcggtttgtggccacacaggcagccgtgccccctgcagaagagctagccttcactgacagcctcatcacccgaaacttctccaactactcttcctggcattaccgctcctgtctcttgccccagctgcacccccagccggattctggaccacaggggcgcctccctgaggatgtgctgctcaaagagctggagctggtgcagaatgccttcttcactgaccccaatgaccagagtgcctggttttatcaccgttggctcctaggccgagctgacccccaggatgcactgcgctgcctgcatgtgagccgggacgaggcctgtctgactgtctccttctctcggcccctcttagtgagtcctgcagcttttgtcaagagcactgtgggactgtgggcctggtgctgatggggctgaagtctttgtcctttgtgccaggtgtgagctgtcagtggagaagtccacagtgctgcagtctgagctggaatcctgtaaggagctgcaggagctggagcctgagaataaatggtgcctgcttaccatcatcctgctgatgcgggcactggaccccctgctgtatgagaaggagaccctgcagtacttccagaccctcaaggccgtggaccccatgcgggcaacgtatctggatgacctgcgcagcaagttcttgctggagaatagcgtgctcaagatggagtatgccgaggtgcgtgtgctgcacctggctcacaaggatctgacagtgctctgccatctggaacagctgctcttggtcacccatcttgacttgtcacacaatcgcctccgaaccctgccacctgcactggctgccctgcgctgccttgaggtgctgcaggccagtgataatgccatagagtccctggacggcgtcaccaacctaccccggctgcaggagctgctactgtgcaacaaccgcctccagcagcctgcagtgctccagcctcttgcctcctgccccaggctggtcctcctcaacctgcagggtaacccgctgtgccaagcggtgggcatcttggagcaactggctgaactgctgccttcagttagcagcgtcctcacctaagaggccctgccccctacccttgccctttaacttattgggactgaata

SEQ ID NO: 172934 - DNA, 1883 bp, Homo sapiens
  Payload ID: 13985
  Gene Symbol: RABGGTA
  Gene Name: Rab geranylgeranyltransferase, alpha subunit
  ENST ID: ENST00000558376
  CDS Start-End: 118-1392
cagcgcctgggctctgtggcgggcgccgcagctccgcgtcccccgcgcctcctcccagcgcagacttcaagggctaccactggacccttcccctgtcttgaaccctgagccggcaccatgcacggacgcctgaaggtgaagacgtcagaagagcaggcggaggccaaaaggctagagcgagagcagaagctgaagctataccagtcagccacccaggccgtattccagaagcgccaggctggtgagctggatgagtccgtgctggaactgacaagccagattctgggagccaaccctgattttgccaccctctggaactgccgacgagaggtgctccagcagctggagactcagaagtctcctgaagagttggctgctctggtgaaggcagaactgggcttcctggagagctgcctgcgggtgaaccccaagtcttatggtacctggcaccaccgatgctggctgctaggccgcctgcctgagcccaactggacccgagagctggagctctgtgcccgtttcctggaggtggatgagcggaactttcactgctgggactatcggcggtttgtggccacacaggcagccgtgccccctgcagaagagctagccttcactgacagcctcatcacccgaaacttctccaactactcttcctggcattaccgctcctgtctcttgccccagctgcacccccagccggattctggaccacaggggcgcctccctgaggatgtgctgctcaaagagctggagctggtgcagaatgccttcttcactgaccccaatgaccagagtgcctggttttatcaccgttggctcctaggccgagctgacccccaggatgcactgcgctgcctgcatgtgagccgggacgaggcctgtctgactgtctccttctctcggcccctcttagtgggctccaggatggagatcttgctgctcatggttgatgattctcccctgattgtggagtggaggaccccagatggcaggaaccggcccagccatgtctggctctgtgacctgcctgctgcctccctcaacgaccagttgccccaacatacatttcgcgtcatttggacagcaggcgatgtccagaaagaatgcgtgcttttaaaaggccgccaggagggctggtgccgggactccacgacagacgagcagctattcaggtgtgagctgtcagtggagaagtccacagtgctgcagtctgagctggaatcctgtaaggagctgcaggagctggagcctgagaataaatggtgcctgcttaccatcatcctgctgatgcgggcactggaccccctgctgtatgagaaggagaccctgcagtacttccagaccctcaaggcaagccgtggaccccatgcgggcaacgtatctggatgacctgcgcagcaagttcttgctggagaatagcgtgctcaagatggagtatgccgaggtgcgtgtgctgcacctggctcacaaggatctgacagtgctctgccatctggaacagctgctcttggtcacccatcttgacttgtcacacaatcgcctccgaaccctgccacctgcactggctgccctgcgctgccttgaggtgctgcaggccagtgataatgccatagagtccctggacggcgtcaccaacctaccccggctgcaggagctgctactgtgcaacaaccgcctccagcagcctgcagtgctccagcctcttgcctcctgccccaggctggtcctcctcaacctgcagggtaacccgctgtgccaagcggtgggcatcttggagcaactggctgaactgctgccttcagttagcagcgtcctcacctaagaggccctgccccctacccttgccctttaacttattgggactgaataaagaatggaga

SEQ ID NO: 172935 - DNA, 680 bp, Homo sapiens
  Payload ID: 13985
  Gene Symbol: RABGGTA
  Gene Name: Rab geranylgeranyltransferase, alpha subunit
  ENST ID: ENST00000560521
  CDS Start-End: 1-527
agtctgagctggaatcctgtaaggagctgcaggagctggagcctgagaataaatggtgcctgcttaccatcatcctgctgatgcgggcactggaccccctgctgtatgagaaggagaccctgcagtacttccagaccctcaaggccgtggaccccatgcgggcaacgtatctggatgacctgcgcagcaagttcttgctggagaatagcgtgctcaagatggagtatgccgaggtgcgtgtgctgcacctggctcacaaggatctgacagtgctctgccatctggaacagctgctcttggtcacccatcttgacttgtcacacaatcgcctccgaaccctgccacctgcactggctgccctgcgctgccttgaggtgctgcaggccagtgataatgccatagagtccctggacggcgtcaccaacctaccccggctgcaggagctgctactgtgcaacaacccagcctgcagtgctccagcctcttgcctcctgccccaggctggtcctcctcaacctgcagggtaacccgctgtgccaagcggtgggcatcttggagcaactggctgaactgctgccttcagttagcagcgtcctcacctaagaggccctgccccctacccttgccctttaacttattgggactgaataaagaatggagaggccctctcaggctaccaa

SEQ ID NO: 172936 - DNA, 1963 bp, Homo sapiens
  Payload ID: 13985
  Gene Symbol: RABGGTA
  Gene Name: Rab geranylgeranyltransferase, alpha subunit
  ENST ID: ENST00000559974
  CDS Start-End: 197-1471
cagcgcctgggctctgtggcgggcgccgcagctccgcgtcccccgcgcctcctcccagcgcaggcacgcttgctgcttccggacacagctgtgggcggagctagtaggggcggggctacgtgattgacacttctctcctcagacttcaagggctaccactggacccttcccctgtcttgaaccctgagccggcaccatgcacggacgcctgaaggtgaagacgtcagaagagcaggcggaggccaaaaggctagagcgagagcagaagctgaagctataccagtcagccacccaggccgtattccagaagcgccaggctggtgagctggatgagtccgtgctggaactgacaagccagattctgggagccaaccctgattttgccaccctctggaactgccgacgagaggtgctccagcagctggagactcagaagtctcctgaagagttggctgctctggtgaaggcagaactgggcttcctggagagctgcctgcgggtgaaccccaagtcttatggtacctggcaccaccgatgctggctgctaggccgcctgcctgagcccaactggacccgagagctggagctctgtgcccgtttcctggaggtggatgagcggaactttcactgctgggactatcggcggtttgtggccacacaggcagccgtgccccctgcagaagagctagccttcactgacagcctcatcacccgaaacttctccaactactcttcctggcattaccgctcctgtctcttgccccagctgcacccccagccggattctggaccacaggggcgcctccctgaggatgtgctgctcaaagagctggagctggtgcagaatgccttcttcactgaccccaatgaccagagtgcctggttttatcaccgttggctcctaggccgagctgacccccaggatgcactgcgctgcctgcatgtgagccgggacgaggcctgtctgactgtctccttctctcggcccctcttagtgggctccaggatggagatcttgctgctcatggttgatgattctcccctgattgtggagtggaggaccccagatggcaggaaccggcccagccatgtctggctctgtgacctgcctgctgcctccctcaacgaccagttgccccaacatacatttcgcgtcatttggacagcaggcgatgtccagaaagaatgcgtgcttttaaaaggccgccaggagggctggtgccgggactccacgacagacgagcagctattcaggtgtgagctgtcagtggagaagtccacagtgctgcagtctgagctggaatcctgtaaggagctgcaggagctggagcctgagaataaatggtgcctgcttaccatcatcctgctgatgcgggcactggaccccctgctgtatgagaaggagaccctgcagtacttccagaccctcaaggcaagccgtggaccccatgcgggcaacgtatctggatgacctgcgcagcaagttcttgctggagaatagcgtgctcaagatggagtatgccgaggtgcgtgtgctgcacctggctcacaaggatctgacagtgctctgccatctggaacagctgctcttggtcacccatcttgacttgtcacacaatcgcctccgaaccctgccacctgcactggctgccctgcgctgccttgaggtgctgcaggccagtgataatgccatagagtccctggacggcgtcaccaacctaccccggctgcaggagctgctactgtgcaacaaccgcctccagcagcctgcagtgctccagcctcttgcctcctgccccaggctggtcctcctcaacctgcagggtaacccgctgtgccaagcggtgggcatcttggagcaactggctgaactgctgccttcagttagcagcgtcctcacctaagaggccctgccccctacccttgccctttaacttattgggactgaataaagaatggagag

SEQ ID NO: 172937 - DNA, 1496 bp, Homo sapiens
  Payload ID: 13986
  Gene Symbol: RABGGTB
  Gene Name: Rab geranylgeranyltransferase, beta subunit
  Uniprot ID: P53611
  ENST ID: ENST00000319942
  CDS Start-End: 72-1067
gcatctgcgcaggcgcccggctcctaagtctacccaggaactgaccctgctctctcctttccctgttagacatgggcactccacagaaggatgttattatcaagtcagatgcaccggacactttgttattggagaaacatgcagattatatcgcatcctatggctcaaagaaagatgattatgaatactgtatgtctgagtatttgagaatgagtggcatctattggggtctgacagtaatggatctcatgggacaacttcatcgcatgaatagagaagagattctggcatttattaagtcttgccaacatgaatgtggtggaataagtgctagtatcggacatgatcctcatcttttatacactcttagtgctgtccagattcttacgctgtatgacagtattaatgttattgacgtaaataaagttgtggaatatgttaaaggtctacagaaagaagatggttcttttgctggagatatttggggagaaattgacacaagattctctttttgtgcggtggcaactttggctttgttggggaagcttgatgctattaatgtggaaaaggcaatcgaatttgttttatcctgtatgaactttgacggtggatttggttgcagaccaggttctgaatcccatgctgggcagatctattgttgcacaggatttctggcaattacaagtcagttgcatcaagtaaattctgatttacttggctggtggctttgtgaacgacaattaccctcaggcgggctcaatggaaggccggagaagttaccagatgtatgctactcatggtgggtcctggcttccctaaagataattggaagacttcattggattgatagagagaaactgcgtaatttcattttagcatgtcaagatgaagaaacggggggatttgcagacaggccaggagatatggtggatccttttcataccttatttggaattgctggattgtcacttttgggagaagaacagattaaacctgttaatcctgtcttttgcatgcctgaagaagtgcttcagagagtgaatgttcagcctgagctagtgagctagattcattgaattgaaagttgcatagtatagttttgccattttaacatttctgtatttgaagtgcttatcgaatctaaaagtgactactgttaatattttgtatattgtgttaaattaattttaataaattatataattatacatattgtaaaataaagaccggtattttattttctgctttttattctgaagtcctgttattctgactacagttctttgtgtatacttctgtgtctgttatgttcaataactgagctaacataaaataactctaggtttctacttgatttttcccccatgtatacctttcatctgttctatagcaagttgatgtaaattggtttgtcaacaagaatgttaactgatgaaagtggatagaacccatacatgaattaaatgatgcacaaaataaatggctgttgaaatttg

SEQ ID NO: 172938 - DNA, 512 bp, Homo sapiens
  Payload ID: 13986
  Gene Symbol: RABGGTB
  Gene Name: Rab geranylgeranyltransferase, beta subunit
  ENST ID: ENST00000370826
  CDS Start-End: 42-500
tacccaggaactgaccctgctctctcctttccctgttagacatgggcactccacagaaggatgttattatcaagtcagatgcaccggacactttgttattggagaaacatgcagattatatcgcatcctatggctcaaagaaagatgattatgaatactgtatgtctgagtatttgagaatgagtggcatctattggggtctgacagtaatggatctcatgggacaacttcatcgcatgaatagagaagagattctggcatttattaagtcttgccaacatgaatgtggtggaataagtgctagtatcggacatgatcctcatcttttatacactcttagtgctgtccagattcttacgctgtatgacagtattaatgttattgacgtaaataaagttgtggaatatgttaaaggtctacagaaagaagatggttcttttgctggagatatttggggtaatgtcagatttagtccattctacccaaaataccaatattaaaatgtactggtt

SEQ ID NO: 172939 - DNA, 4997 bp, Homo sapiens
  Payload ID: 13987
  Gene Symbol: RABGAP1
  Gene Name: RAB GTPase activating protein 1
  Uniprot ID: Q9Y3P9
  ENST ID: ENST00000373647
  CDS Start-End: 135-3344
ggggacagggcggtttgggaggcccaggcggcggagcctccgggacggcgagcggcgggcggcggaggaggagacggcaggtcgggcattaaaaaatatttaatcattcatgtgttgagactcattcttgagttatggatgacaaggcttctgttggaaaaatcagtgtctcttcagactcagtatctactcttaatagtgaagattttgtcttggtttccaggcaaggagatgagacaccatctacaaataatggaagtgatgatgagaaaacaggactcaagattgtagggaatggaagtgaacagcagctgcaaaaagagctagcagatgtactgatggatcctccaatggacgaccagccaggggaaaaggagcttgtgaaaaggtcacaactggatggtgaaggagatgggcctctttctaatcagctctccgcttcatccaccattaaccctgtgccattagtagggctccaaaaaccagagatgagcctaccagtgaaacctggacaaggagattctgaagcttcaagtcctttcacaccagtggccgatgaggacagcgtagttttcagtaaactgacttacttaggctgtgcctcggtaaatgctcccaggagtgaagtggaagccttaaggatgatgtccatcttaagaagccagtgtcagatttcactagatgttaccctttcagtgccgaatgtgtctgaaggaattgtgagactcttagatcctcagacaaacactgaaatagcaaactaccctatctacaaaatcctcttctgtgtcagagggcatgatggaactcctgagagtgactgttttgctttcactgaaagtcattacaatgcagagctcttcagaatacacgtcttccggtgtgaaatacaagaagctgtaagccggatactttacagttttgccactgccttccgccgttctgccaagcagaccccactttcagccactgctgcaccccagactcctgacagtgacatctttaccttctctgtgtctttagaaataaaagaagatgatggtaaaggttattttagtgcagttcccaaagataaggacagacagtgctttaaactacgccaaggaattgataagaagattgtcatctatgtgcagcaaacaactaataaagaacttgccattgaaaggtgttttggtcttctccttagtccaggaaaagatgtacgaaatagtgacatgcacttattagatttggaatctatgggcaaaagttcagatggaaagtcgtatgttattacggggagctggaatccaaaatccccacattttcaagttgtaaatgaagaaactcctaaagataaagtcctgtttatgaccacagctgtagatttggtaataacagaagtacaggagcctgttcgatttctcctggagacaaaagtccgcgtttgctcacctaatgaaagattattctggcccttcagcaaacgtagtactactgaaaatttctttttgaaactaaaacagataaagcaaagggagagaaagaataatactgacactttatatgaagttgtatgcttggaaagtgaatcagaaagagagaggaggaaaactacagccagtccttcagttcgcctgccacagtctggatcgcaaagttcagtgataccttctcctccagaagatgatgaagaggaagataatgatgaacctctcctgagtggatctggtgatgtatccaaagaatgtgcagaaaaaattcttgaaacatggggagaactgttgtcaaaatggcatctcaacttgaatgtgagaccgaagcagttgtcatccttagtaagaaacggtgtccctgaagctcttcgaggagaagtctggcagctgctagcaggctgtcataacaatgaccacctggtagagaaataccgcattcttatcacaaaggagtctccccaggacagtgctatcacccgggatattaaccgaacattcccagcccatgactactttaaggacacaggaggagatggacaagattccttatataaaatatgcaaggcttattctgtgtatgatgaagagattggttattgccagggccagtcatttcttgctgctgtgctccttctccatatgcctgaagaacaggcattcagtgttctggtcaagatcatgtttgactatgggctcagggaacttttcaagcaaaacttcgaagatttgcattgcaaattttaccagttggagcgcctcatgcaggaatacattcctgacctgtacaaccacttcctggatataagccttgaagcacacatgtatgcctcccagtggtttcttactcttttcactgcaaaattccctctctacatggtcttccatatcatcgacctgcttttatgtgagggaataagtgttatttttaatgtcgcccttggattattaaagacttcgaaagatgacctgctgttgacagactttgaaggtgccttgaagttctttagggttcagcttcctaagagataccgctcagaagaaaatgcaaaaaaactaatggaattagcctgcaacatgaagattagtcagaagaagttgaaaaaatacgagaaagaatatcacaccatgagggaacagcaggcccagcaagaagaccccatcgagcgatttgagcgggagaataggcgtctacaagaagctaacatgaggttggaacaggaaaacgatgacttagcccatgagctggtgaccagcaagattgcactacggaaggacctggataacgctgaggaaaaggcagatgctctgaataaggagctgctgatgaccaaacagaagttgattgatgcagaagaagagaaaagacggctggaagaagagtctgctcagttaaaagaaatgtgccgtcgggaactcgacaaggcagaatctgagattaaaaaaaacagttctatcattggtgactataagcagatttgttctcagttgagtgaaagattggagaagcagcagacagccaataaggtggaaattgagaaaattcggcaaaaagtggatgactgtgagcggtgccgggaatttttcaacaaagaagggcgtgtaaaaggcataagctcaaccaaggaggttttagatgaggacacggatgaagagaaagagacgctcaagaaccagctgagagaaatggagctagaactggcacagaccaaactccagctggtggaggccgagtgtaagatacaggacttggaacaccatttagggcttgccctcaatgaggtgcaggcagccaagaagacgtggtttaaccgaacactgagctccataaagacagcaaccggggttcaagggaaagagacttgctgagagcagctgccgcctcccgacaccttcagaaaacacgacaccttttgttgccttctttggccagatgtgtgattctgtgacttgtcccaggaccagaatgtacctaagtcagatccatagacgcatgttggtaggtcactggaccagagcttgtgaagcaggcaacctctggggtaagactactgatactaacaggcctgctagctcagccgacgctctggacactctagaaatcactcctcagtgtgacctcccaggcctcttccccgtgtacgtcaacacctcacccagcctaaaggctgagtttacatgatcagagttaggggatccttcagtctgttgattttttttctaaaccttttttttttaatatacatatatatatatatatatatatatatatatatatatatatatatatatagtgggggtggggcaagggatcagaaattcaaataattcttttctgcttcaatgccagcagaaggtcccccaggtagacatggagaagcactttgttttaaataggagggtttcatagttgcatctgaagccacctggttctgttaaactgtatggtgcaggttttgggtttggcattattcatgtttctgatcaattctatgcaactctcatagttcctgttactttttagcattagctgccaaatgacttcaaaaggctggggtgggtgacttgactgtgagactggattataacatggacaaatcttattttgcttaatgtgtttgtgtgtgtgtgtgtgtgtgtgtgtgtgtgtgtatgtatatatatatataaatatctttcccaatatgccccgttgacagtgtttaaattccagactaggactgctgatctgcacaatttaattatgtggttattcgagcacttaatttcactcaaggttcattgggctctgctctcctccctgccattacgggagctgtggacagagctccctcacttcaagattcctagtgtttttgcacaacaggttgtccaagtgagaaagactgagttgcgtgtctgtaaatgtctgcgcagggtgcacatgctgcgaggtctccatcctccgggcctgtccctcccagatgggctgggcctttgggccctcctcagagtatgcctgggtacaaacctcactgttcagatgggctgtaagttctcacttcaaagctatggaatggattttagcacctttaaaaaaaaaaaaaactttgacttttaatttatatagtgatatgctgacaggctgacacgcagatggttttgtcctcttttctgcgttcagtgttgaggcggctgcttacaagaggcactggttttgtatataaagacactcgggttgttttgtagctctttttcttattggctgtactaacgcttgctgaggttatctgtaataagggaggtaacaagtggcaaccccctccccaccaaccatcccctttgctgctttctgtgtctttcttgttcagttaccaaaatagctgtaagcctatctaatgctaggtgtgtggacattgtgctaaggtagtttcagtgtgtcaactttatgaattgaaatataaaccagtaaaattgtattactgtttcttttgttggttttattttaacagcatattgattaaatattttggtacaaacaaa

SEQ ID NO: 172940 - DNA, 543 bp, Homo sapiens
  Payload ID: 13987
  Gene Symbol: RABGAP1
  Gene Name: RAB GTPase activating protein 1
  ENST ID: ENST00000402311
  CDS Start-End: 207-543
caggcggcggagcctccgggacggcgagcggcgggcggcggaggaggagacggcagactgaccaaatatggaagtgtgcaagtcttgaacacattagtttatacaatgtggcctgaaagtttccctcctctttccaaatcaaccataatattctgaggcattaaaaaatatttaatcattcatgtgttgagactcattcttgagttatggatgacaaggcttctgttggaaaaatcagtgtctcttcagactcagtatctactcttaatagtgaagattttgtcttggtttccaggcaaggagatgagacaccatctacaaataatggaagtgatgatgagaaaacaggactcaagattgtagggaatggaagtgaacagcagctgcaaaaagagctagcagatgtactgatggatcctccaatggacgaccagccaggggaaaaggagcttgtgaaaaggtcacaactggatggtgaaggagatgggcctctttctaatcagctctccgcttcatccaccattaaccctgtgccattagtag

SEQ ID NO: 172941 - DNA, 3897 bp, Homo sapiens
  Payload ID: 13987
  Gene Symbol: RABGAP1
  Gene Name: RAB GTPase activating protein 1
  Uniprot ID: Q9Y3P9
  ENST ID: ENST00000456584
  CDS Start-End: 607-2406
agtcctgaggcgggctgaaagcccaggtggggctcggagaagaggaagctccgcctcgcttcccggcattaaaaaatatttaatcattcatgtgttgagactcattcttgagttatggatgacaaggcttctgttggaaaaatcagtgtctcttcagactcagtatctactcttaatagtgaagattttgtcttggtttccaggcaaggagatgagacaccatctacaaataatggaagtgatgatgagaaaacaggactcaagagccagtgaaattaaaagtgcagcagatatgttaaacagcaaattacacatggctgaagagagaatcaaatacctggaaaatggatctgaagaaattatccagaagatagcattgaaagatatgaaagaccacttaagagacatgaaaattaagatgagaaggaccaaccatcttaagtgttctataataagagaatggtgaagatggaagaaaatacttgaagagataatagttgaatattttccagaagtgataaacgatataaatcattggcttcaaagaacacaattgtagggaatggaagtgaacagcagctgcaaaaagagctagcagatgtactgatggatcctccaatggacgaccagccaggggaaaaggagcttgtgaaaaggtcacaactggatggtgaaggagatgggcctctttctaatcagctctccgcttcatccaccattaaccctgtgccattagtagggctccaaaaaccagagatgagcctaccagtgaaacctggacaaggagattctgaagcttcaagtcctttcacaccagtggccgatgaggacagcgtagttttcagtaaactgacttacttaggctgtgcctcggtaaatgctcccaggagtgaagtggaagccttaaggatgatgtccatcttaagaagccagtgtcagatttcactagatgttaccctttcagtgccgaatgtgtctgaaggaattgtgagactcttagatcctcagacaaacactgaaatagcaaactaccctatctacaaaatcctcttctgtgtcagagggcatgatggaactcctgagagtgactgttttgctttcactgaaagtcattacaatgcagagctcttcagaatacacgtcttccggtgtgaaatacaagaagctgtaagccggatactttacagttttgccactgccttccgccgttctgccaagcagaccccactttcagccactgctgcaccccagactcctgacagtgacatctttaccttctctgtgtctttagaaataaaagaagatgatggtaaaggttattttagtgcagttcccaaagataaggacagacagtgctttaaactacgccaaggaattgataagaagattgtcatctatgtgcagcaaacaactaataaagaacttgccattgaaaggtgttttggtcttctccttagtccaggaaaagatgtacgaaatagtgacatgcacttattagatttggaatctatgggcaaaagttcagatggaaagtcgtatgttattacggggagctggaatccaaaatccccacattttcaagttgtaaatgaagaaactcctaaagataaagtcctgtttatgaccacagctgtagatttggtaataacagaagtacaggagcctgttcgatttctcctggagacaaaagtccgcgtttgctcacctaatgaaagattattctggcccttcagcaaacgtagtactactgaaaatttctttttgaaactaaaacagataaagcaaagggagagaaagaataatactgacactttatatgaagttgtatgcttggaaagtgaatcagaaagagagaggaggaaaactacagccagtccttcagttcgcctgccacagtctggatcgcaaagttcagtgataccttctcctccagaagatgatgaagaggaagataatgatgaacctctcctgagtggatctggtgatgtatccaaagaatgtgcagaaaaaattcttgaaacatggggagaactgttgtcaaaatggcatctcaacttgaatgtgagaccgaagcagttgtcatccttagtaagaaacggtgtccctgaagctcttcgaggagaagtctggcagctgctagcaggctgtcataacaatgaccacctggtagagaaataccgcattcttatcacaaaggagtctccccaggacagtgctatcacccgggatattaaccgaacattcccagcccatgactactttaaggacacaggaggagatggacaagattccttatataaaatatgcaaggtatttcatgtcaaaaaaaaaaaggactcaattctgagtggtggttctactttgaaattacataagaaacaactacaaagtgtaatttgtatttgatgttcaagaattccaaaaagagaaaagacattgcaaagtcaaaggcttattctgtgtatgatgaagagattggttattgccagggccagtcatttcttgctgctgtgctccttctccattttaaaatgcttggcaagaataccacacaggtgatgtcagcaaagagttttgagtacctgttatgatctgtactgtgctgaagatcagagatgcctgaagaacaggcattcagtgttctggtcaagatcatgtttgactatgggctcagggaacttttcaagcaaaacttcgaagatttgcattgcaaattttaccagttggagcgcctcatgcaggaatacattcctgacctgtacaaccacttcctggatataagccttgaagcacacatgtatgcctcccagtggtttcttactcttttcactgcaaaattccctctctacatggtcttccatatcatcgacctgcttttatgtgagggaataagtgttatttttaatgtcgcccttggattattaaagacttcgaaagatgacctgctgttgacagactttgaaggtgccttgaagttctttagggttcagcttcctaagagataccgctcagaagaaaatgcaaaaaaactaatggaattagcctgcaacatgaagattagtcagaagaagttgaaaaaatacgagaaagaatatcacaccatgagggaacagcaggcccagcaagaagaccccatcgagcgatttgagcgggagaataggcgtctacaagaagctaacatgaggttggaacaggaaaacgatgacttagcccatgagctggtgaccagcaagattgcactacggaaggacctggataacgctgaggaaaaggcagatgctctgaataaggagctgctgatgaccaaacagaagttgattgatgcagaagaagagaaaagacggctggaagaagagtctgctcagttaaaagaaatgtgccgtcgggaactcgacaaggcagaatctgagattaaaaaaaacagttctatcattggtgactataagcagatttgttctcagttgagtgaaagattggagaagcagcagacagccaataaggtggaaattgagaaaattcggcaaaaagtggatgactgtgagcggtgccgggaatttttcaacaaagaagggcgtgtaaaaggcataagctcaaccaaggaggttttagatgaggacacggatgaagagaaagagacgctcaagaaccagctgagagaaatggagctagaactggcacagaccaaactccagctggtggaggccgagtgtaagatacaggacttggaacaccatttagggcttgccctcaatgaggtgcaggcagccaagaagacgtggtttaaccgaacactgagctccataaagacagcaaccggggttcaagggaaagagacttgctgagagcagctgccgcctcccgacaccttcagaaaacacgacaccttttgttgccttc

SEQ ID NO: 172942 - DNA, 996 bp, Homo sapiens
  Payload ID: 13987
  Gene Symbol: RABGAP1
  Gene Name: RAB GTPase activating protein 1
  ENST ID: ENST00000426918
  CDS Start-End: 54-254
tcgggcattaaaaaatatttaatcattcatgtgttgagactcattcttgagttatggatgacaaggcttctgttggaaaaatcagtgtctcttcagactcagtatctactcttaatagtgaagattttgtcttggtttccaggcaaggagatgagacaccatctacaaataatggaagtgatgatgagaaaacaggactcaagattctgaagcttcaagtcctttcacaccagtggccgatgaggacagcgtagttttcagtaaactgacttacttaggctgtgcctcggtaaatgctcccaggagtgaagtggaagccttaaggatgatgtccatcttaagaagccagtgtcagatttcactagatgttaccctttcagtgccgaatgtgtctgaaggaattgtgagactcttagatcctcagacaaacactgaaatagcaaactaccctatctacaaaatcctcttctgtgtcagagggcatgatggaactcctgagagtgactgttttgctttcactgaaagtcattacaatgcagagctcttcagaatacacgtcttccggtgtgaaatacaagaagctgtaagccggatactttacagttttgccactgccttccgccgttctgccaagcagaccccactttcagccactgctgcaccccagactcctgacagtgacatctttaccttctctgtgtctttagaaataaaagaagatgatggtaaaggttattttagtgcagttcccaaagataaggacagacagtgctttaaactacgccaaggaattgataagaagattgtcatctatgtgcagcaaacaactaataaagaacttgccattgaaaggtgttttggtcttctccttagtccaggaaaagatgtacgaaatagtgacatgcacttattagatttggaatctatgggcaaaagttcagatggaaagtcgtatgttattacggggagctggaatccaaaatccccacattttca

SEQ ID NO: 172943 - DNA, 1595 bp, Homo sapiens
  Payload ID: 13987
  Gene Symbol: RABGAP1
  Gene Name: RAB GTPase activating protein 1
  ENST ID: ENST00000616002
  CDS Start-End: 497-1546
gttctgcagtacgcgggttgaagcacattcctgctttgcaaggctttctgctaaggatgtattgtggcttttgtttggattgcagcatgcagaattacagctgttcagaggagactcattacaactcctgctgaagctcctaatcttcttcccttctcttctaccctttccccctaccctcacttggcctgaagacgttctccccagagtttaccttgctcccctggtgctatgtgtatggtgaacctggcactatggccgcgtctgggactggccagacaactgctgctggctctccttattccaggaaggatttaaaggggaattgcactgcaggcaatgcaccagagcagcagcatcaggagcttggggagtaaggctcctctggcattattacacacatgcaaagctgaccgcaatgacagcagctgcttctttgaactgttggcagcagccaagcggcagcatgaagtgacagatcactcctgagctcaagatgaactccaccttggatggtaatcagagcagccaccctttttgcctcttggcatttggctatttggaaactgtcaatttttgccttttggaagtattgattattgtctttctaactgtattgattatttctggcaacatcattgtgatttttgtatttcactgtgcacctttgttgaaccatcacactacaagttattttatccagactatggcatatgctgacctttttgttggggtgagctgcgtggtcccttctttatcactcctccatcacccccttccagtagaggagtccttgacttgccagatatttggttttgtagtatcagttctgaagagcgtctccatggcttctctggcctgtatcagcattgatagatacattgccattactaaacctttaacctataatactctggttacaccctggagactacgcctgtgtattttcctgatttggctatactcgaccctggtcttcctgccttcctttttccactggggcaaacctggatatcatggagatgtgtttcagtggtgtgcggagtcctggcacaccgactcctacttcaccctgttcatcgtgatgatgttatatgccccagcagcccttattgtctgcttcacctatttcaacatcttccgcatctgccaacagcacacaaaggatatcagcgaaaggcaagcccgcttcagcagccagagtggggagactggggaagtgcaggcctgtcctgataagcgctatgccatggtcctgtttcgaatcactagtgtattttacatcctctggttgccatatatcatctacttcttgttggaaagctccactggccacagcaaccgcttcgcatccttcttgaccacctggcttgctattagtaacagtttctgcaactgtgtaatttatagtctctccaacagtgtattccaaagaggactaaagcgcctctcaggggctatgtgtacttcttgtgcaagtcagactacagccaacgacccttacacagttagaagcaaaggccctcttaatggatgtcatatctgaagtggctcagttacggggttcccgtgtgtgtgtgtgtgtgtgtgtgtgt

SEQ ID NO: 172944 - DNA, 2899 bp, Homo sapiens
  Payload ID: 13988
  Gene Symbol: RABGAP1L
  Gene Name: RAB GTPase activating protein 1-like
  Uniprot ID: Q5R372
  ENST ID: ENST00000251507
  CDS Start-End: 175-2622
ctcagttccctccgccctcctcgggctccagcggtggcggagcgaacgggaccggcccggcttcagagcgcgaggtggagggtggaacgcgggcgcctgaaggagttgttgtctcggcagcgcccgcggagacgtgaagaggtggttgtgggaagagaagtttgcagaactgaaatggaggtcagagcttcattacagaaggttagtggatcatctgattctgtggctacaatgaacagtgaagaatttgttttggttcctcagtatgcagatgataattctacaaaacatgaagaaaaacctcaactgaagatagtttctaatggtgatgaacaattggaaaaagccatggaagagattttgagagattccgagaaaaggccaagcagtcttcttgttgattgtcaaagttccagtgagatttcagaccattcgtttggagatattccagccagccaaacaaataagccatctcttcagttaattttggatccgtctaacacagaaatttctacacccagaccatcttctccaggtggactacctgaagaagatagtgttttatttaataaactgacctacttaggatgtatgaaggtttcttccccacgtaatgaagtagaggctttacgggcaatggcaaccatgaaatcttccagtcaatacccctttcctgttaccctgtatgtaccaaatgttccagaaggttctgtgagaattatagaccaatccagcaatgtggagatagcatcttttccaatctataaggtgttattctgtgcacgtggacatgacggaacaacagagagcaattgctttgcatttacagagagttcccatggttcggaagaatttcagatacatgttttctcctgtgaaattaaagaggcagtaagcagaattttgtacagtttctgtacagcattcaaacgttcttccagacaagtgtctgatgttaaagactcagttattcctacccccgacagtgatgtgtttaccttcagtgtctccttggaggtaaaagaagacgatggaaaaggaaactttagccctgtgcctaaggatagagataaattttatttcaaattaaagcaaggaatagagaagaaggttgtgattacagtgcagcaactttctaacaaagaattagctattgaaagatgttttggaatgttattaagcccaggtcgaaacgtgaagaacagtgacatgcatttactggatatggaatccatgggaaagagctatgatgggagagcttatgtcatcactggcatgtggaaccccaatgcaccagtatttctggcacttaacgaggaaaccccaaaagataagcaagtatacatgactgtggcagtggatatggtagtcacagaggtggtggagcctgttcgctttctcctggagacagtagtccgtgtgtaccctgcaaatgagcgattttggtatttcagcagaaagactttcacagagactttcttcatgagattgaaacagtctgagggaaaaggccataccaatgctggagatgcaatatatgaggtggtgagtctacagcgagagtctgacaaggaggaaccagtcactcctactagtggagggggtccaatgtcaccccaggatgatgaagcagaagaggagagtgataatgaactctcaagtggaacaggtgatgtgtctaaggattgtcctgagaagatcctgtattcttggggagagttgctaggaaaatggcacagtaaccttggtgcacgaccgaaagggctgtctactctggtgaagagtggtgtccctgaagcattgagggcagaggtatggcagttattggcaggctgccatgacaaccaggcaatgctggatagataccgaattcttatcacaaaggactcagcccaggagagtgttattactcgagatattcatcgtacatttcccgcacatgattactttaaagatactggaggagatggtcaagaatcgctctataagatctgcaaggcctactctgtgtatgatgaagacattgggtactgtcaagggcagtcttttcttgctgctgtattactgctgcatatgccagaggaacaagcattctgtgttttggtgaaaatcatgtacgactatggtttgagagacctctacagaaacaacttcgaagatcttcattgcaaattctaccagttggagagactaatgcaggaacagctaccggacctgcatagccatttttctgatctgaacctggaagctcatatgtatgcatcccagtggtttctcactctttttactgccaagttcccactctgcatggtgttccacatcattgacttactgctttgtgagggtttgaacataatctttcatgtagctttggctctcctaaagacctcaaaggaagaccttctgcaggctgattttgaaggtgctttaaagttctttagagttcagcttccaaagagatacagggcagaggaaaatgcaagaagactgatggagcaggcttgcaatattaaagtaccaaccaagaagctgaagaaatatgagaaagaatatcagacaatgcgagagagtcagctgcaacaggaagacccaatggatagatacaagtttgtatatttgtaggtaactccagctgttgcatttatactgggaatcttcataagaagctgagagaaagagaggggaaaaagaaagtggctttctactttcaaaaatgaaacaaaaaggaaaaatggcaaagtactgttttagctgtgcatgtcatatccacaaagacttttagcaggtgaactgttccaagactgacacaaggatgtttcaaacttgcctctgtctgtagaaaatgttaaaaataccaactcacttggaaggaaaaataaaaatcacaaaggtatattga

SEQ ID NO: 172945 - DNA, 1744 bp, Homo sapiens
  Payload ID: 13988
  Gene Symbol: RABGAP1L
  Gene Name: RAB GTPase activating protein 1-like
  Uniprot ID: Q5R372
  ENST ID: ENST00000347255
  CDS Start-End: 96-1232
gcacatttggctatttttcaaagagagcatgtagttcaagaaatggcttattttgttttttattcttctttttgtggtctatttaggaaaacaaaatgaaggaacagctaccggacctgcatagccatttttctgatctgaacctggaagctcatatgtatgcatcccagtggtttctcactctttttactgccaagttcccactctgcatggtgttccacatcattgacttactgctttgtgagggtttgaacataatctttcatgtagctttggctctcctaaagacctcaaaggaagaccttctgcaggctgattttgaaggtgctttaaagttctttagagttcagcttccaaagagatacagggcagaggaaaatgcaagaagactgatggagcaggcttgcaatattaaagtaccaaccaagaagctgaagaaatatgagaaagaatatcagacaatgcgagagagtcagctgcaacaggaagacccaatggatagatacaagagggagaaccgaagattacaggaggccagcatgaggttggaacaagagaatgatgaccttgcccatgaactagtaacaagcaaaattgctctacggaatgacttggatcaggcagaagacaaggcagatgtgttgaataaagagctccttttgaccaaacagaggctggtggagactgaagaggagaagaggaagcaagaggaagagactgcccagctaaaagaagtcttcaggaaacagctagagaaggcagaatatgaaataaagaagactacagctatcattgctgagtataaacagatctgttcgcagttgagtaccaggctggagaaacagcaagcagccagcaaggaggagctggaagtggtaaagggtaagatgatggcatgcaaacactgcagtgacattttcagcaaggagggtgctttgaaactagcagccacaggcagagaggaccagggaattgaaacagatgatgagaaggactcacttaagaagcagctgagagagatggaactggaactggcacaaaccaaactgcagttggtggaggccaagtgtaaaattcaggaacttgaacatcagagaggagcccttatgaatgaaatccaagctgcgaaaaactcttggtttagcaaaaccctgaactctatcaaaacggccacgggcacccagccattgcagccagcaccggtcacccagccacccaaggagagcacatagttccagccttacccaagcacaagagcacaatgttcaaaccaatggaaatctgggaggattcttcctggtgtccctttgaaggaaagtcaaggaggccagaaaacaagccagaatttttcagtagctctcactctttcttgtatgacacttttcaaagggatgctatttaaactgacctgttctatgttgaatacctattttccagcttctggaaggccatgttcagatccatcatagtattacacattattttgtttgcctgatgtttagttggaaataagtaattcagaactaaatgcttttttatttagaattattcataattatttttatcttacataaaaatggagacatctgttattccaaggttgaagtgataagaagatctttgtcacaggaaaaaaaaaattgaaacctaaacatcttaagttttcaggatttattcagataaagcacactgtggggccaggcatgaccactctcaggtttcctcctgagcctgattcccaggg

SEQ ID NO: 172946 - DNA, 1880 bp, Homo sapiens
  Payload ID: 13988
  Gene Symbol: RABGAP1L
  Gene Name: RAB GTPase activating protein 1-like
  Uniprot ID: Q5R372
  ENST ID: ENST00000325589
  CDS Start-End: 396-1472
agggaagtgaagccagtaggagactgagagattagaagaacagggcagtagaggatgaatttgcagtgaggttaaaggaacaatttattgggagaagggaatgtaggagggtagaagactttaaaattgaaaagaaataaaaggaggcagggatgtaaaacgagccataagtacaatgacaaatgggcattaaggaggaaaaagactatgtagaagaatctggtaaatatggatattaacagcaataagctcctttttaacgatttaattctaccaagtaaatatttgggattactcgctttttgccttttatttaccaaaaaattcatatattttcaaaggaacagctaccggacctgcatagccatttttctgatctgaacctggaagctcatatgtatgcatcccagtggtttctcactctttttactgccaagttcccactctgcatggtgttccacatcattgacttactgctttgtgagggtttgaacataatctttcatgtagctttggctctcctaaagacctcaaaggaagaccttctgcaggctgattttgaaggtgctttaaagttctttagagttcagcttccaaagagatacagggcagaggaaaatgcaagaagactgatggagcaggcttgcaatattaaagtaccaaccaagaagctgaagaaatatgagaaagaatatcagacaatgcgagagagtcagctgcaacaggaagacccaatggatagatacaagagggagaaccgaagattacaggaggccagcatgaggttggaacaagagaatgatgaccttgcccatgaactagtaacaagcaaaattgctctacggaatgacttggatcaggcagaagacaaggcagatgtgttgaataaagagctccttttgaccaaacagaggctggtggagactgaagaggagaagaggaagcaagaggaagagactgcccagctaaaagaagtcttcaggaaacagctagagaaggcagaatatgaaataaagaagactacagctatcattgctgagtataaacagatctgttcgcagttgagtaccaggctggagaaacagcaagcagccagcaaggaggagctggaagtggtaaagggtaagatgatggcatgcaaacactgcagtgacattttcagcaaggagggtgctttgaaactagcagccacaggcagagaggaccagggaattgaaacagatgatgagaaggactcacttaagaagcagctgagagagatggaactggaactggcacaaaccaaactgcagttggtggaggccaagtgtaaaattcaggaacttgaacatcagagaggagcccttatgaatgaaatccaagctgcgaaaaactcttggtttagcaaaaccctgaactctatcaaaacggccacgggcacccagccattgcagccagcaccggtcacccagccacccaaggagagcacatagttccagccttacccaagcacaagagcacaatgttcaaaccaatggaaatctgggaggattcttcctggtgtccctttgaaggaaagtcaaggaggccagaaaacaagccagaatttttcagtagctctcactctttcttgtatgacacttttcaaagggatgctatttaaactgacctgttctatgttgaatacctattttccagcttctggaaggccatgttcagatccatcatagtattacacattattttgtttgcctgatgtttagttggaaataagtaattcagaactaaatgcttttttatttagaattattcataattatttttatcttacataaaaatggagacatctgttattccaaggttgaagtgataagaagatctttgtcacaggaaaaaaaaaa

SEQ ID NO: 172947 - DNA, 2605 bp, Homo sapiens
  Payload ID: 13988
  Gene Symbol: RABGAP1L
  Gene Name: RAB GTPase activating protein 1-like
  Uniprot ID: Q5R372
  ENST ID: ENST00000357444
  CDS Start-End: 282-2099
ggcctggacgagcgcgcttccgacccgccgccaccgcctcctcccctccttctcggcccgccccctccctcgcctcttcctgccaggcggcccttctcccctcccctctcagttccctccgccctcctcgggctccagcggtggcggagcgaacgggaccggcccggcttcagagcgcgaggtggagggtggaacgcgggcgcctgaaggagttgttgtctcggcagcgcccgcggagacgtgaagaggtggttgtgggaagagaagtttgcagaactgaaatggaggtcagagcttcattacagaagatagtttctaatggtgatgaacaattggaaaaagccatggaagagattttgagagattccgagaaaaggccaagcagtcttcttgttgattgtcaaagttccagtgagatttcagaccattcgtttggagatattccagccagccaaacaaataagccatctcttcagttaattttggatccgtctaacacagaaatttctacacccagaccatcttctccaggtggactacctgaagaagatagtgttttatttaataaactgacctacttaggatgtatgaaggtttcttccccacgtaatgaagtagaggctttacgggcaatggcaaccatgaaatcttccagtcaatacccctttcctgttaccctgtatgtaccaaatgttccagaaggttctgtgagaattatagaccaatccagcaatgtggagatagcatcttttccaatctataaggtgttattctgtgcacgtggacatgacggaacaacagagagcaattgctttgcatttacagagagttcccatggttcggaagaatttcagatacatgttttctcctgtgaaattaaagaggcagtaagcagaattttgtacagtttctgtacagcattcaaacgttcttccagacaagtgtctgatgttaaagactcagttattcctacccccgacagtgatgtgtttaccttcagtgtctccttggaggtaaaagaagacgatggaaaaggaaactttagccctgtgcctaaggatagagataaattttatttcaaattaaagcaaggaatagagaagaaggttgtgattacagtgcagcaactttctaacaaagaattagctattgaaagatgttttggaatgttattaagcccaggtcgaaacgtgaagaacagtgacatgcatttactggatatggaatccatgggaaagagctatgatgggagagcttatgtcatcactggcatgtggaaccccaatgcaccagtatttctggcacttaacgaggaaaccccaaaagataagcaagtatacatgactgtggcagtggatatggtagtcacagaggtggtggagcctgttcgctttctcctggagacagtagtccgtgtgtaccctgcaaatgagcgattttggtatttcagcagaaagactttcacagagactttcttcatgagattgaaacagtctgagggaaaaggccataccaatgctggagatgcaatatatgaggtggtgagtctacagcgagagtctgacaaggaggaaccagtcactcctactagtggagggggtccaatgtcaccccaggatgatgaagcagaagaggagagtgataatgaactctcaagtggaacaggtgatgtgtctaaggattgtcctgagaagatcctgtattcttggggagagttgctaggaaaatggcacagtaaccttggtgcacgaccgaaagggctgtctactctggtgaagagtggtgtccctgaagcattgagggcagaggtatggcagttattggcaggctgccatgacaaccaggcaatgctggatagataccgaattcttatcacaaagcaacagatgaaatttagtcttacaccgagacagactattcacctagttaaatatgaagggtctatgaaggtctccatgacaccctgtaaccagctgcaatttgacattagacttgatgttctgattacttatactttttgttttagttcctttcctgagcctgaattgtacaaatatgtcctaaaacaccaacttattaagaggcttaatgcctgttaaatgcgtcagtgctcttggcagcttagcatgagtgctttctttgcatgggaggttgcagtttagaagcaactttatggatcatttcccaggttgatgttacatatgttcattttacaacctgtgtgcataatctctcagggtgaaggtaattaagagaaagcataatctacagaattgaagccaagtaatctaagattctgtttttaaactctttgctatataacattagttaagttgtttaccctcttaatttatccatttgtaaaatgatagtttttgtttttaaagtgctctattacccttactttaaaagtcctgtctaccatatatttaaaactataagtggaaataatgaagaaactctgaacttgcttttgcttatatatggatatatcatattatatgcctaagattggagataaattttataacctgattttctcatggcagtgtacaaatgaaattattctgtaagtttttcaaaacagtaaaatcactatttttca

SEQ ID NO: 172948 - DNA, 1849 bp, Homo sapiens
  Payload ID: 13988
  Gene Symbol: RABGAP1L
  Gene Name: RAB GTPase activating protein 1-like
  Uniprot ID: Q5R372
  ENST ID: ENST00000367687
  CDS Start-End: 124-1257
gggcacatttggctatttttcaaagagagcatgtagttcaagaaatggcttattttgttttttattcttctttttgtggtctatttaggaaaacaaaatgaaggtggcctttgtctttcagttatggaacagctaccggacctgcatagccatttttctgatctgaacctggaagctcatatgtatgcatcccagtggtttctcactctttttactgccaagttcccactctgcatggtgttccacatcattgacttactgctttgtgagggtttgaacataatctttcatgtagctttggctctcctaaagacctcaaaggaagaccttctgcaggctgattttgaaggtgctttaaagttctttagagttcagcttccaaagagatacagggcagaggaaaatgcaagaagactgatggagcaggcttgcaatattaaagtaccaaccaagaagctgaagaaatatgagaaagaatatcagacaatgcgagagagtcagctgcaacaggaagacccaatggatagatacaagagggagaaccgaagattacaggaggccagcatgaggttggaacaagagaatgatgaccttgcccatgaactagtaacaagcaaaattgctctacggaatgacttggatcaggcagaagacaaggcagatgtgttgaataaagagctccttttgaccaaacagaggctggtggagactgaagaggagaagaggaagcaagaggaagagactgcccagctaaaagaagtcttcaggaaacagctagagaaggcagaatatgaaataaagaagactacagctatcattgctgagtataaacagatctgttcgcagttgagtaccaggctggagaaacagcaagcagccagcaaggaggagctggaagtggtaaagggtaagatgatggcatgcaaacactgcagtgacattttcagcaaggagggtgctttgaaactagcagccacaggcagagaggaccagggaattgaaacagatgatgagaaggactcacttaagaagcagctgagagagatggaactggaactggcacaaaccaaactgcagttggtggaggccaagtgtaaaattcaggaacttgaacatcagagaggagcccttatgaatgaaatccaagctgcgaaaaactcttggtttagcaaaaccctgaactctatcaaaacggccacgggcacccagccattgcagccagcaccggtcacccagccacccaaggagagcacatagttccagccttacccaagcacaagagcacaatgttcaaaccaatggaaatctgggaggattcttcctggtgtccctttgaaggaaagtcaaggaggccagaaaacaagccagaatttttcagtagctctcactctttcttgtatgacacttttcaaagggatgctatttaaactgacctgttctatgttgaatacctattttccagcttctggaaggccatgttcagatccatcatagtattacacattattttgtttgcctgatgtttagttggaaataagtaattcagaactaaatgcttttttatttagaattattcataattatttttatcttacataaaaatggagacatctgttattccaaggttgaagtgataagaagatctttgtcacaggaaaaaaaaaattgaaacctaaacatcttaagttttcaggatttattcagataaagcacactgtggggccaggcatgaccactctcaggtttcctcctgagcctgattcccagggaagtgttaatcctgtccaaaggaaagaaccaatcagcgatcattggtttactttcattttctgttcggtacatctggaaa

SEQ ID NO: 172949 - DNA, 1425 bp, Homo sapiens
  Payload ID: 13988
  Gene Symbol: RABGAP1L
  Gene Name: RAB GTPase activating protein 1-like
  Uniprot ID: B7ZAP0
  ENST ID: ENST00000367688
  CDS Start-End: 180-941
aagtatctttgttccattgaatgtttgcggtcacagagagaacttagagttatatgacactcaaaggaaaagcaaaagagcattaagaagtgtctgtttttgttattgccatttcataaatattttagtaggtgttcaatttcattggatattctttttttttaattgtctttgtacctatgattgaaaacagtagttggtctatgacttttgaggagagggagaaccgaagattacaggaggccagcatgaggttggaacaagagaatgatgaccttgcccatgaactagtaacaagcaaaattgctctacggaatgacttggatcaggcagaagacaaggcagatgtgttgaataaagagctccttttgaccaaacagaggctggtggagactgaagaggagaagaggaagcaagaggaagagactgcccagctaaaagaagtcttcaggaaacagctagagaaggcagaatatgaaataaagaagactacagctatcattgctgagtataaacagatctgttcgcagttgagtaccaggctggagaaacagcaagcagccagcaaggaggagctggaagtggtaaagggtaagatgatggcatgcaaacactgcagtgacattttcagcaaggagggtgctttgaaactagcagccacaggcagagaggaccagggaattgaaacagatgatgagaaggactcacttaagaagcagctgagagagatggaactggaactggcacaaaccaaactgcagttggtggaggccaagtgtaaaattcaggaacttgaacatcagagaggagcccttatgaatgaaatccaagctgcgaaaaactcttggtttagcaaaaccctgaactctatcaaaacggccacgggcacccagccattgcagccagcaccggtcacccagccacccaaggagagcacatagttccagccttacccaagcacaagagcacaatgttcaaaccaatggaaatctgggaggattcttcctggtgtccctttgaaggaaagtcaaggaggccagaaaacaagccagaatttttcagtagctctcactctttcttgtatgacacttttcaaagggatgctatttaaactgacctgttctatgttgaatacctattttccagcttctggaaggccatgttcagatccatcatagtattacacattattttgtttgcctgatgtttagttggaaataagtaattcagaactaaatgcttttttatttagaattattcataattatttttatcttacataaaaatggagacatctgttattccaaggttgaagtgataagaagatctttgtcacaggaaaaaaaaaattgaaacctaaacatcttaagttttcaggatttattcagataaagcacactgtggggccaggcatgaccactctca

SEQ ID NO: 172950 - DNA, 6282 bp, Homo sapiens
  Payload ID: 13988
  Gene Symbol: RABGAP1L
  Gene Name: RAB GTPase activating protein 1-like
  ENST ID: ENST00000392064
  CDS Start-End: 56-982
agtctggtctggagctgggacagcagctgctgctgtggaaaggccagctggcaagatgatggaagaaatctccattatggtagcctatgacgcccatgttttcagccagctgcacgatgaagacttcctcactagtctggtggccatcagcaagcccaggtctatggtaccaaccaagaagctgaagaaatatgagaaagaatatcagacaatgcgagagagtcagctgcaacaggaagacccaatggatagatacaagagggagaaccgaagattacaggaggccagcatgaggttggaacaagagaatgatgaccttgcccatgaactagtaacaagcaaaattgctctacggaatgacttggatcaggcagaagacaaggcagatgtgttgaataaagagctccttttgaccaaacagaggctggtggagactgaagaggagaagaggaagcaagaggaagagactgcccagctaaaagaagtcttcaggaaacagctagagaaggcagaatatgaaataaagaagactacagctatcattgctgagtataaacagatctgttcgcagttgagtaccaggctggagaaacagcaagcagccagcaaggaggagctggaagtggtaaagggtaagatgatggcatgcaaacactgcagtgacattttcagcaaggagggtgctttgaaactagcagccacaggcagagaggaccagggaattgaaacagatgatgagaaggactcacttaagaagcagctgagagagatggaactggaactggcacaaaccaaactgcagttggtggaggccaagtgtaaaattcaggaacttgaacatcagagaggagcccttatgaatgaaatccaagctgcgaaaaactcttggtttagcaaaaccctgaactctatcaaaacggccacgggcacccagccattgcagccagcaccggtcacccagccacccaaggagagcacatagttccagccttacccaagcacaagagcacaatgttcaaaccaatggaaatctgggaggattcttcctggtgtccctttgaaggaaagtcaaggaggccagaaaacaagccagaatttttcagtagctctcactctttcttgtatgacacttttcaaagggatgctatttaaactgacctgttctatgttgaatacctattttccagcttctggaaggccatgttcagatccatcatagtattacacattattttgtttgcctgatgtttagttggaaataagtaattcagaactaaatgcttttttatttagaattattcataattatttttatcttacataaaaatggagacatctgttattccaaggttgaagtgataagaagatctttgtcacaggaaaaaaaaaattgaaacctaaacatcttaagttttcaggatttattcagataaagcacactgtggggccaggcatgaccactctcaggtttcctcctgagcctgattcccagggaagtgttaatcctgtccaaaggaaagaaccaatcagcgatcattggtttactttcattttctgttcggtacatctggaaatgaagtgccaggaatagacgggctgttcagattatacgctaggtaaaaggaactgaaattttaataagtgtaggtcaggatcatttgggctgtggtattctaacagatccttttaagaatgccacataggacttgtgagttcctaagtacaccaaagtatggacacagatgtgacttctggcaattataaagttaaaggtggatattgcaccttacagacttagggagcctttaccagagacgcctaaaaagccccaggttcagccattgtgctgaatagagtggaatatagaaccagggacagagtatttcatttaacgttgatatatacttgctaaggaaacactaacaatactgtaactttgttaaaggacatagtattgaaatgggaaatagaggtcaggctcacatcatcttagtttaatgctgggcaactttttctgatttctgtagttccctgaaaatgtgtccttcgtacccataaagagatacaaatgcatttgtaacatttttgattgaatataaaacctttacagaaatacttatctcatggaaaggtaaagctattgtttaaaaattagtggaaatattttttcaattatatttaacatgcctataaaaatagtccttgcaggaaattatttgataagagcaaaactatttttattttataaactattttggaggcctctgatcctttcaaaccaaccaaactactattagatatgtacaataacatttgttgatattaatcattggcctcattgttgaacatattatttgcaaagaatcttaaactctgtagtgccagaatgattctcatctgtgccatattttgcaattaaaagtaacacacccttagaagaatcaaataagagccatctacatcccaggaggatgcaccaagttgctcacagtggatcttttcctctaaaatgatcttttatgttctaaaaagtgaaatcccctttatctgtgtttatattctctacagcccataaaactgatgtgattgttatgttatactcatcagataatacttttcttacataaatctttcattgttgttctgacatctttcattacaaaatttattttcttaacaaaaaggaacataacccagcattccaagtgtctgtgttggctttaacattctctacatggtggtctagataagctaatttttttttttttttttttgtaaaatgtaatagctagaaaatgttatcttggcgcttgtttttgtaaatcatttagtataggctgttagctttactggtactttacgctttgattccaagaagccttgtgcagttgccttatcaaatggccagctaaattaaagatgctcttttgtgttgtgaatttcatagttctgtacagagcttgtttcaatttacaaaaataagtacattccacagaatgcctaaagtgtgtaattttctttaaataatagtaggtgagggagaaacataatggctctaggtcaatcccttatctaaagaccttgttcaacttcatagtccctttccttttaaagaggagaagagaaaaatcccccctggccaggcatggtggctcacatctgtaatcccagcactttgggaggctgaggtgggtggatcacctaaggtcaggagtttgagaccagcctggccaacatggtgaaaccctatctctactgcaaaatacaaaaattagccgggcttggtggcgggtgcctgtaatcccagctactcgggaggttgaggcaggagaatcacttgaacccaggaggcagaggttgcagtgggccaagattacggcattacattccatccagcctgggcgacaagagcaaaattccgtctcgaaaaatcaccaggtacatacctctcaagtttgataagtccatcttttgagttttcttttagctctttcaaaagattacgagggcaatacatattttttttttttttattctccagccccatatcatacttgggtatgcctgttggtaccataagcctaaactctccttcactgcaatgcctttgagtcagtagcaatagtaaagactagaaacaaagaaaattcagaatttggtatgtgatatgattgttcatacaatatgttataatagcaatattccaaacaatatgtccttcactgtctattgttggaaaactcatgcatcccagcatgaagtaactcctagttttaattttagttattttgagatatatttgagaattgcatctcttctcttgaatttcacttagaagagattaaccagccaaatatccaggaaagtttcaaaacattctagtgtttttcatcctttgctaggatgcactctgtacaaaacattcctctgaaaatctaatatttgcagtatctaagaattgatcatttctattttcattaaattctgtggaaaaaattaaatgaatgaaattcaacttcataattcagttcatcagcttttgtatcttgagaatctaaacacgtctttaaatctgaaagaaaccaagctggattttgcagtgcatatgtttgctagcttcccacatcctgaaccatgtcaaaatttggttttatttagttacatataatttaatgcaaagaaattctgttacttaatgttctgtttatttatgagtgcctatcaggaacactaataggaatgccattcaaccagtgtcttctgcccctctcccagctgttaaattagtacttcttcattggctttctgaaatgtcctgagtaaagtagaaaagcaacctttgtatggatgtggggatatttaatagtatgtatcttgtttcatttttttcctatgatgtattaatatttatttttctccaacccctgctccattttcttaaaatattttccagttaataactagttgctttatttcctagctgaagtgagaaaaccaacggaaaacaatacagatttgggcagaggagatagagttacatctttaaaggagtgagccagtcacccaggagaatcacatgtgtaactgatgtaggggtttaagtcttcatactttcactaaaatctgtctactaactctcccaccaacctttgcatcaaacacttaggtacctgcctgattaggggggcccctttaagggaaaaaacttttaaaaaattaaatgccttggttttgttttatcttctgggaaagaacacttttacttgattagcaagatgattatattatataacttgcccttaaaaacactccaaaatactgactccttttctccaattacaaatgagtgtgaagaaattctgttgtatgatttgaacactattaggtttgtatgtgtgtttaattggaagaattttatatagagtatctctgctgcttttgtttacctgggtaccacacaaccaaatacacattgagatttcaagaaatgatgatgaaagccagaaggccagaccacagctctgcagcctgtttcctacaaccagatataaaactctttctcgtcgccatgctgatagtcacactgaactagaactgtcccaacacattcttcctctctcataatggcttccatttaatacaggcaaagccctttaccttagcaaattctttatctttcaaaagtgaccaaaatgaggacttcaaccttggctgcacctcaataggagatgctgatcttgagttgtaatgagaaaagtgggcatataggagattttagtgactgcagtcagctgtctggcattcctttctcagtttgcatctaaaagactacatatgtcaagcttatctccacctgaatttgctgcctgctataaaaacatttcattaatatatcccattcttcctacctccatctctggtttgtcattagtggtattctgaaaagcttaagaaaaaagaatcattgagtagaaagtgaacattttaagttattttcctttttcattggcaattagttaacatgtaaaatcttttccattaaactgtataacttttaataactatatattatatatgggataaaatatatggactgaattgtgagaatataaatgcatcgaaagactctggtgtcatgaaagcacaagaataaggctggagatggtcccagatccaagatgtcccaaaagccttttgtatcagtttctctatttttggtattttgcataatgcatggatccttagttcaaatgagggacaaagtttctcagtcagccccacttcctttctttctaactcctacctttcccttgcagaggaggtagtagagattctggaattgtctatttttatgaattccattattttgtccatggcatctctaatgaaaacaggttctagaataaaggagttgattagtctgaacagtactaattaactacaaaataaacgttagtgatcagcctcttcctctataaacaatgaccaattagacgtttccgtaattccatgtattatgtatagtacactctataaatgtaaatgtaatgcttgtctaaaaagtgcaatttattgtacattgtcccaacaaatgtttacttttataatcgttatgaacttgaattggattagtatcttgtttttatgtgtgaatgaagccttgtgaaataaacaaatgcaactgagaaggtaacaaggtgactgtttttgtgagccagtgatgttttcaatgctttgtgttgcccctttggccccattaagcagtaataaacatttgttctg

SEQ ID NO: 172951 - DNA, 1847 bp, Homo sapiens
  Payload ID: 13988
  Gene Symbol: RABGAP1L
  Gene Name: RAB GTPase activating protein 1-like
  ENST ID: ENST00000457696
  CDS Start-End: 102-1847
ggtggagggtggaacgcgggcgcctgaaggagttgttgtctcggcagcgcccgcggagacgtgaagaggtggttgtgggaagagaagtttgcagaactgaaatggaggtcagagcttcattacagaaggttagtggatcatctgattctgtggctacaatgaacagtgaagaatttgttttggttcctcagtatgcagatgataattctacaaaacatgaagaaaaacctcaactgaagatagtttctaatggtgatgaacaattggaaaaagccatggaagagattttgagagattccgagaaaaggccaagcagtcttcttgttgattgtcaaagttccagtgagatttcagaccattcgtttggagatattccagccagccaaacaaataagccatctcttcagttaattttggatccgtctaacacagaaatttctacacccagaccatcttctccaggtggactacctgaagaagatagtgttttatttaataaactgacctacttaggatgtatgaaggtttcttccccacgtaatgaagtagaggctttacgggcaatggcaaccatgaaatcttccagtcaatacccctttcctgttaccctgtatgtaccaaatgttccagaaggttctgtgagaattatagaccaatccagcaatgtggagatagcatcttttccaatctataaggtgttattctgtgcacgtggacatgacggaacaacagagagcaattgctttgcatttacagagagttcccatggttcggaagaatttcagatacatgttttctcctgtgaaattaaagaggcagtaagcagaattttgtacagtttctgtacagcattcaaacgttcttccagacaagtgtctgatgttaaagactcagttattcctacccccgacagtgatgtgtttaccttcagtgtctccttggaggtaaaagaagacgatggaaaaggaaactttagattattggtaattcctattccttttgaatatttcagccctgtgcctaaggatagagataaattttatttcaaattaaagcaaggaatagagaagaaggttgtgattacagtgcagcaactttctaacaaagaattagctattgaaagatgttttggaatgttattaagcccaggtcgaaacgtgaagaacagtgacatgcatttactggatatggaatccatgggaaagagctatgatgggagagcttatgtcatcactggcatgtggaaccccaatgcaccagtatttctggcacttaacgaggaaaccccaaaagataagcaagtatacatgactgtggcagtggatatggtagtcacagaggtggtggagcctgttcgctttctcctggagacagtagtccgtgtgtaccctgcaaatgagcgattttggtatttcagcagaaagactttcacagagactttcttcatgagattgaaacagtctgagggaaaaggccataccaatgctggagatgcaatatatgaggtggtgagtctacagcgagagtctgacaaggaggaaccagtcactcctactagtggagggggtccaatgtcaccccaggatgatgaagcagaagaggagagtgataatgaactctcaagtggaacaggtgatgtgtctaaggattgtcctgagaagatcctgtattcttggggagagttgctaggaaaatggcacagtaaccttggtgcacgaccgaaagggctgtctactctggtgaagagtggtgtccctgaagcattgagggcagaggtatggcagttattggcaggctgccatgacaaccaggcaatgctggatagataccgaattcttatcacaaag

SEQ ID NO: 172952 - DNA, 6821 bp, Homo sapiens
  Payload ID: 13988
  Gene Symbol: RABGAP1L
  Gene Name: RAB GTPase activating protein 1-like
  Uniprot ID: Q5R372
  ENST ID: ENST00000489615
  CDS Start-End: 402-1514
acacacacacacacacacacacacacacacacacacacacacacacactctcacacattctcacatgctagacccttctaagcagcttgtccgtttttacacatgtatctgaactctcctgcatcactcttggccattttctcgcattcgattgcttttgccgttttttatttagatcagtacttgatttcattttcattttccagtctactttggggttctcgcagtggataatttagccaaaatgtttttcttgtggagacattagctgacaattcccaccacagactggcttgtacgtcctcccagggagacctaaacctggctcccctcccaccgcagttcttaatattgtggataagagatccatctttctcattctggatacctacttagtgctcatggaagaaggggtgccctgcccagccccagctgctaagctcacacctcctgtcaaaaagtcccaggacatgcacgacgagaggagcaagctggtgaatgagtatgcgtgtcgagtgctggaacttctggggatggggcatcgtctgtttgtgcctcggcttctggcgacctcaaaggaagaccttctgcaggctgattttgaaggtgctttaaagttctttagagttcagcttccaaagagatacagggcagaggaaaatgcaagaagactgatggagcaggcttgcaatattaaagtaccaaccaagaagctgaagaaatatgagaaagaatatcagacaatgcgagagagtcagctgcaacaggaagacccaatggatagatacaagagggagaaccgaagattacaggaggccagcatgaggttggaacaagagaatgatgaccttgcccatgaactagtaacaagcaaaattgctctacggaatgacttggatcaggcagaagacaaggcagatgtgttgaataaagagctccttttgaccaaacagaggctggtggagactgaagaggagaagaggaagcaagaggaagagactgcccagctaaaagaagtcttcaggaaacagctagagaaggcagaatatgaaataaagaagactacagctatcattgctgagtataaacagatctgttcgcagttgagtaccaggctggagaaacagcaagcagccagcaaggaggagctggaagtggtaaagggtaagatgatggcatgcaaacactgcagtgacattttcagcaaggagggtgctttgaaactagcagccacaggcagagaggaccagggaattgaaacagatgatgagaaggactcacttaagaagcagctgagagagatggaactggaactggcacaaaccaaactgcagttggtggaggccaagtgtaaaattcaggaacttgaacatcagagaggagcccttatgaatgaaatccaagctgcgaaaaactcttggtttagcaaaaccctgaactctatcaaaacggccacgggcacccagccattgcagccagcaccggtcacccagccacccaaggagagcacatagttccagccttacccaagcacaagagcacaatgttcaaaccaatggaaatctgggaggattcttcctggtgtccctttgaaggaaagtcaaggaggccagaaaacaagccagaatttttcagtagctctcactctttcttgtatgacacttttcaaagggatgctatttaaactgacctgttctatgttgaatacctattttccagcttctggaaggccatgttcagatccatcatagtattacacattattttgtttgcctgatgtttagttggaaataagtaattcagaactaaatgcttttttatttagaattattcataattatttttatcttacataaaaatggagacatctgttattccaaggttgaagtgataagaagatctttgtcacaggaaaaaaaaaattgaaacctaaacatcttaagttttcaggatttattcagataaagcacactgtggggccaggcatgaccactctcaggtttcctcctgagcctgattcccagggaagtgttaatcctgtccaaaggaaagaaccaatcagcgatcattggtttactttcattttctgttcggtacatctggaaatgaagtgccaggaatagacgggctgttcagattatacgctaggtaaaaggaactgaaattttaataagtgtaggtcaggatcatttgggctgtggtattctaacagatccttttaagaatgccacataggacttgtgagttcctaagtacaccaaagtatggacacagatgtgacttctggcaattataaagttaaaggtggatattgcaccttacagacttagggagcctttaccagagacgcctaaaaagccccaggttcagccattgtgctgaatagagtggaatatagaaccagggacagagtatttcatttaacgttgatatatacttgctaaggaaacactaacaatactgtaactttgttaaaggacatagtattgaaatgggaaatagaggtcaggctcacatcatcttagtttaatgctgggcaactttttctgatttctgtagttccctgaaaatgtgtccttcgtacccataaagagatacaaatgcatttgtaacatttttgattgaatataaaacctttacagaaatacttatctcatggaaaggtaaagctattgtttaaaaattagtggaaatattttttcaattatatttaacatgcctataaaaatagtccttgcaggaaattatttgataagagcaaaactatttttattttataaactattttggaggcctctgatcctttcaaaccaaccaaactactattagatatgtacaataacatttgttgatattaatcattggcctcattgttgaacatattatttgcaaagaatcttaaactctgtagtgccagaatgattctcatctgtgccatattttgcaattaaaagtaacacacccttagaagaatcaaataagagccatctacatcccaggaggatgcaccaagttgctcacagtggatcttttcctctaaaatgatcttttatgttctaaaaagtgaaatcccctttatctgtgtttatattctctacagcccataaaactgatgtgattgttatgttatactcatcagataatacttttcttacataaatctttcattgttgttctgacatctttcattacaaaatttattttcttaacaaaaaggaacataacccagcattccaagtgtctgtgttggctttaacattctctacatggtggtctagataagctaatttttttttttttttttttgtaaaatgtaatagctagaaaatgttatcttggcgcttgtttttgtaaatcatttagtataggctgttagctttactggtactttacgctttgattccaagaagccttgtgcagttgccttatcaaatggccagctaaattaaagatgctcttttgtgttgtgaatttcatagttctgtacagagcttgtttcaatttacaaaaataagtacattccacagaatgcctaaagtgtgtaattttctttaaataatagtaggtgagggagaaacataatggctctaggtcaatcccttatctaaagaccttgttcaacttcatagtccctttccttttaaagaggagaagagaaaaatcccccctggccaggcatggtggctcacatctgtaatcccagcactttgggaggctgaggtgggtggatcacctaaggtcaggagtttgagaccagcctggccaacatggtgaaaccctatctctactgcaaaatacaaaaattagccgggcttggtggcgggtgcctgtaatcccagctactcgggaggttgaggcaggagaatcacttgaacccaggaggcagaggttgcagtgggccaagattacggcattacattccatccagcctgggcgacaagagcaaaattccgtctcgaaaaatcaccaggtacatacctctcaagtttgataagtccatcttttgagttttcttttagctctttcaaaagattacgagggcaatacatattttttttttttttattctccagccccatatcatacttgggtatgcctgttggtaccataagcctaaactctccttcactgcaatgcctttgagtcagtagcaatagtaaagactagaaacaaagaaaattcagaatttggtatgtgatatgattgttcatacaatatgttataatagcaatattccaaacaatatgtccttcactgtctattgttggaaaactcatgcatcccagcatgaagtaactcctagttttaattttagttattttgagatatatttgagaattgcatctcttctcttgaatttcacttagaagagattaaccagccaaatatccaggaaagtttcaaaacattctagtgtttttcatcctttgctaggatgcactctgtacaaaacattcctctgaaaatctaatatttgcagtatctaagaattgatcatttctattttcattaaattctgtggaaaaaattaaatgaatgaaattcaacttcataattcagttcatcagcttttgtatcttgagaatctaaacacgtctttaaatctgaaagaaaccaagctggattttgcagtgcatatgtttgctagcttcccacatcctgaaccatgtcaaaatttggttttatttagttacatataatttaatgcaaagaaattctgttacttaatgttctgtttatttatgagtgcctatcaggaacactaataggaatgccattcaaccagtgtcttctgcccctctcccagctgttaaattagtacttcttcattggctttctgaaatgtcctgagtaaagtagaaaagcaacctttgtatggatgtggggatatttaatagtatgtatcttgtttcatttttttcctatgatgtattaatatttatttttctccaacccctgctccattttcttaaaatattttccagttaataactagttgctttatttcctagctgaagtgagaaaaccaacggaaaacaatacagatttgggcagaggagatagagttacatctttaaaggagtgagccagtcacccaggagaatcacatgtgtaactgatgtaggggtttaagtcttcatactttcactaaaatctgtctactaactctcccaccaacctttgcatcaaacacttaggtacctgcctgattaggggggcccctttaagggaaaaaacttttaaaaaattaaatgccttggttttgttttatcttctgggaaagaacacttttacttgattagcaagatgattatattatataacttgcccttaaaaacactccaaaatactgactccttttctccaattacaaatgagtgtgaagaaattctgttgtatgatttgaacactattaggtttgtatgtgtgtttaattggaagaattttatatagagtatctctgctgcttttgtttacctgggtaccacacaaccaaatacacattgagatttcaagaaatgatgatgaaagccagaaggccagaccacagctctgcagcctgtttcctacaaccagatataaaactctttctcgtcgccatgctgatagtcacactgaactagaactgtcccaacacattcttcctctctcataatggcttccatttaatacaggcaaagccctttaccttagcaaattctttatctttcaaaagtgaccaaaatgaggacttcaaccttggctgcacctcaataggagatgctgatcttgagttgtaatgagaaaagtgggcatataggagattttagtgactgcagtcagctgtctggcattcctttctcagtttgcatctaaaagactacatatgtcaagcttatctccacctgaatttgctgcctgctataaaaacatttcattaatatatcccattcttcctacctccatctctggtttgtcattagtggtattctgaaaagcttaagaaaaaagaatcattgagtagaaagtgaacattttaagttattttcctttttcattggcaattagttaacatgtaaaatcttttccattaaactgtataacttttaataactatatattatatatgggataaaatatatggactgaattgtgagaatataaatgcatcgaaagactctggtgtcatgaaagcacaagaataaggctggagatggtcccagatccaagatgtcccaaaagccttttgtatcagtttctctatttttggtattttgcataatgcatggatccttagttcaaatgagggacaaagtttctcagtcagccccacttcctttctttctaactcctacctttcccttgcagaggaggtagtagagattctggaattgtctatttttatgaattccattattttgtccatggcatctctaatgaaaacaggttctagaataaaggagttgattagtctgaacagtactaattaactacaaaataaacgttagtgatcagcctcttcctctataaacaatgaccaattagacgtttccgtaattccatgtattatgtatagtacactctataaatgtaaatgtaatgcttgtctaaaaagtgcaatttattgtacattgtcccaacaaatgtttacttttataatcgttatgaacttgaattggattagtatcttgtttttatgtgtgaatgaagccttgtgaaataaacaaatgcaactgagaaggtaacaaggtgactgtttttgtgagccagtgatgttttcaatgctttgtgttgcccctttggccccattaagcagtaataaacatttgttctgaagtcca

SEQ ID NO: 172953 - DNA, 772 bp, Homo sapiens
  Payload ID: 13988
  Gene Symbol: RABGAP1L
  Gene Name: RAB GTPase activating protein 1-like
  Uniprot ID: Q5R372
  ENST ID: ENST00000486220
  CDS Start-End: 272-490
ggaagctctgagtcactgaatagcaaagaaaaatatgaaagcaagaggaattgctttcacatctagaaaatgttgcaagataatctgaaatcttctggtgctggtgaatgcatgaagaggttcacagtatcttttaaagtacttctgaaaagataaggagtttaaaaggtgggtgtgtacactggcactgagctgcagtaggatttttccttggatagtctggtctggagctgggacagcagctgctgctgtggaaaggccagctggcaagatgatggaagaaatctccattatggtagcctatgacgcccatgttttcagccagctgcacgatgaagacttcctcactagtctggtggccatcagcaagcccaggtctatggtaccaaccaagaagctgaagaaatatgagaaagaatatcagacaatgcgagagagtcagctgcaacaggaagacccaatggatagatacaagtttgtatatttgtaggtaactccagctgttgcatttatactgggaatcttcataagaagctgagagaaagagaggggaaaaagaaagtggctttctactttcaaaaatgaaacaaaaaggaaaaatggcaaagtactgttttagctgtgcatgtcatatccacaaagacttttagcaggtgaactgttccaagactgacacaaggatgtttcaaacttgcctctgtctgtagaaaatgttaaaaataccaactcacttggaaggaaaaataaaaatcacaaaggtatattgagcaca

SEQ ID NO: 172954 - DNA, 2103 bp, Homo sapiens
  Payload ID: 13988
  Gene Symbol: RABGAP1L
  Gene Name: RAB GTPase activating protein 1-like
  ENST ID: ENST00000469553
  CDS Start-End: 190-483
tatgtagaagaatctggtaaatatggatattaacagcaataagctcctttttaacgatttaattctaccaagtaaatatttgggattactcgctttttgccttttatttaccaaaaaattcatatattttcaaaggaacagctaccggacctgcatagccatttttctgatctgaacctggaagctcatatgtatgcatcccagtggtttctcactctttttactgccaagttcccactctgcatggtgttccacatcattgacttactgctttgtgagggtttgaacataatctttcatgtagctttggctctcctaaagacctcaaaggaagaccttctgcaggctgattttgaaggtgctttaaagttctttagagttcagcttccaaagagatacagggcagaggaaaatgcaagaagactgatggagcaggcttgcaatattaaagtgggtgtgtacactggcactgagctgcagtaggatttttccttggatagtctggtctggagctgggacagcagctgctgctgtggaaaggccagctggcaagatgatggaagaaatctccattatggtagcctatgacgcccatgttttcagccagctgcacgatgaagacttcctcactagtctggtggccatcagcaagcccaggtctatggtaccaaccaagaagctgaagaaatatgagaaagaatatcagacaatgcgagagagtcagctgcaacaggaagacccaatggatagatacaagtttgtatatttgtaggtaactccagctgttgcatttatactgggaatcttcataagaagctgagagaaagagaggggaaaaagaaagtggctttctactttcaaaaatgaaacaaaaaggaaaaatggcaaagtactgttttagctgtgcatgtcatatccacaaagacttttagcaggtgaactgttccaagactgacacaaggatgtttcaaacttgcctctgtctgtagaaaatgttaaaaataccaactcacttggaaggaaaaataaaaatcacaaagagggagaaccgaagattacaggaggccagcatgaggttggaacaagagaatgatgaccttgcccatgaactagtaacaagcaaaattgctctacggaatgacttggatcaggcagaagacaaggcagatgtgttgaataaagagctccttttgaccaaacagaggctggtggagactgaagaggagaagaggaagcaagaggaagagactgcccagctaaaagaagtcttcaggaaacagctagagaaggcagaatatgaaataaagaagactacagctatcattgctgagtataaacagatctgttcgcagttgagtaccaggctggagaaacagcaagcagccagcaaggaggagctggaagtggtaaagggtaagatgatggcatgcaaacactgcagtgacattttcagcaaggagggtgctttgaaactagcagccacaggcagagaggaccagggaattgaaacagatgatgagaaggactcacttaagaagcagctgagagagatggaactggaactggcacaaaccaaactgcagttggtggaggccaagtgtaaaattcaggaacttgaacatcagagaggagcccttatgaatgaaatccaagctgcgaaaaactcttggtttagcaaaaccctgaactctatcaaaacggccacgggcacccagccattgcagccagcaccggtcacccagccacccaaggagagcacatagttccagccttacccaagcacaagagcacaatgttcaaaccaatggaaatctgggaggattcttcctggtgtccctttgaaggaaagtcaaggaggccagaaaacaagccagaatttttcagtagctctcactctttcttgtatgacacttttcaaagggatgctatttaaactgacctgttctatgttgaatacctattttccagcttctggaaggccatgttcagatccatcatagtattacacattattttgtttgcctgatgtttagttggaaataagtaattcagaactaaatgcttttttatttagaattattcataattatttttatcttacat

SEQ ID NO: 172955 - DNA, 648 bp, Homo sapiens
  Payload ID: 13988
  Gene Symbol: RABGAP1L
  Gene Name: RAB GTPase activating protein 1-like
  Uniprot ID: Q5R372
  ENST ID: ENST00000478442
  CDS Start-End: 153-371
accgggagtgtggctggtttctgttgcctgttttgatactcttctcctggtgggtgtgtacactggcactgagctgcagtaggatttttccttggatagtctggtctggagctgggacagcagctgctgctgtggaaaggccagctggcaagatgatggaagaaatctccattatggtagcctatgacgcccatgttttcagccagctgcacgatgaagacttcctcactagtctggtggccatcagcaagcccaggtctatggtaccaaccaagaagctgaagaaatatgagaaagaatatcagacaatgcgagagagtcagctgcaacaggaagacccaatggatagatacaagtttgtatatttgtaggtaactccagctgttgcatttatactgggaatcttcataagaagctgagagaaagagaggggaaaaagaaagtggctttctactttcaaaaatgaaacaaaaaggaaaaatggcaaagtactgttttagctgtgcatgtcatatccacaaagacttttagcaggtgaactgttccaagactgacacaaggatgtttcaaacttgcctctgtctgtagaaaatgttaaaaataccaactcacttggaaggaaaaataaaaatcacaaaggtatattga

SEQ ID NO: 172956 - DNA, 710 bp, Homo sapiens
  Payload ID: 13988
  Gene Symbol: RABGAP1L
  Gene Name: RAB GTPase activating protein 1-like
  ENST ID: ENST00000465412
  CDS Start-End: 140-710
ctggtttctgttgcctgttttgatactcttctcctggtgggtgtgtacactggcactgagctgcagtaggatttttccttggatagtctggtctggagctgggacagcagctgctgctgtggaaaggccagctggcaagatgatggaagaaatctccattatggtagcctatgacgcccatgttttcagccagctgcacgatgaagacttcctcactagtctggtggccatcagcaagcccaggtctatggtaccaaccaagaagctgaagaaatatgagaaagaatatcagacaatgcgagagagtcagctgcaacaggaagacccaatggatagatacaagagggagaaccgaagattacaggaggccagcatgaggttggaacaagagaatgatgaccttgcccatgaactagtaacaagcaaaattgctctacggaatgacttggatcaggcagaagacaaggcagatgtgttgaataaagagctccttttgaccaaacagaggctggtggagactgaagaggagaagaggaagcaagaggaagagactgcccagctaaaagaagtcttcaggaaacagctagagaaggcagaatatgaaataaagaagactacagctatcattgctgagtataaacagatctgttcgcagttgagtaccaggctggagaaacagcaagcagccagcaaggaggagctggaagtgg

SEQ ID NO: 172957 - DNA, 722 bp, Homo sapiens
  Payload ID: 13988
  Gene Symbol: RABGAP1L
  Gene Name: RAB GTPase activating protein 1-like
  ENST ID: ENST00000529145
  CDS Start-End: 389-722
tattggggaagggtaaaatggttgaggaaggaggttcgtggaatgtgagagcagaagatgctagtaggagctcattgatatgaactgccaggggatccgtaggtgtctaaagagggaagtgaagccagtaggagactgagagattagaagaacagggcagtagaggatgaatttgcagtgaggttaaaggaacaatttattgggagaagggaatgtaggagggtagaagactttaaaattgaaaagaaataaaaggaggcagggatgtaaaacgagccataagtacaatgacaaatgggcattaaggaggaaaaagactatgtagaagaatctggaacagctaccggacctgcatagccatttttctgatctgaacctggaagctcatatgtatgcatcccagtggtttctcactctttttactgccaagttcccactctgcatggtgttccacatcattgacttactgctttgtgagggtttgaacataatctttcatgtagctttggctctcctaaagacctcaaaggaagaccttctgcaggctgattttgaaggtgctttaaagttctttagagttcagcttccaaagagatacagggcagaggaaaatgcaagaagactgatggagcaggcttgcaatattaaagtaccaaccaagaagctgaagaaatatgagaaagaatatcagacaatgcgagagagtcagctgcaacaggaag

SEQ ID NO: 172958 - DNA, 2103 bp, Homo sapiens; identical to SEQ ID NO: 172954
  Payload ID: 13988
  Gene Symbol: RABGAP1L
  Gene Name: RAB GTPase activating protein 1-like
  ENST ID: ENST00000367686
  CDS Start-End: 190-483

SEQ ID NO: 172959 - DNA, 537 bp, Homo sapiens
  Payload ID: 13988
  Gene Symbol: RABGAP1L
  Gene Name: RAB GTPase activating protein 1-like
  ENST ID: ENST00000485114
  CDS Start-End: 1-264
agtagttggtctatgacttttgaggagagggagaaccgaagattacaggaggccagcatgaggttggaacaagagaatgatgaccttgcccatgaactagtaacaagcaaaattgctctacggaatgacttggatcaggcagaagacaaggcagatgtgttgaataaagagctccttttgaccaaacagaggctggtggagactgaagaggagaagaggaagcaagaggaagagactgcccaggagaatcacatgtgtaactgatgtaggggtttaagtcttcatactttcactaaaatctgtctactaactctcccaccaacctttgcatcaaacacttaggtacctgcctgattaggggggcccctttaagggaaaaaacttttaaaaaattaaatgccttggttttgttttatcttctgggaaagaacacttttacttgattagcaagatgattatattatataacttgcccttaaaaacactccaaaatactgactccttttctccaattacaaatgagtgtgaagaaattct

SEQ ID NO: 172960 - DNA, 1006 bp, Homo sapiens
  Payload ID: 13988
  Gene Symbol: RABGAP1L
  Gene Name: RAB GTPase activating protein 1-like
  ENST ID: ENST00000474375
  CDS Start-End: 1-501
tcagcccaggagagtgttattactcgagatattcatcgtacatttcccgcacatgattactttaaagatactggaggagatggtcaagaatcgctctataagatctgcaaggcctactctgtgtatgatgaagacattgggtactgtcaagggcagtcttttcttgctgctgtattactgctgcatatgccagaggaacaagcattctgtgttttggtgaaaatcatgtacgactatggtttgagagacctctacagaaacaacttcgaagatcttcattgcaaattctaccagttggagagactaatgcaggaacagctaccggacctgcatagccatttttctgatctgaacctggaagctcatatgtatgcatcccagtggtttctcactctttttactgccaagttcccactctgcatggtgttccacatcattgacttactgctttgtgagagtggtatctctgcccttcagttcactgggatggtgactttctaaagtgtctgcccgaatgttggcacccgtggcatcggaacattgtccatgggttttctggaacctagattcaaattttatcttgaagatacatgaatttctaatgtcagttaagaaaactagcaacatttgtgctacagaaaagataaataaatttattagccttcccgtcacttgtcaactgtgacttacaatcagtgtttgaaaggtcataatgttcattaatattaataagaacatcatagatattacctttcctccccttaaacctgtactctatagctgtttaaggaagttggaaaacttttcaaaacatagattgtaatcatagcatcatgatgttcggggaagtaaatggtaacatcctttaccattaaaattgcttttcagaataatctattggaaacaatattgtagtgtgcctcaggatatttattctttccactaactcatctttgtcaagaattattttacaaaggaaatttttgaataaacttttacttcctgc

SEQ ID NO: 172961 - DNA, 3074 bp, Homo sapiens
  Payload ID: 13988
  Gene Symbol: RABGAP1L
  Gene Name: RAB GTPase activating protein 1-like
  ENST ID: ENST00000635248
  CDS Start-End: 111-848
agagcgcgaggtggagggtggaacgcgggcgcctgaaggagttgttgtctcggcagcgcccgcggagacgtgaagaggtggttgtgggaagagaagtttgcagaactgaaatggaggtcagagcttcattacagaaggttagtggatcatctgattctgtggctacaatgaacagtgaagaatttgttttggttcctcagtatgcagatgataattctacaaaacatgaagaaaaacctcaactgaagatagtttctaatggtgatgaacaattggaaaaagccatggaagagattttgagagattccgagaaaaggccaagcagtcttcttgttgattgtcaaagttccagtgagatttcagaccattcgtttggagatattccagccagccaaacaaataagccatctcttcagttaattttggatccgtctaacacagaaatttctacacccagaccatcttctccaggtggactacctgaagaagatagtgttttatttaataaactgacctacttaggatgtatgaaggtttcttccccacgtaatgaagtagaggctttacgggcaatggcaaccatgaaatcttccagtcaatacccctttcctgttaccctgtatgtaccaaatgttccagaaggttctgtgagaattatagaccaatccagcaatgtggagatagcatcttttccaatctataaggtgttattctgtgcacgtggacatgacggaacaacagagagcaattgctttgcatttacagagagttcccatggttcggaagaatttcagatacatgttttctcctgtgaaattaaagaggcaaggtggggaagcagatggtagaatcctggcatttcatgttggcagccatcatttaacccacctgtgtgatttccgaatcactggagctcaacagcaaggaaatgagctttgaagacctggaaaatctgctgcttggagagagagaaatgctgctgcagaaggatactgaattgctgcaagaagtttccataactaatgagttcgtggatgagagctgaagaggtttgtcgttaaaggaagatttctgaagcaggagtagcagcatggctgccactactgtcactgtgatgcttatttcactataaaatccctcaaactgcaggcatcaacaatggtagaagggaatcccagtgagggtgatggccctcttgaacacctgtgacacaaggattgggaggtcccacagaagggttaggacacatttgacttgcaacacttggatgtgcttctgcaggactgtgctttagtagatttcaataatctatggcaaaagagttggacaatccaaccagaagtatcttgaggtcaatgatctttgtataaggagaatgatatgctaggcttctgctgaagaattgcagaccaagcaaggtatcagaaagtgtagtgaaaaaaatacaaggaggcacctgttcttgtcacatctttttggatatattatataaaactttcaaaagatacttttaaagtgttaattgagtctttctaagattttatttctactagccagtgtaaccattctatgcaaagcagattttgatgatatttgtgtgttttaggatactattcagtattagaaactctgttacattatggaagcatgttttttgtcatctggtgttaaaggcattcagagatacttcttgataaatatcaagggcatcattgggaagatacttattcttattgcattgttttttcttggggttgcagatatgacactgtataaaagaaaacgtgttccttgcatgggaaaatttctttttctttgagatggagtttcactcttgttgtcaaggctggagtgcaatggcgtgatctcggcttactgcaacctacacctcttgggttcaagtgattctccagcctcagcttcccaagtagttgggattacaagcatgcatcaccacacctggataattttgtatttttagtagagacagggttgcaccatgttggtcaggctgctctcaaactcctgacctcaggtgatccacctgcctgggcttcccaaagtgctgggattacaggcgtgagccaccacacccagtggagaatatcatttctaaacaagtatttatttaattgttatgttagctaaatgcctcattttggaagataattcgaagttatcttgttagtgttttccttaaatcaattgatttttatgattttaaaaaagtttcctggtagtgtgcctcttattttagctccttcccatgaataatgtatttgagctagctgttttaaaaattttaatacatacctttcaaggtgcctttcatagaatgatttttcacatttatttcttgggtgaactttttatttttttttttgaggcagagtctcactgtctcccaggctggagtgcagtggcgtgatctcggctcactatgatctccacctcctgggttcaaacgattcttctgcctcagcctcctgagtagctgggattacaggcacatgccaccacgcctggctaatttttgcgtttttaatagagacggggtttcaccatgttggccaggctggtcttgaactcttgacctcaaatgatccacctgcctcagcctcccaaagtgctgggattacaggtgtgagccaccatgcctggccttgggtgaacattttcttgatatatggtgtttccaaaagagtgagttatctttcaccagtattaatgaaaagacttcatcttggagaaactagctatgttatttattttaaataaatacctttgttacttaataacagtgtttggacttttaagatgtaatacatatttgagaatttggaaaatattgaaataaaaaagaaaataaaaggtgcttaaaattccgccgcagttaagattttggtgtatctccattccagatatctacatgtgctctcctccctgcctcttcaaaaacaacagcaacaaactcaaacagatatacagttttgtgtttagtattttctatagatactgttttctggagaaagattgtattatttatcaataaaccttttccttctgcaaagaaa

SEQ ID NO: 172962 - DNA, 1815 bp, Homo sapiens
  Payload ID: 13988
  Gene Symbol: RABGAP1L
  Gene Name: RAB GTPase activating protein 1-like
  ENST ID: ENST00000367690
  CDS Start-End: 97-855
gctggcttttttagtgagagtcaagagctggcttggtaaagtcttaaagaatggagaagaggaggaaggagagaagggaagaaagagggagaatccatgggaaagagctatgatgggagagcttatgtcatcactggcatgtggaaccccaatgcaccagtatttctggcacttaacgaggaaaccccaaaagataagcaagtatacatgactgtggcagtggatatggtagtcacagaggtggtggagcctgttcgctttctcctggagacagtagtccgtgtgtaccctgcaaatgagcgattttggtatttcagcagaaagactttcacagagactttcttcatgagattgaaacagtctgagggaaaaggccataccaatgctggagatgcaatatatgaggtggtgagtctacagcgagagtctgacaaggaggaaccagtcactcctactagtggagggggtccaatgtcaccccaggatgatgaagcagaagaggagagtgataatgaactctcaagtggaacaggtgatgtgtctaaggattgtcctgagaagatcctgtattcttggggagagttgctaggaaaatggcacagtaaccttggtgcacgaccgaaagggctgtctactctggtgaagagtggtgtccctgaagcattgagggcagaggtatggcagttattggcaggctgccatgacaaccaggcaatgctggatagataccgaattcttatcacaaaggtctgttggagtttgctggaggtccactccagaccctgtttgcctgggtatcaccagtggaagctgcagaacagcaaatattgcagaatggcaaatgttgctgcctgatccttcctctggaagcttcatctcagaagggcacctggctgtatgaggtgtcggttggcccctcctgggaggtgtctcccaattagactactcaggtgtcagggacccacttgaggaggcagtctgtccattctcaggtcccaaactacatgctgggagaaccactactctcttcaaagctgtcagacagggacatttaagtctgcagaagtttctgctgccgtttgttcaactatgccctgcccccagtactggagtccaggaaggcaggcaggcctccttgagctttggtgggctccacccagttcagtcttcccggctgctttgtttacctactcaagcttcagcaatggcggatgcccctccctcagccttgctgacacttgcggcttgatctcagactgctgtgttagcagtgagtgaggctccgtgggtgtgggactctccgagccaggtgcgggatataatctcctggtgttccgtttgctaagaccattggaaaagcgcagtattagggtgggagggtcccgattttccaggtactatctgtcatggcttcccttggctaggaaagggaattccccaaccccttgcacttcccaggtgagcaatgccccacgctgctccttgggctgcacccactgtgtgacaagccccagtgagatgaacccggtacctctgttggaaatgcagaaatcacctgtcttctgcgtcgctcacgctgggagctgtagactggagctgttcctttttggccatcttggaacctcggttcaaacctgagttgtaatactcactcttcctgttgctgcctatgtaattttgtagaagttacctaattgcttccaagcttctgttggattttttgagaactgaatgacatagtacattttgaatgcttaatgtattgctttgtgcatggtattatttaataaatattagctttggttatacttgcaa

SEQ ID NO: 172963 - DNA, 3733 bp, Homo sapiens
  Payload ID: 13989
  Gene Symbol: RABGEF1
  Gene Name: RAB guanine nucleotide exchange factor (GEF) 1
  Uniprot ID: Q9UJ41
  ENST ID: ENST00000284957
  CDS Start-End: 78-1553
agacctacccgggcgaagcgggcgagcggtggtttggacgccggcggagacgcgggcgagtggttagcaggaagaagatgagccttaagtctgaacgccgaggaattcatgtggatcaatcggatctcctgtgcaagaaaggatgtggttactacggcaaccctgcctggcagggtttctgctccaagtgctggagggaagagtaccacaaagccaggcagaagcagattcaggaggactgggagctggcggagcgactccagcgggaggaagaagaggcctttgccagcagtcagagcagccaaggggcccaatccctcacattctccaagtttgaagaaaagaaaaccaacgagaagacccgcaaggttaccacagtgaagaaattcttcagtgcatcttccagggtcggatcaaagaaggaaattcaggaagcaaaagctcccagtccttccataaaccggcaaaccagcattgaaacggatagagtgtctaaggagttcatagaatttctcaagaccttccacaagacaggccaagaaatctataaacagaccaagctgtttttggaaggaatgcattacaaaagggatctaagcattgaagaacagtcagagtgtgctcaggatttctaccacaatgtggccgaaaggatgcaaactcgtgggaaagtgcctccagaaagagtcgagaagataatggatcagattgaaaagtacatcatgactcgtctctataaatatgtattctgtccagaaactactgatgatgagaagaaagatcttgccattcaaaagagaatcagagccctgcgctgggttacgcctcagatgctgtgtgtccctgttaatgaagacatcccagaagtgtctgatatggtggtgaaggcgatcacagatatcattgaaatggattccaagcgtgtgcctcgagacaagctggcctgcatcaccaagtgcagcaagcacatcttcaatgccatcaagatcaccaagaatgagccggcgtcagcggatgacttcctccccaccctcatctacattgttttgaagggcaaccccccacgccttcagtctaatatccagtatatcacgcgcttctgcaatccaagccgactgatgactggagaggatggctactatttcaccaatctgtgctgtgctgtggctttcattgagaagctagacgcccagtctttgaatctaagtcaggaggattttgatcgctacatgtctggccagacctctcccaggaagcaagaagctgagagttggtctcctgatgcttgcttaggcgtcaagcaaatgtataagaacttggatctcttgtctcagttgaatgaacgacaagaaaggatcatgaatgaagccaagaaactggaaaaagacctcatagattggacagatggaattgcaagagaagttcaagacatcgttgagaaatacccactggaaattaagcctccgaatcaaccgttagcagctattgactctgaaaacgttgaaaatgataaacttcctccaccactgcaacctcaagtttatgcaggatgatcacaatttagtggagagtatttatttgagcctaaattgtaggtagcccttactacactcaactgattgggatctagaatgtaactaaattgcttataaatgtcagcattttttaaaggtacagtatatggggattgtttcgtttttcctagcaggggaaccttagttaataataaaatactacttatttgagttactgatacagattcatttaaggcttgtgtgcaaattttgtctcaatcttttttccctccatgattttcctatgtgcttcctctggcattcactgtggttttggtaaataattgccttttaaaggattaaacaaatgaatgctacaaagtgtatgttcaagaaaattaaatggtaccactcttccacagtttggaataattttataattgtaaagatagaaattatattgataagtaaatatgtaaaattgtaaatatgtaaaaaaaagaatggtgtctgctgtgcatggcattttatatgttaattttttagtttaaaatgaagtatattgaatgtttgcctttagcaccattttatttggtttgtcccactaaaatgactcgagaagtgtttagacaaactccccttaagatgtgcactccatctttaagaacgtgttagccttaactttgaggttctatatagtcagagactatgacaccactaaggttcagaataaagtttaggccacataaaattgctgtttaatgtagtcgatggaagactttaaactatgcttctagcttatttttccctcattcattcagcaaatctctattgagttcttcagtgagaaggagcaggcactgggcctggaatggaaggcgggaatgaatgggcctctgatggtgagaggtgacggggtccctcagctgtgagatgcaaggggcgccttgcagcctccataatatacatttgactttgcaaacgtctagacatgttttctgaacctttttcaggacatttcaacctcgggactattcatattagtggcctgagaggtgtttgttgtggggccaccctgtgcatggtagaatgttcagcagcattcctgccatccatatccattaggtgccagtagcacccccgctagagctgtgaaaaattctctccagacatagtcagatgtctcctggggccatatcacccctccgttaagaaccactgatgtcttttacaaaccaggagttatcctcctggtggttaatatggtgtaaccaaagaatcttgcactcaatgcacagtgtgatgttaactaaaacgagttaaatatttaggaggcttgacagctacctgcattgtagaaccttttcttatctcagtggaaccttctataacctaaatataccattgatgattcttcttccattcagtgacatccacagattatgcagctatacttgtgaaatcgtgcatgaggccccagggcaccgttctagaacaacgtcacttcacacaggcagctgagaaaggttctcttgcttttccagtatcttcctaaggatggagcccaaaattgcagagcagtaactttggaataaaaccagggtgggtataaaacttcttattcttaaatttacatataagatctattaagcttgacacatctgtgtcatcacgcactgaagacaggaagcagttcactgagtcagctggttcccaagctcgcacagaaggtgataagttactatcaaatgccagtgagaatcttcttatagaataacctgggcccaagtgattttagtacaaaacttgcccttctttggtttaattttctatgtgcttttaggtgtgaatccagatatgcggtcttaattcctttggaaatacacagttcgtttagttactgtacactctgtttgttcaataaactgcatatcaacttcccacaaaagctgacttttttgggtctcttacatataaagtaggttattgagttgatttttttggaggtatctcatattggtcgaattcttctggtatggactcttgccttatatagaggcttctatttctcttaagtcagcatcaatacaacggccggagtttctgtttttgcaataagaagatgttggtattttatgtagggtaaatgtgactggaatacacctttggaacggaattctttatcaataaagtttcacaatccgtccctcttccaaaaa

SEQ ID NO: 172964 - DNA, 3864 bp, Homo sapiens
  Payload ID: 13989
  Gene Symbol: RABGEF1
  Gene Name: RAB guanine nucleotide exchange factor (GEF) 1
  Uniprot ID: Q9UJ41
  ENST ID: ENST00000380828
  CDS Start-End: 172-1689
tttggaattatttgtccaagctaacgtttggacaaataatgttttgttatatttaacattaaaactctgacattgacattcacattcattttggaagcattatatttaatcatatgaaagttggtgaaccttggattacagattgcaaatgctaataagtcttttattagaatgatggcgtcttcataccatgaagtggttagcaggaagaagatgagccttaagtctgaacgccgaggaattcatgtggatcaatcggatctcctgtgcaagaaaggatgtggttactacggcaaccctgcctggcagggtttctgctccaagtgctggagggaagagtaccacaaagccaggcagaagcagattcaggaggactgggagctggcggagcgactccagcgggaggaagaagaggcctttgccagcagtcagagcagccaaggggcccaatccctcacattctccaagtttgaagaaaagaaaaccaacgagaagacccgcaaggttaccacagtgaagaaattcttcagtgcatcttccagggtcggatcaaagaaggaaattcaggaagcaaaagctcccagtccttccataaaccggcaaaccagcattgaaacggatagagtgtctaaggagttcatagaatttctcaagaccttccacaagacaggccaagaaatctataaacagaccaagctgtttttggaaggaatgcattacaaaagggatctaagcattgaagaacagtcagagtgtgctcaggatttctaccacaatgtggccgaaaggatgcaaactcgtgggaaagtgcctccagaaagagtcgagaagataatggatcagattgaaaagtacatcatgactcgtctctataaatatgtattctgtccagaaactactgatgatgagaagaaagatcttgccattcaaaagagaatcagagccctgcgctgggttacgcctcagatgctgtgtgtccctgttaatgaagacatcccagaagtgtctgatatggtggtgaaggcgatcacagatatcattgaaatggattccaagcgtgtgcctcgagacaagctggcctgcatcaccaagtgcagcaagcacatcttcaatgccatcaagatcaccaagaatgagccggcgtcagcggatgacttcctccccaccctcatctacattgttttgaagggcaaccccccacgccttcagtctaatatccagtatatcacgcgcttctgcaatccaagccgactgatgactggagaggatggctactatttcaccaatctgtgctgtgctgtggctttcattgagaagctagacgcccagtctttgaatctaagtcaggaggattttgatcgctacatgtctggccagacctctcccaggaagcaagaagctgagagttggtctcctgatgcttgcttaggcgtcaagcaaatgtataagaacttggatctcttgtctcagttgaatgaacgacaagaaaggatcatgaatgaagccaagaaactggaaaaagacctcatagattggacagatggaattgcaagagaagttcaagacatcgttgagaaatacccactggaaattaagcctccgaatcaaccgttagcagctattgactctgaaaacgttgaaaatgataaacttcctccaccactgcaacctcaagtttatgcaggatgatcacaatttagtggagagtatttatttgagcctaaattgtaggtagcccttactacactcaactgattgggatctagaatgtaactaaattgcttataaatgtcagcattttttaaaggtacagtatatggggattgtttcgtttttcctagcaggggaaccttagttaataataaaatactacttatttgagttactgatacagattcatttaaggcttgtgtgcaaattttgtctcaatcttttttccctccatgattttcctatgtgcttcctctggcattcactgtggttttggtaaataattgccttttaaaggattaaacaaatgaatgctacaaagtgtatgttcaagaaaattaaatggtaccactcttccacagtttggaataattttataattgtaaagatagaaattatattgataagtaaatatgtaaaattgtaaatatgtaaaaaaaagaatggtgtctgctgtgcatggcattttatatgttaattttttagtttaaaatgaagtatattgaatgtttgcctttagcaccattttatttggtttgtcccactaaaatgactcgagaagtgtttagacaaactccccttaagatgtgcactccatctttaagaacgtgttagccttaactttgaggttctatatagtcagagactatgacaccactaaggttcagaataaagtttaggccacataaaattgctgtttaatgtagtcgatggaagactttaaactatgcttctagcttatttttccctcattcattcagcaaatctctattgagttcttcagtgagaaggagcaggcactgggcctggaatggaaggcgggaatgaatgggcctctgatggtgagaggtgacggggtccctcagctgtgagatgcaaggggcgccttgcagcctccataatatacatttgactttgcaaacgtctagacatgttttctgaacctttttcaggacatttcaacctcgggactattcatattagtggcctgagaggtgtttgttgtggggccaccctgtgcatggtagaatgttcagcagcattcctgccatccatatccattaggtgccagtagcacccccgctagagctgtgaaaaattctctccagacatagtcagatgtctcctggggccatatcacccctccgttaagaaccactgatgtcttttacaaaccaggagttatcctcctggtggttaatatggtgtaaccaaagaatcttgcactcaatgcacagtgtgatgttaactaaaacgagttaaatatttaggaggcttgacagctacctgcattgtagaaccttttcttatctcagtggaaccttctataacctaaatataccattgatgattcttcttccattcagtgacatccacagattatgcagctatacttgtgaaatcgtgcatgaggccccagggcaccgttctagaacaacgtcacttcacacaggcagctgagaaaggttctcttgcttttccagtatcttcctaaggatggagcccaaaattgcagagcagtaactttggaataaaaccagggtgggtataaaacttcttattcttaaatttacatataagatctattaagcttgacacatctgtgtcatcacgcactgaagacaggaagcagttcactgagtcagctggttcccaagctcgcacagaaggtgataagttactatcaaatgccagtgagaatcttcttatagaataacctgggcccaagtgattttagtacaaaacttgcccttctttggtttaattttctatgtgcttttaggtgtgaatccagatatgcggtcttaattcctttggaaatacacagttcgtttagttactgtacactctgtttgttcaataaactgcatatcaacttcccacaaaagctgacttttttgggtctcttacatataaagtaggttattgagttgatttttttggaggtatctcatattggtcgaattcttctggtatggactcttgccttatatagaggcttctatttctcttaagtcagcatcaatacaacggccggagtttctgtttttgcaataagaagatgttggtattttatgtagggtaaatgtgactggaatacacctttggaacggaattctttatcaataaagtttcacaatccgtccctcttcc

SEQ ID NO: 172965 - DNA, 4319 bp, Homo sapiens
  Payload ID: 13989
  Gene Symbol: RABGEF1
  Gene Name: RAB guanine nucleotide exchange factor (GEF) 1
  ENST ID: ENST00000437078
  CDS Start-End: 1245-2144
gttatgttttttttgagacaggatctcgctctgctgtcacccggcctggagttcagtggagggatctctgcaccgtcaacttcctgggctatcaagcgatcctcccacctcagcctccctggtagttgggaccacaggtgcccgccatcatgtccggctgatttgtaaaatttcttttgtagagatggtgaccttgctctgtggcccaggctggtctcgaactcctggactcaagcgatcctcctgcctgggcctcctaaagattcagctgcttttggatcaaccgatcgccttaagaccttttaactcgaacacctgtcacatcctaggatccgcgaaggactgaaacagagtttctgaagcgtccctcggcgcagtagctccgctccacctcccattcgcgctaccaccgcggccgcagccccaggagtcgccgcggagccagcgtcgccctccagctgttgcgcgtcggaagccggaagcagggactgagcgacagactaggaaacgccggtttctccggggctccccagcgccccacctttaccccggaggccgccctcttccatttgctcttgggcgtcagggcggtaccccactccgctcgaccctttggatccactcgcacttcctcccgtccagagtcaaaggccccggaagtgacgtttacgcgccgcgcgtaacgtgcgttcgctggcggtgccgggggcggggcgagcaggagggtgggtgtgaggcgggagctggccgcggagcccagacctacccgggcgaagcgggcgagcggtggtttggacgccggcggagacgcgggcgagtggttagcaggaagaagatgagccttaagtctgaacgccgaggaattcatgtggatcaatcggatctcctgtgcaagaaaggatgtggttactacggcaaccctgcctggcagggtttctgctccaagtgctggagggaagagtaccacaaagccaggcagaagcagattcaggaggactgggagctggcggagcgactccagcgggaggaagaagaggcctttgccagcagtcagagcagccaaggggcccaatccctcacattctccaagtttgaagaaaagaaaaccaacgagaagacccgcaaggttaccacagtgaagaaattcttcagtgcatcttccagggtcggatcaaagaagggatctaagcattgaagaacagtcagagtgtgctcaggatttctaccacaatgtggccgaaaggatgcaaactcgtgggaaagtgcctccagaaagagtcgagaagataatggatcagattgaaaagtacatcatgactcgtctctataaatatgtattctgtccagaaactactgatgatgagaagaaagatcttgccattcaaaagagaatcagagccctgcgctgggttacgcctcagatgctgtgtgtccctgttaatgaagacatcccagaagtgtctgatatggtggtgaaggcgatcacagatatcattgaaatggattccaagcgtgtgcctcgagacaagctggcctgcatcaccaagtgcagcaagcacatcttcaatgccatcaagatcaccaagaatgagccggcgtcagcggatgacttcctccccaccctcatctacattgttttgaagggcaaccccccacgccttcagtctaatatccagtatatcacgcgcttctgcaatccaagccgactgatgactggagaggatggctactatttcaccaatctgtgctgtgctgtggctttcattgagaagctagacgcccagtctttgaatctaagtcaggaggattttgatcgctacatgtctggccagacctctcccaggaagcaagaagctgagagttggtctcctgatgcttgcttaggcgtcaagcaaatgtataagaacttggatctcttgtctcagttgaatgaacgacaagaaaggatcatgaatgaagccaagaaactggaaaaagacctcatagattggacagatggaattgcaagagaagttcaagacatcgttgagaaatacccactggaaattaagcctccgaatcaaccgttagcagctattgactctgaaaacgttgaaaatgataaacttcctccaccactgcaacctcaagtttatgcaggatgatcacaatttagtggagagtatttatttgagcctaaattgtaggtagcccttactacactcaactgattgggatctagaatgtaactaaattgcttataaatgtcagcattttttaaaggtacagtatatggggattgtttcgtttttcctagcaggggaaccttagttaataataaaatactacttatttgagttactgatacagattcatttaaggcttgtgtgcaaattttgtctcaatcttttttccctccatgattttcctatgtgcttcctctggcattcactgtggttttggtaaataattgccttttaaaggattaaacaaatgaatgctacaaagtgtatgttcaagaaaattaaatggtaccactcttccacagtttggaataattttataattgtaaagatagaaattatattgataagtaaatatgtaaaattgtaaatatgtaaaaaaaagaatggtgtctgctgtgcatggcattttatatgttaattttttagtttaaaatgaagtatattgaatgtttgcctttagcaccattttatttggtttgtcccactaaaatgactcgagaagtgtttagacaaactccccttaagatgtgcactccatctttaagaacgtgttagccttaactttgaggttctatatagtcagagactatgacaccactaaggttcagaataaagtttaggccacataaaattgctgtttaatgtagtcgatggaagactttaaactatgcttctagcttatttttccctcattcattcagcaaatctctattgagttcttcagtgagaaggagcaggcactgggcctggaatggaaggcgggaatgaatgggcctctgatggtgagaggtgacggggtccctcagctgtgagatgcaaggggcgccttgcagcctccataatatacatttgactttgcaaacgtctagacatgttttctgaacctttttcaggacatttcaacctcgggactattcatattagtggcctgagaggtgtttgttgtggggccaccctgtgcatggtagaatgttcagcagcattcctgccatccatatccattaggtgccagtagcacccccgctagagctgtgaaaaattctctccagacatagtcagatgtctcctggggccatatcacccctccgttaagaaccactgatgtcttttacaaaccaggagttatcctcctggtggttaatatggtgtaaccaaagaatcttgcactcaatgcacagtgtgatgttaactaaaacgagttaaatatttaggaggcttgacagctacctgcattgtagaaccttttcttatctcagtggaaccttctataacctaaatataccattgatgattcttcttccattcagtgacatccacagattatgcagctatacttgtgaaatcgtgcatgaggccccagggcaccgttctagaacaacgtcacttcacacaggcagctgagaaaggttctcttgcttttccagtatcttcctaaggatggagcccaaaattgcagagcagtaactttggaataaaaccagggtgggtataaaacttcttattcttaaatttacatataagatctattaagcttgacacatctgtgtcatcacgcactgaagacaggaagcagttcactgagtcagctggttcccaagctcgcacagaaggtgataagttactatcaaatgccagtgagaatcttcttatagaataacctgggcccaagtgattttagtacaaaacttgcccttctttggtttaattttctatgtgcttttaggtgtgaatccagatatgcggtcttaattcctttggaaatacacagttcgtttagttactgtacactctgtttgttcaataaactgcatatcaacttcccacaaaagctgacttttttgggtctcttacatataaagtaggttattgagttgatttttttggaggtatctcatattggtcgaattcttctggtatggactcttgccttatatagaggcttctatttctcttaagtcagcatcaatacaacggccggagtttctgtttttgcaataagaagatgttggtattttatgtagggtaaatgtgactggaatacacctttggaacggaattctttatcaataaagtttcacaatccgtccctcttcc

SEQ ID NO: 172966 - DNA, 3065 bp, Homo sapiens
  Payload ID: 13989
  Gene Symbol: RABGEF1
  Gene Name: RAB guanine nucleotide exchange factor (GEF) 1
  ENST ID: ENST00000439720
  CDS Start-End: 168-1682
ttatttgtccaagctaacgtttggacaaataatgttttgttatatttaacattaaaactctgacattgacattcacattcattttggaagcattatatttaatcatatgaaagttggtgaaccttggattacagattgcaaatgctaataagtcttttattagaatgatggcgtcttcataccatgaagtggttagcaggaagaagatgagccttaagtctgaacgccgaggaattcatgtggatcaatcggatctcctgtgcaagaaaggatgtggttactacggcaaccctgcctggcagggtttctgctccaagtgctggagggaagagtaccacaaagccaggcagaagcagattcaggaggactgggagctggcggagcgactccagcgggaggaagaagaggcctttgccagcagtcagagcagccaaggggcccaatccctcacattctccaagtttgaagaaaagaaaaccaacgagaagacccgcaaggttaccacagtgaagaaattcttcagtgcatcttccagggtcggatcaaagaaggaaattcaggaagcaaaagctcccagtccttccataaaccggcaaaccagcattgaaacggatagagtgtctaaggagttcatagaatttctcaagaccttccacaagacaggccaagaaatctataaacagaccaagctgtttttggaaggaatgcattacaaaagggatctaagcattgaagaacagtcagagtgtgctcaggatttctaccacaatgtggccgaaaggatgcaaactcgtgggaaagtgcctccagaaagagtcgagaagataatggatcagattgaaaagtacatcatgactcgtctctataaatatgtattctgtccagaaactactgatgatgagaagaaagatcttgccattcaaaagagaatcagagccctgcgctgggttacgcctcagatgctgtgtgtccctgttaatgaagacatcccagaagtgtctgatatggtggtgaaggcgatcacagatatcattgaaatggattccaagcgtgtgcctcgagacaagctggcctgcatcaccaagtgcagcaagcacatcttcaatgccatcaagatcaccaagaatgagccggcgtcagcggatgacttcctccccaccctcatctacattgttttgaagggcaaccccccacgccttcagtctaatatccagtatatcacgcgcttctgcaatccaagccgactgatgactggagaggatggctactatttcaccaatctgtgctgtgctgtggctttcattgagaagctagacgcccagtctttgaatctaagtcaggaggattttgatcgctacatgtctggccagacctctcccaggaagcaagaagctgagagttggtctcctgatgcttgcttaggcgtcaagcaaatgtataagaacttggatctcttgtctcagttgaatgaacgacaagaaaggatcatgaatgaagccaagaaactggaaaaagacctcatagattggacagatggaattgcaagagaagttcaagacatcgttgagaaatacccactggaaattaagcctccgaatcaaccgttagcagctattgactctgaaaacgttgaaaatgataaacttcctccaccactgcaacctcaagtttatgcaggatgatcacaatttagtggagagtatttatttgagcctaaattgtaggtagcccttactacactcaactgattgggatctagaatgtaactaaattgcttataaatgtcagcattttttaaaggtacagtatatggggattgtttcgtttttcctagcaggggaaccttagttaataataaaatactacttatttgagttactgatacagattcatttaaggcttgtgtgcaaattttgtctcaatcttttttccctccatgattttcctatgtgcttcctctggcattcactgtggttttggtaaataattgccttttaaaggattaaacaaatgaatgctacaaagtgtatgttcaagaaaattaaatggtaccactcttccacagtttggaataattttataattgtaaagatagaaattatattgataagtaaatatgtaaaattgtaaatatgtaaaaaaaagaatggtgtctgctgtgcatggcattttatatgttaattttttagtttaaaatgaagtatattgaatgtttgcctttagcaccattttatttggtttgtcccactaaaatgactcgagaagtgtttagacaaactccccttaagatgtgcactccatctttaagaacgtgttagccttaactttgaggttctatatagtcagagactatgacaccactaaggttcagaataaagtttaggccacataaaattgctgtttaatgtagtcgatggaagactttaaactatgcttctagcttatttttccctcattcattcagcaaatctctattgagttcttcagtgagaaggagcaggcactgggcctggaatggaaggcgggaatgaatgggcctctgatggtgagaggtgacggggtccctcagctgtgagatgcaaggggcgccttgcagcctccataatatacatttgactttgcaaacgtctagacatgttttctgaacctttttcaggacatttcaacctcgggactattcatattagtggcctgagaggtgtttgttgtggggccaccctgtgcatggtagaatgttcagcagcattcctgccatccatatccattaggtgccagtagcacccccgctagagctgtgaaaaattctctccagacatagtcagatgtctcctggggccatatcacccctccgttaagaaccactgatgtcttttacaaaccaggagttatcctcctggtggttaatatggtgtaaccaaagaatcttgcactcaatgcacagtgtgatgttaactaaaacgagttaaatatttaggaggcttgacagctacctgcattgtagaaccttttcttatctcagtggaaccttctataacctaaatataccattgatgattcttcttcca

SEQ ID NO: 172967 - DNA, 553 bp, Homo sapiens
  Payload ID: 13989
  Gene Symbol: RABGEF1
  Gene Name: RAB guanine nucleotide exchange factor (GEF) 1
  ENST ID: ENST00000442563
  CDS Start-End: 418-553
agacctacccgggcgaagcgggcgagcggtggtttggacgccggcggagacgcgggcgagaaaactgtggatttagttactccactctgccatgtctttccaccactgcctgcacatttgagaccaaggatagagattgggaaaaattgatagttctcctgcctcagagtttggctcctgcactctcatttcagccatagctgcagacaaagcacacgattgctgggcactgtggctcaagagaaggaggagatgtttgtttatatggagaagaatgaagaccatgtggtttcagtttgaacggaaattgttgcatagcgatttaccatacagctgtgagactgaacaaatgagtttaaatattatacagtagaaaagaaaactgactttggaacttaagtggttagcaggaagaagatgagccttaagtctgaacgccgaggaattcatgtggatcaatcggatctcctgtgcaagaaaggatgtggttactacggcaaccctgcctggcagggtttctgctccaagtgctggagggaagagtaccacaaag

SEQ ID NO: 172968 - DNA, 2281 bp, Homo sapiens
  Payload ID: 13989
  Gene Symbol: RABGEF1
  Gene Name: RAB guanine nucleotide exchange factor (GEF) 1
  Uniprot ID: Q9UJ41
  ENST ID: ENST00000450873
  CDS Start-End: 273-1748
agacctacccgggcgaagcgggcgagcggtggtttggacgccggcggagacgcgggcgagaaaactgtggatttagttactccactctgccatgtctttccaccactgcctgcacatttgagaccaaggatagagattgggaaaaattgatagttctcctgcctcagagtttggctcctgcactctcatttcagccatagctgcagacaaagcacacgattgctgggcactgtggctcaagagaaggaggagatgtggttagcaggaagaagatgagccttaagtctgaacgccgaggaattcatgtggatcaatcggatctcctgtgcaagaaaggatgtggttactacggcaaccctgcctggcagggtttctgctccaagtgctggagggaagagtaccacaaagccaggcagaagcagattcaggaggactgggagctggcggagcgactccagcgggaggaagaagaggcctttgccagcagtcagagcagccaaggggcccaatccctcacattctccaagtttgaagaaaagaaaaccaacgagaagacccgcaaggttaccacagtgaagaaattcttcagtgcatcttccagggtcggatcaaagaaggaaattcaggaagcaaaagctcccagtccttccataaaccggcaaaccagcattgaaacggatagagtgtctaaggagttcatagaatttctcaagaccttccacaagacaggccaagaaatctataaacagaccaagctgtttttggaaggaatgcattacaaaagggatctaagcattgaagaacagtcagagtgtgctcaggatttctaccacaatgtggccgaaaggatgcaaactcgtgggaaagtgcctccagaaagagtcgagaagataatggatcagattgaaaagtacatcatgactcgtctctataaatatgtattctgtccagaaactactgatgatgagaagaaagatcttgccattcaaaagagaatcagagccctgcgctgggttacgcctcagatgctgtgtgtccctgttaatgaagacatcccagaagtgtctgatatggtggtgaaggcgatcacagatatcattgaaatggattccaagcgtgtgcctcgagacaagctggcctgcatcaccaagtgcagcaagcacatcttcaatgccatcaagatcaccaagaatgagccggcgtcagcggatgacttcctccccaccctcatctacattgttttgaagggcaaccccccacgccttcagtctaatatccagtatatcacgcgcttctgcaatccaagccgactgatgactggagaggatggctactatttcaccaatctgtgctgtgctgtggctttcattgagaagctagacgcccagtctttgaatctaagtcaggaggattttgatcgctacatgtctggccagacctctcccaggaagcaagaagctgagagttggtctcctgatgcttgcttaggcgtcaagcaaatgtataagaacttggatctcttgtctcagttgaatgaacgacaagaaaggatcatgaatgaagccaagaaactggaaaaagacctcatagattggacagatggaattgcaagagaagttcaagacatcgttgagaaatacccactggaaattaagcctccgaatcaaccgttagcagctattgactctgaaaacgttgaaaatgataaacttcctccaccactgcaacctcaagtttatgcaggatgatcacaatttagtggagagtatttatttgagcctaaattgtaggtagcccttactacactcaactgattgggatctagaatgtaactaaattgcttataaatgtcagcattttttaaaggtacagtatatggggattgtttcgtttttcctagcaggggaaccttagttaataataaaatactacttatttgagttactgatacagattcatttaaggcttgtgtgcaaattttgtctcaatcttttttccctccatgattttcctatgtgcttcctctggcattcactgtggttttggtaaataattgccttttaaaggattaaacaaatgaatgctacaaagtgtatgttcaagaaaattaaatggtaccactcttccacagtttggaataattttataattgtaaagatagaaattatattgataagtaaatatgtaaaattgtaaatatgtaaaaaaaagaatggtgtctgctgtgcatggcattttatatgttaattttttagtttaaaatgaagtatattgaatgttt

SEQ ID NO: 172969 - DNA, 3553 bp, Homo sapiens
  Payload ID: 13989
  Gene Symbol: RABGEF1
  Gene Name: RAB guanine nucleotide exchange factor (GEF) 1
  ENST ID: ENST00000510829
  CDS Start-End: 155-1378
aacgtgcgttcgctggcggtgccgggggcggggcgagcaggagggtgggtgtgaggcgggagctggccgcggagcccagacctacccgggcgaagcgggcgagcggtggtttggacgccggcggagacgcgggcgagtggttagcaggaagaagatgagccttaagtctgaacgccgaggaattcatgtggatcaatcggatctcctgtgcaagaaaggatgtggttactacggcaaccctgcctggcagggtttctgctccaagtgctggagggaagagtaccacaaagccaggcagaagcagattcaggaggactgggagctggcggagcgactccagcgggaggaagaagaggcctttgccagcagtcagagcagccaaggggcccaatccctcacattctccaagtttgaagaaaagaaaaccaacgagaagacccgcaaggttaccacagtgaagaaattcttcagtgcatcttccagggtcggatcaaagaagcctccagaaagagtcgagaagataatggatcagattgaaaagtacatcatgactcgtctctataaatatgtattctgtccagaaactactgatgatgagaagaaagatcttgccattcaaaagagaatcagagccctgcgctgggttacgcctcagatgctgtgtgtccctgttaatgaagacatcccagaagtgtctgatatggtggtgaaggcgatcacagatatcattgaaatggattccaagcgtgtgcctcgagacaagctggcctgcatcaccaagtgcagcaagcacatcttcaatgccatcaagatcaccaagaatgagccggcgtcagcggatgacttcctccccaccctcatctacattgttttgaagggcaaccccccacgccttcagtctaatatccagtatatcacgcgcttctgcaatccaagccgactgatgactggagaggatggctactatttcaccaatctgtgctgtgctgtggctttcattgagaagctagacgcccagtctttgaatctaagtcaggaggattttgatcgctacatgtctggccagacctctcccaggaagcaagaagctgagagttggtctcctgatgcttgcttaggcgtcaagcaaatgtataagaacttggatctcttgtctcagttgaatgaacgacaagaaaggatcatgaatgaagccaagaaactggaaaaagacctcatagattggacagatggaattgcaagagaagttcaagacatcgttgagaaatacccactggaaattaagcctccgaatcaaccgttagcagctattgactctgaaaacgttgaaaatgataaacttcctccaccactgcaacctcaagtttatgcaggatgatcacaatttagtggagagtatttatttgagcctaaattgtaggtagcccttactacactcaactgattgggatctagaatgtaactaaattgcttataaatgtcagcattttttaaaggtacagtatatggggattgtttcgtttttcctagcaggggaaccttagttaataataaaatactacttatttgagttactgatacagattcatttaaggcttgtgtgcaaattttgtctcaatcttttttccctccatgattttcctatgtgcttcctctggcattcactgtggttttggtaaataattgccttttaaaggattaaacaaatgaatgctacaaagtgtatgttcaagaaaattaaatggtaccactcttccacagtttggaataattttataattgtaaagatagaaattatattgataagtaaatatgtaaaattgtaaatatgtaaaaaaaagaatggtgtctgctgtgcatggcattttatatgttaattttttagtttaaaatgaagtatattgaatgtttgcctttagcaccattttatttggtttgtcccactaaaatgactcgagaagtgtttagacaaactccccttaagatgtgcactccatctttaagaacgtgttagccttaactttgaggttctatatagtcagagactatgacaccactaaggttcagaataaagtttaggccacataaaattgctgtttaatgtagtcgatggaagactttaaactatgcttctagcttatttttccctcattcattcagcaaatctctattgagttcttcagtgagaaggagcaggcactgggcctggaatggaaggcgggaatgaatgggcctctgatggtgagaggtgacggggtccctcagctgtgagatgcaaggggcgccttgcagcctccataatatacatttgactttgcaaacgtctagacatgttttctgaacctttttcaggacatttcaacctcgggactattcatattagtggcctgagaggtgtttgttgtggggccaccctgtgcatggtagaatgttcagcagcattcctgccatccatatccattaggtgccagtagcacccccgctagagctgtgaaaaattctctccagacatagtcagatgtctcctggggccatatcacccctccgttaagaaccactgatgtcttttacaaaccaggagttatcctcctggtggttaatatggtgtaaccaaagaatcttgcactcaatgcacagtgtgatgttaactaaaacgagttaaatatttaggaggcttgacagctacctgcattgtagaaccttttcttatctcagtggaaccttctataacctaaatataccattgatgattcttcttccattcagtgacatccacagattatgcagctatacttgtgaaatcgtgcatgaggccccagggcaccgttctagaacaacgtcacttcacacaggcagctgagaaaggttctcttgcttttccagtatcttcctaaggatggagcccaaaattgcagagcagtaactttggaataaaaccagggtgggtataaaacttcttattcttaaatttacatataagatctattaagcttgacacatctgtgtcatcacgcactgaagacaggaagcagttcactgagtcagctggttcccaagctcgcacagaaggtgataagttactatcaaatgccagtgagaatcttcttatagaataacctgggcccaagtgattttagtacaaaacttgcccttctttggtttaattttctatgtgcttttaggtgtgaatccagatatgcggtcttaattcctttggaaatacacagttcgtttagttactgtacactctgtttgttcaataaactgcatatcaacttcccacaaaagctgacttttttgggtctcttacatataaagtaggttattgagttgatttttttggaggtatctcatattggtcgaattcttctggtatggactcttgccttatatagaggcttctatttctcttaagtcagcatcaatacaacggccggagtttctgtttttgcaataagaagatgttggtattttatgtagggtaaatgtgactggaatacacctttggaacggaattctttatcaataaagtttcacaatccgtccctcttcc

SEQ ID NO: 172970 - DNA, 2654 bp, Homo sapiens
  Payload ID: 13989
  Gene Symbol: RABGEF1
  Gene Name: RAB guanine nucleotide exchange factor (GEF) 1
  ENST ID: ENST00000607882
  CDS Start-End: 968-1327
ccagacctgccgagcgacgtgggcgagcggtgacctggaccacggcgcagacgcgggcgagctgcggctcggacgccagcggacacgcgggcgagatcactttgggaagcagtgacatccaacctgtatcaagtcttctaatctgtgaacatggatctcgctctgctgtcacccggcctggagttcagtggagggatctctgcaccgtcaacttcctgggctatcaagcgatcctcccacctcagcctccctggtagttgggaccacaggtgcccgccatcatgtccggctgatttgtaaaatttcttttgtagagatggtgaccttgctctgtggcccaggctggtctcgaactcctggactcaagcgatcctcctgcctgggcctcctaaagattcagctgcttttggatcaaccgatcgccttaagaccttttaactcgaacacctgtcacatcctaggatccgcgaaggactgaaacagagtttctgaagcgtccctcggcgcagtagctccgctccacctcccattcgcgctaccaccgcggccgcagccccaggagtcgccgcggagccagcgtcgccctccagctgttgcgcgtcggaagccggaagcagggactgagcgacagactaggaaacgccggtttctccggggctccccagcgccccacctttaccccggaggccgccctcttccatttgctcttgggcgtcagggcggtaccccactccgctcgaccctttggatccactcgcacttcctcccgtccagagtcaaaggccccggaagtgacgtttacgcgccgcgcgtaacgtgcgttcgctggcggtgccgggggcggggcgagcaggagggtgggtgtgaggcgggagctggccgcggagcccagacctacccgggcgaagcgggcgagcggtggtttggacgccggcggagacgcgggcgagtggttagcaggaagaagatgagccttaagtctgaacgccgaggaattcatgtggatcaatcggatctcctgtgcaagaaaggatgtggttactacggcaaccctgcctggcagggtttctgctccaagtgctggagggaagagtaccacaaagccaggcagaagcagattcaggaggactgggagctggcggagcgactccagcgggaggaagaagaggcctttgccagcagtcagagcagccaaggggcccaatccctcacattctccaagtttgaagaaaagaaaaccaacgagaagacccgcaaggttaccacagtgaagaaattcttcagtgcatcttccagggtcggatcaaagaagggatctaagcattgaagaacagtcagagtgtgctcaggatttctaccacaatgtggccgaaaggatgcaaactcgtgggaaagtgcctccagaaagagtcgagaagataatggatcagattgaaaagtacatcatgactcgtctctataaatatgtattctgtccagaaactactgatgatgagaagaaagatcttgccattcaaaagagaatcagagccctgcgctgggttacgcctcagatgctgtgtgtccctgttaatgaagacatcccagaagtgtctgatatggtggtgaaggcgatcacagatatcattgaaatggattccaagcgtgtgcctcgagacaagctggcctgcatcaccaagtgcagcaagcacatcttcaatgccatcaagatcaccaagaatgagccggcgtcagcggatgacttcctccccaccctcatctacattgttttgaagggcaaccccccacgccttcagtctaatatccagtatatcacgcgcttctgcaatccaagccgactgatgactggagaggatggctactatttcaccaatctgtgctgtgctgtggctttcattgagaagctagacgcccagtctttgaatctaagtcaggaggattttgatcgctacatgtctggccagacctctcccaggaagcaagaagctgagagttggtctcctgatgcttgcttaggcgtcaagcaaatgtataagaacttggatctcttgtctcagttgaatgaacgacaagaaaggatcatgaatgaagccaagaaactggaaaaagacctcatagattggacagatggaattgcaagagaagttcaagacatcgttgagaaatacccactggaaattaagcctccgaatcaaccgttagcagctattgactctgaaaacgttgaaaatgataaacttcctccaccactgcaacctcaagtttatgcaggatgatcacaatttagtggagagtatttatttgagcctaaattgtaggtagcccttactacactcaactgattgggatctagaatgtaactaaattgcttataaatgtcagcattttttaaaggtacagtatatggggattgtttcgtttttcctagcaggggaaccttagttaataataaaatactacttatttgagttactgatacagattcatttaaggcttgtgtgcaaattttgtctcaatcttttttccctccatgattttcctatgtgcttcctctggcattcactgtggttttggtaaataattgccttttaaaggattaaacaaatgaatgctacaaagtgtatgttcaagaaaattaaatggtaccactcttc

SEQ ID NO: 172971 - DNA, 2430 bp, Homo sapiens
  Payload ID: 13990
  Gene Symbol: RABIF
  Gene Name: RAB interacting factor
  Uniprot ID: P47224
  ENST ID: ENST00000367262
  CDS Start-End: 38-409
cgcagccgtggctgaggagcctgtggcggcagcggcgatggaaccagcggagcagccgagcgagttagtgtcagccgagggccgaaaccggaaggcggtgctgtgccagcgttgcggctcccgggtgctgcagccagggaccgctctcttctctcgccgacagcttttccttccctccatgagaaagaagccagctctgtctgacggcagcaatcctgacggcgatctcctccaggaacactggctggttgaggacatgttcatttttgagaatgtgggcttcaccaaggacgtgggcaacatcaagtttctggtctgcgcagactgtgaaattggaccaattggctggcattgcctagatgacaagaacagtttctatgtggccttggaacgagtttcccatgagtaactgaggggaggggtactcagctccatctccaaagataaacctactccccacaagaactggcctttaatgtggtataactgttccgctgccttcttgtctgtgctaatataaatactgagtaccagcatgtccatttgaacatgcagagggttaatcctgcttcctaaagcctcaagtacatgcctcctgcttagttcactttgtatcacatttcctaagctcccttttcccccagttttgggacactgtgcttacctccaaaaatctcatctcttccctggcattctccctaggctctgttttgcccaggggctcccgctttttcttgctctagaagagcagtattcaaccttttagctatgatgacacataacaaaagatgcttatgtactaatagttgaaatctgcctttttctcattcaagaaggcatacaaatatctgagagtgactttgttgtatggctacccttgtgatctacagtaatttattctttctaaaggtaaagcattttcaaaactcagtatttaaaccactaaccagaaacattactttggatgcatctctaataccatgtttgagcacctctgctctaggttgagaatgacattttattgtgaagatgggtgtggtccctcttcccttgaaatcttgtagtttctttttatattagctcctcactgctacagcctagaaggtgagaagcagattttaaccccatctggcagccattcaaggaaaacccagccctggctgtttactcaggctctcttagaatgagagtggagggtgtaggatatgagggttaggcctttgccacattatacaaaagtttataatttgccacatctggacaagtaactttcttcttttgttcataggcaagacttctttaatggatagtatcatttactgaacctactgggcatggtcctcatggagttttggttcaactggaatctctgtgccaacccaggatacaaacttccatccagatgcatggatacaaatttccatagctccggggctgctctaacagtttgatatcagcagacgtgtttaagccttcaacttgatttccaattattccatcatttctattctgaaatgactcactgtcgtagaaggaagtttattatataaccaaggtttcaggtatcctcctgtcaccacctctactattcaggaggcctaaaattgaaataagtactaaacagaaaccttaccatctgaagtcccttccattgttttctagttgcttcctcattcctttacccccaaactttctaagggctccccgactgcagtgcaaggtggccttgggcacagttttgcaaccaacctactcccctggaaagatggcttccttctccaattagcctgaatgagctttagtaagcaattgagagaactgtgtttttccgacaaacggtcacatgtccatcgttatggcatgtgcagaaaaacagagttatccacacaagtcaggagcaaaacccaagtagatgcctctaggggcacatggcccctcacatcacaagccagaacctaagctaagcattttttaaattgagtttgagactagcctgggcaacatagtgagaccccatctctatttaaaaaatgaacaaaattacctgggcatagtggtgtatacctgtagtccctgctacttgggaggctcaggtgggaggatcacttgagccccaaagatggtggctgcagtaagccaagatcacaccactggcactccagcctgggcaacagagtgagaccctgtctcaaacaaacaacaacagtaacaacaaaaaaatatatagcgacttgaataggaaaccatagtatttcattgttttaatttgcatttattttatttctagtgaaacttttatatacgtatcggtcatttctatttccttttttgagaactgccaaatgttgccctagtagccaaaaatatcaggttgctattctgccttttcagtttgatctgaaagaaataaaggcatttaagcaatggaaa

SEQ ID NO: 172972 - DNA, 1771 bp, Homo sapiens
  Payload ID: 13991
  Gene Symbol: RILP
  Gene Name: Rab interacting lysosomal protein
  Uniprot ID: Q96NA2
  ENST ID: ENST00000301336
  CDS Start-End: 274-1479
acttgcagccctgaacctcagctcttggacgcctggctggaagttggctgtcttgtttcctgtgaccttgggggtggaaaggacagagcccaggcgacctagggcactatctccctaccccacgccttctcccttcctcgttcctccctacccttatcgcttctaccccgcccacaccgccctaaacggcttcctggggcggaactgtttcgcttttccccgtcccagtggagggtggggtgggggggtcgcagccctaagcctctgggagacatggagcccaggagggcggcgcccggggtgcctggctgggggtctcgggaggccgcggggtcggcatcggccgcggagcttgtgtaccatctagccggggccctgggcactgagctgcaggatctggcgcgccgtttcgggccggaggcggcggccgggctggtgccgctagtggtgcgggcgctggagctcttggaacaggctgccgtggggcccgccccggactcgctgcaggtgtcggcgcagccggcggagcaggagctgcggcggctgcgggaggagaacgagcgcctccgcagggagctgcgcgcggggccacaggaggagcgcgcgctgctgcggcagctcaaggaggtcacggaccgacagcgggacgaactccgggcgcacaaccgcgacctgcggcagcgcggccaggagaccgaggcgttgcaggagcagctgcagcgcctcctgctggtgaacgctgagctgcggcacaagctggcggccatgcagacccagctgcgcgccgcgcaggaccgcgagagggagcgccagcagcctggcgaagccgcgactccgcaggctaaagagcgagcgcgggggcaggccgggcggcccgggcaccagcacggacaggagcccgaatgggcgaccgccggcgcaggcgccccagggaaccctgaggacccggcggaggccgcgcagcagctcgggcgcccctcggaggcagggcagtgccgcttcagtcgggaggagtttgagcagatccttcaggagcggaatgaactcaaagccaaagtgttcctgctcaaggaggaactggcctacttccagcgggagctgctcacagaccaccgggtccccggccttctgctcgaggccatgaaggtggctgtccggaagcagcggaagaagatcaaggccaagatgttagggacaccagaggaagcagagagcagtgaggatgaggctggcccatggatcctgctctccgatgacaagggagaccatcccccacccccggagtccaaaatacagagtttctttggcctatggtatcggggtaaagctgaatcctctgaggatgagaccagcagccctgcacccagcaagctagggggagaagaggaggcccaaccacagtctccagctcctgatccgccctgttctgccctccacgaacacctttgtctgggggcctcagccgccccagaggcctgacttaggggtctggctgtggaaggatgtgtggcctcaaatgaggacagggctcccgccttcacagccctcgccaggggtctgccccaatcctggcctgcatcagggcaggacggggtctcagcccgcctccctctctacgtctctgtaccgagcctctggggccagatataagagtgcctctctgagtctcagtttccccatccatgaaatgagagctgactgcctagctcccagggctttgtgcagacggcctgagctcatgtaataaagaactgcccgtaatacacagaaa

SEQ ID NO: 172973 - DNA, 978 bp, Homo sapiens
  Payload ID: 13991
  Gene Symbol: RILP
  Gene Name: Rab interacting lysosomal protein
  ENST ID: ENST00000574810
  CDS Start-End: 1-681
ctgcagcgcctcctgctggtgaacgctgagctgcggcacaagctggcggccatgcagacccagctgcgcgccgcgcaggaccgcgagagggagcgccagcagcctggcgaagccgcgactccgcaggctaaagagcgagcgcgggggcaggccgggcggcccgggcaccagcacggacaggagcccgaatgggcgaccgccggcgcaggcgccccagggaaccctgaggacccggcggaggccgcgcagcagctcgggcgcccctcggaggcagggcagtgccgcttcagtcgggaggagtttgagcagatccttcaggagcggaatgaactcaaagccaaagtgttcctgctcaaggaggaactggcctacttccagcgggagctgctcacagaccaccgggtccccggccttctgctcgaggccatgaaggtggctgtccggaagcagcggaagaagatcaaggccaagatgttagggacaccagaggaagcagagagcagctttggcctatggtatcggggtaaagctgaatcctctgaggatgagaccagcagccctgcacccagcaagctagggggagaagaggaggcccaaccacagtctccagctcctgatccgccctgttctgccctccacgaacacctttgtctgggggcctcagccgccccagaggcctgacttaggggtctggctgtggaaggatgtgtggcctcaaatgaggacagggctcccgccttcacagccctcgccaggggtctgccccaatcctggcctgcatcagggcaggacggggtctcagcccgcctccctctctacgtctctgtaccgagcctctggggccagatataagagtgcctctctgagtctcagtttccccatccatgaaatgagagctgactgcctagctcccagggctttgtgcagacggcctgagctcatgtaataaagaactgcccgtaatacacagaaactgtt

SEQ ID NO: 172974 - DNA, 1771 bp, Homo sapiens; identical to SEQ ID NO: 172972
  Payload ID: 13991
  Gene Symbol: RILP
  Gene Name: Rab interacting lysosomal protein
  Uniprot ID: Q96NA2
  ENST ID: ENST00000622136
  CDS Start-End: 274-1479

SEQ ID NO: 172975 - DNA, 978 bp, Homo sapiens; identical to SEQ ID NO: 172973
  Payload ID: 13991
  Gene Symbol: RILP
  Gene Name: Rab interacting lysosomal protein
  ENST ID: ENST00000633176
  CDS Start-End: 1-681

SEQ ID NO: 172976 - DNA, 2389 bp, Homo sapiens
  Payload ID: 13992
  Gene Symbol: RILPL1
  Gene Name: Rab interacting lysosomal protein-like 1
  ENST ID: ENST00000340724
  CDS Start-End: 1068-1919
aaaatcatgacagtgttgtacaaccatcacctgttttgttccaaaacactttcaccaccttcctgaggtgactgcacctggcaggtctctccccagcctcttgtctctgccctccctccctgcaggtacaaccactggcagcctctaatctgctttctgcctctgtggatttgccagttctggatatttcctatcgatgaaatcacactgtatgcaaccttggggtctgatcttagaccccacgtcatttttgaggttcatccgtgctgtggcgtgtcagagctgctttcctcgttatggctgaattgtcctccactgtgtggactgagcgcgttgtgcttatccattcttagcggggggacatttgggtggcttccatctttcatctgctacagatagtgctgctgtgaactttgtcacttaacagtctatctcagtgttttcgacggcacatcgtgtctcatggtgtcccactgcctggacagtgccttgctggtggacagtagctcactgccagattctcactcccacacgtgtggctgctgtggctggccacggacgagcttctccatggtgcccctgcccaagtgtctcttaaaatctaggtccctagatcctgaattgctgggtgtgtatgatggctcacaactcttccagcttttaacagtgtctgttaagaatacttggccttctcttagttttccaaagcactcttgtactttctcttagcagtgacctgtgaagcggggaggcctggtctttccgtatcaggataaaatgacttagacactctggccctgggcccctctgttgtgagcacttcacatcgatgaagcgtgcacaggcctctcgagagcaccgaggcctgaagggaaagcaactaagaggccgaagctgggataggagtcaggcgccaggcttctgcctcggtctcatagctcctacggctgccgcccaggaaggtgatgaggctgctgggcttccacatagacccagccgcccctctctcctcatgctcgcctcccgcccacctctcggggagccaaggcagccccagcaaggagtaaatgagcatgtcagagcgggagcgacaggtgatgaagaagctgaaggaggtggtggacaaacaacgcgacgagatccgcgccaaggacagggagctgggcctgaaaaatgaggacgttgaggctttacagcagcagcagacacggctgatgaagatcaaccatgaccttcggcaccgggtcacggtggtggaggcccaggggaaagccctgatcgaacagaaggtggagctggaggcagacctgcagaccaaggagcaggagatgggcagcctgcgagcagagctggggaagttgcgagagaggctgcagggggagcacagccagaatggggaggaggagcctgagacggagccggtgggagaggagagcatctccgacgcagagaaggtggccatggatctcaaggaccccaaccgcccccggttcaccctgcaggagctgcgggacgtgctgcacgagaggaacgagctcaagtccaaggtgttcttgctgcaggaggagctggcttactataagaggtttccacatgagaccacaagcaacatgagaccagaagtcttatttatcttgtccatggctaagttcccagcacttagaatggagcttggcacacatgaagaaatggaagaggaaaaccgaataccccaacccccacccatcgcccacccgaggacgtccccccagccggagtcgggcatcaagcgactgtttagcttcttctcccgagataagaagcgcctggccaacacacagagaaacgtgcacatccaggagtcctttggacagtgggcaaacacccaccgcgatgacggttacacagagcaaggacaggaagccctgcagcatctgtgaccttggcccatctccaccctccaacctggactgcccgccaccagcgcctgcaaccgaactgcagcccaggggtcattgctgcctcaagcctctcggtgcagatgcaccctgaaaactgacccctcaaacagactgtctgatttgaggatggacattgaaaaactgacgccaaactctaaagaaatgtttatttatacccagggctatcactgtttctaatagatgactctgatcccgtaggatatatatttaataatcccacaaacggaggccagacttctgcgttaacttcagtaacacaagcttctttaagccaaatacatcacttgccactatcattgctgtttgacttgctttgtataaaatgctatgtgtagaggttttattatcacaggtgacatagttcagcaggaggcatggaagggctagatcttcattagttacattcatgaaattgtgatggtaacgta

SEQ ID NO: 172977 - DNA, 3932 bp, Homo sapiens
  Payload ID: 13992
  Gene Symbol: RILPL1
  Gene Name: Rab interacting lysosomal protein-like 1
  Uniprot ID: Q5EBL4
  ENST ID: ENST00000376874
  CDS Start-End: 237-1448
ctcgggagcagctccgggccgagccgggcgcccagaccccgggcccgcacaccccgcgccgccgcccgtgcccgcgcccgcgcccgccgcccgctgcccgctgcgccctcgccccagcgcccgctgagcgcgcccgcccgcggcccaggctgggcccggccggcccggccctcgacagcggcaagtttgggagttgcacgagtttgcggggcgggggacaggccaggagggtggccatggaggaggagcgggggtcggcgctggcggccgagtcggcgctggagaagaacgtggccgagctgaccgtcatggacgtgtacgacatcgcgtcgcttgtgggccacgagttcgagcgggtcattgaccagcacggctgcgaggccatcgcgcgcctcatgcccaaggtcgtgcgcgtcctggagatcctggaggtgctggtcagccgccaccacgtcgcgcccgagctggacgagctgcgcctggagctggaccgcctgcgcctggagaggatggaccgcatcgagaaggagcgcaagcaccagaaggagctggagctggtggaggatgtgtggcgaggggaggcgcaggacctcctctcccagatcgcccagctgcaggaggagaacaagcagctcatgaccaacctctcccacaaggatgtcaatttctcagaggaggagttccagaagcatgaaggcatgtcagagcgggagcgacaggtgatgaagaagctgaaggaggtggtggacaaacaacgcgacgagatccgcgccaaggacagggagctgggcctgaaaaatgaggacgttgaggctttacagcagcagcagacacggctgatgaagatcaaccatgaccttcggcaccgggtcacggtggtggaggcccaggggaaagccctgatcgaacagaaggtggagctggaggcagacctgcagaccaaggagcaggagatgggcagcctgcgagcagagctggggaagttgcgagagaggctgcagggggagcacagccagaatggggaggaggagcctgagacggagccggtgggagaggagagcatctccgacgcagagaaggtggccatggatctcaaggaccccaaccgcccccggttcaccctgcaggagctgcgggacgtgctgcacgagaggaacgagctcaagtccaaggtgttcttgctgcaggaggagctggcttactataagagtgaagaaatggaagaggaaaaccgaataccccaacccccacccatcgcccacccgaggacgtccccccagccggagtcgggcatcaagcgactgtttagcttcttctcccgagataagaagcgcctggccaacacacagagaaacgtgcacatccaggagtcctttggacagtgggcaaacacccaccgcgatgacggttacacagagcaaggacaggaagccctgcagcatctgtgaccttggcccatctccaccctccaacctggactgcccgccaccagcgcctgcaaccgaactgcagcccaggggtcattgctgcctcaagcctctcggtgcagatgcaccctgaaaactgacccctcaaacagactgtctgatttgaggatggacattgaaaaactgacgccaaactctaaagaaatgtttatttatacccagggctatcactgtttctaatagatgactctgatcccgtaggatatatatttaataatcccacaaacggaggccagacttctgcgttaacttcagtaacacaagcttctttaagccaaatacatcacttgccactatcattgctgtttgacttgctttgtataaaatgctatgtgtagaggttttattatcacaggtgacatagttcagcaggaggcatggaagggctagatcttcattagttacattcatgaaattgtgatggtaacgtattatacagaatgtatccatcaggcagacaaggggtctgaagtcacaggctcagtagcccaactcagacacaaagccacagacaatatggatgatggtcctcttacccagaaactggagacaactttgcaggcaccctggctgcgttcctgataatgcctagagcatgtagcaatgttcaaggcaggtgccttggaatctgctgtgagttatgcagtactaaccaaacaaagttgctaaggatgagatgttgcaacatttcttgtgtgcacttttttttcctgacatctttttttccttttaggattcattaagtcatatacttagtcccctgcaaagaagaagacagatgtcccagagcagactgaaagcggggcgtgggatcctaggcaatgcaggagggcaggtgggggagctgtagcagaacaagggtgctaggtgggaagctggcttggggaccacacgtctggctgactcacagggctatagcagcagacagagagccagatgctctactgcaactggtgagttggaggcttgcccacataacactgtctttctctccacccgccaagcatccagggcacagggctggttgctcacagattgagcgaggtagcacctcctaccagcactcaagtttatcagggccgcgttctaaacattctactgaagtttgctaagaaaccattaggtgaggctgggcacagtggctcacgcctgctatcccagcactttgggaggccgaggcaggtgggtcacttgaggtccggagttcgagaccagcttggccaacacggtgaaaccccatctctacaaaaatacaaaaaaattagccaggcgaggtggtgcatgcctataatcccagctgctcaggaggccgagacaggagaattccttgaacctaggaggcagaggttgcagtgagcctagatcgtgccattgcactccagcctgggcgacagagtgagacttcatctaaaaaaaaaaaaaaaaagaaagaaagaaaccatcaggtgaatttgcagaatctagaatggactctgcttccagattgccgaaaaaaagaaatgatcagacagggtaattattgctgcgttagagcagtgtttctcaaacctgagtgcccattagaattattagaatttattctcaaagagtatagaagcaggtatactgatgaatttctctcccacccctggccacctttgttgcccttccaacaggtaaccaaaattgccagtttcttggttatctttcctaaacactaaatgtctctcttttttttgagatagtcttgctctattgcccaagccaaagtatagtggcaccatctctgctcactgcaacttccgcctcttgagttcaagcaattctcatgcctgagcctcccaagtagctgggactacatgtgtgtgccaccatacctgactaatttttgtatttttagtaaagacggggtttcaccatgttggccaggctggtctcgaggtctcgaactcctgacctcaagtgattcacctgccttggcctctcaaagtgctgggattacaggtgtgagccactgtggctggccttttttttttttttttttttggacacagggtctcactctgtcacctaggctggagtacagtggcactatcatagctcattgcagctatgaacccctgggctcaagcaatcctcccacctcagcctcccaagtagctggtactactgatgtgcaccaccatgcccagctaattattttttgtagagaccaggtcttactttgttgcctaagctggtctcaaactcctgggctcaagtgatcctcacaccccagcctcccaaagtgctgggaattcaggtgtgagccaccgtgcctggccaaatgtcacttttttgataagtcagcagatccagctcttgagcacatcagaggctagataatcgggacagaaaggaaaaatcaatccatcagaaagtttatacatgcaattatgtaaaataaaatcaagaacaaaaagcata

SEQ ID NO: 172978 - DNA, 769 bp, Homo sapiens
  Payload ID: 13992
  Gene Symbol: RILPL1
  Gene Name: Rab interacting lysosomal protein-like 1
  ENST ID: ENST00000544468
  CDS Start-End: 168-398
gttcaaagatgggagaggccgggcgcggtggctcatgcctgtcatcccagcactttgcgaggccgaggcaggcggatcacttgaacccaggactcgaaaccagcctgggcaacatagtgggacccccatctctacacaaaaatttttaaaaattagccagtgaagaaatggaagaggaaaaccgaataccccaacccccacccatcgcccacccgaggacgtccccccagccggagtcgggcatcaagcgactgtttagcttcttctcccgagataagaagcgcctggccaacacacagagaaacgtgcacatccaggagtcctttggacagtgggcaaacacccaccgcgatgacggttacacagagcaaggacaggaagccctgcagcatctgtgaccttggcccatctccaccctccaacctggactgcccgccaccagcgcctgcaaccgaactgcagcccaggggtcattgctgcctcaagcctctcggtgcagatgcaccctgaaaactgacccctcaaacagactgtctgatttgaggatggacattgaaaaactgacgccaaactctaaagaaatgtttatttatacccagggctatcactgtttctaatagatgactctgatcccgtaggatatatatttaataatcccacaaacggaggccagacttctgcgttaacttcagtaacacaagcttctttaagccaaatacatcacttgccactatcattgctgtttgacttgctttgtataaaatgctat

SEQ ID NO: 172979 - DNA, 6141 bp, Homo sapiens
  Payload ID: 13993
  Gene Symbol: RILPL2
  Gene Name: Rab interacting lysosomal protein-like 2
  Uniprot ID: Q969X0
  ENST ID: ENST00000280571
  CDS Start-End: 298-933
ctgaacttccccgttcctcttctcggctgcctccttttccgttgtcccttcgcgccccaaaccacatcctggagcgcactctccagcgtggctggcagcggggacggtgcgccggggcgcaggcccaagagtcgcgtgcgcggccccttgcaccatccccccgggcccacccccgggccgcgctgattgggcaggtagggactctgcccagcggaaagttttgggtgccgggaggaagtctaacctttgggagactccaagacagcagctccgaggtcggcgggggtctgggtggccatggaggagccccctgtgcgagaagaggaagaggaggagggagaggaggacgaggagagggacgaggttgggcccgagggggcgctgggcaagagccccttccagctgaccgccgaggacgtgtatgacatctcctacctgttgggccgcgagcttatggccctgggcagcgacccccgggtgacgcagctgcagttcaaagtcgtccgcgtcctggagatgctggaggcgctggtgaatgagggcagcctggcgctggaggagctgaagatggagagggaccacctcaggaaggaggtggaggggctgcggagacagagccctccggccagcggggaggtgaacctgggcccaaacaaaatggtggttgacctgacagatcccaaccgaccccgcttcactctgcaggagctaagggatgtgctgcaggaacgcaacaaactcaagtcgcagctcctggtggtgcaggaagagctgcagtgctacaagagtggcctgattccaccaagagaaggcccaggaggaagaagagaaaaagatgctgtggttactagtgccaaaaatgctggcaggaacaaggaggagaagacaatcataaaaaagctgttcttttttcgatcggggaaacagacctagatccaaggccacaagtaaggctatggctctgattctagaagacaaccttccaagatgcctggcaaaaccacctccctgtgccacacagacacactaggcctgtgtatttatttccccttcaaagcagactgaggagggaggagacgaggttctcttggcatcactttctccctggctgcagaactagacacccttgaagatttggcctgggccagtgagactgaaatcaagaaaaacagaagggatgtgcagggtgggggggtccacttcctgctcccatgtcaacccccagggcctccagcgtgcagacgcgtgtcctactcatctgctcccacggatgaccctggtcttcaatggttagcagaagggagaaaagaaagcaggaaaatgtgctattgagattccagtggtgacttcactgatatttagtgaatatttgatttagccaacatgcctttctttatgtgattttgtattaaagtaaaatgatttttatactttctatagcttatctagagtggtctcttagttacgatggtacacatggtatatgtgtgtatatgtcatatatctacatttcattgtataatgaatcaattgcattcattcagtctaagcgatgcacgattatctggtgtcactatgaagggaaagattgctgcaaactaaaatgttaagaagctatcgattttaggactcatcctgatttcagaggtgttaagatgtgaacaaaatgcatttaggaatcaatgaaacagagagcgggtgtctgcacttcgcaaaggaactaatgaggctgccgcaaccattccgtgagcctgtcttcttagtaaataacagtggcttactcaatgtgtttcgcctgctctgtggattatctcatttgttcctcataacctggggagatggggaccggtaccggtgcaccagtttatagattttttttttttttttttttgagacggagtctctcgctctgtcgcacagtctggagtgcagtggcacgatctcggctcactacaagctctgctgcctacgttcacgccattctcttgcctcagcctcctgagtagctgggactacaggcacttgccaccacactcgtctaatttttttgtatttttagtagagacagggtttcgccgtgttagccaggatggtctcgatctcctgacctcgtgatccacccgcctcagcctcccaaagtgctggtgagaggtgacagcgtgctggcagtcctcacagccctcgctcgctctcggcgcctcctctgcctgggctcccactttggcggcacttgaggagcccttcagcccaccgctgcactgtgggagcccctttctgggctggccaaggccggagcccgctccctcagcttgcagggaggtgtggagggagaggcgcgagcgggaaccggggctgcgcggggcgcttgcgggccagctggagttccgggtgggcgtgggcttggtgggccccgcactcggagcagctggcgggccctgccggctccgggcaatgaggggcttagcacccgggccagcggctgctgagggtgtgctgggtcccccagcagtgccagcccaccggcgctgcgctcgatttctcgccgggccttagctgccttcccgtggggcagggctcgggacctgcagcccgccatgcctgagcctcccaccccctccgtgggctcctgtgcggcccaagcctcctccacgagccccaccccctgctccatggtgtccagtcccatcaacgacccaagggttgaggagtgcaggcacagggcacgggactggcaggcagctccatctgcagccccggtgcgggatccactgggtgaagccagctgggctcctgagtctgctggggacgtggagaacctttgtgtctagctcagggattgtaaatacaccaatcggcactctgtatctagctcaaggtttgtgaacacaccaatcagcaccctgtgtctagctcagggtttgtgaatgcaccaatcgacattctgtatctagctactctggtggggccttggagaacctttgtgtccacactctgtatctagctaatctggtggggacgtggagaacctttgtgtctagatcagggattgtaaacgcaccaatcagcgccctgtcaaaacagaccacttggctctaccaatcagcaggatgtgggtggggccagataagagaataaaagcaggctgccccaggcagcagtggcaacccgctcgggttcctttccgcattgtggaagctttgttcttttgttctttgcaataaatcttactactgcttactctttgggtccacactgcttttatgagctgtaatactcaccccgaaggtctgcagcttcactcctgaagctagggagaccaggagcccaccaggaggaacgagcaactccagacgcgccgccttaagagctgtaacactcaccacgaaggtctgcagcttcactcctgagccagcgagatcacgaacccaccagaaggaagaaactccgaacacatctgaacatcagaaggaacaaactctggacacgccacctttaagaactgtaacactcaccgcgagggtccgcggcttcattcttgaagtcagtgagaccaagaacccaccaattccggacacactgggattacaggcgtgagccaccgcacccggcttttttttggggggtggtggggacggagtcttgctctatcgcccaggctggagtgcagtggcaccatctgggttcactgcaatctctgcctcccagattcaagcgatgctcctgcctcagcctcccgactagctgggactataggtatatgccaccacactgggttaatttttgtatttttgtagagacggggtttcaccatattggccaggctggtctcgaactcctgacctcatgatccgccctcctcggcctcccaaagtgctgggattacaggcgtgagtcaccgtgcccggccagtttataggtttagaaactgaaactctggctgtggagctaggaagcagcttgcccaggaggcaaatgcaggcctgattccaaggcccgggcgcggagctgccaagctttatgggtccagagtcactggcaagtcctaataatagtaataatttactgtatgcctcgcctgcatcattctaagtacctttccgatgctgtctcacatacttttgtgggatgggtatcactattgtccttggggtcctcccaaggaggttaaggcataatgggtgaaaagtcttgtctaaggtcctcagctagaaagtggtagaagcaggacttgagcccagatacaaagtccacacacaggcttcaaccactctgccttccaggaagagctggtagtgtttaagagtctagtccagaacactgtctcaacagcatcattagatcagggctcctaatccctagaaccctgtgtaacactgcaaccctggccaggcatagtggttcaagcctgtaattccagcacttttggaggccaaggtgagaggattgcttgagcccaggagttcgagaccagcctaggcaacatagtaagaacctatctttacaaaaaacaaaaaattagccaggcatggtggtgagcacctgtagtcccagctcctggggaggctgaggcgggaagattaattgagcccgggagtttgaggctgcagtgagctatgatcacaccactacactccagcctgggtgacagagtgagaccctgtctccaaatatataaatgctcccctgcctccctgtggggatagatagggtaagagaacccactcagaaagaaaggttaagatggcctgggtggctgtggtaccccaggagactaaaaaaagttacggtgagaaatgcttggactgcaactcttggtaaaatctgatgctggcaggtgggcattttggaaaataagtccttggggtgattctcctagagatgggcctagcttgacaacaggtaacagagctgtgacgtcagctgagctctggcggttctcacactgcaggattccaactacaaacctagaccggggaggaacaggctcagaagtaggttttcgccgggtgcagtggctcatgcttgtaatcctagcactttgggaggccgaggtgggtggatcacaaggtcaggagttcgagaccagcctggccaagaaggtgaaaccctgtctctactaaaaatacaaaaattagctattcaggaggccaaggcaggggaattgcttgaacctggatggcagaggttgcagtgagctgagttcatgccactgcactccagcctgggcgacagaatgagactccgtctcaaaaaaaaaaaaaaaaaaaaaaaggttttcaagccaagtctcagaaggcacaggaggtggttgctgtagcaatcatcttttattttatttatttgagacagagtctcgctctgtcgcccaggccggagtgcagtggcaggatctcagctcctgacctcataatccgcctgcctcgccctcccaaagtggtgggattacagggattaccgtgcctggccagcagtcatcttttacaatgaacaaatagggctgggcgcggtggctcacatctgtaatcctagcactttgggagatgggcagatcacgaggtcaggagaccagcctggccaacatggtgaaacctcgtctctactaaaaatacaaaaattagctgggtgtggtgatgcacgcctgtaatcctagctactcaggaggttgaggcaggagaatcgcttgaacccgggaggtggaggtttcagtgagctgagattgcaccactgcactccagcctgggcgacagacagaccaagactccatctcaaaaaaaaaataaataaataaataaaaataagtcaggcacagtggctcacgcatgcctgtaatcacagccctgtgggagggtgaggcatgaggatcgcttgaggccaggggtttgagactagcttgggcaacatagtgagaccctatctctacaaaaagtaaaatgaacaaataaatatagcaactacatatcagaacttggaggcacttattagctattagtcctgagtacttgtaaacactgaatagaagctagccaaatttttaattctaataatagctaatactgattactgaaggctatgtgcaaggcactgttccaagtgttgttttttttttttttgtattaactcattaaatcctcacaatcaccc

SEQ ID NO: 172980 - DNA, 623 bp, Homo sapiens
  Payload ID: 13994
  Gene Symbol: RABL2A
  Gene Name: RAB, member of RAS oncogene family-like 2A
  ENST ID: ENST00000376439
  CDS Start-End: 68-565
actcggaaccgcactgacaataccctcccctcccttgggctggacccctctctacagctaggagccaatggcagaagacaaaaccaaaccgagtgagttggaccaagggaagtatgatgctgatgacaacgtgaagatcatctgcctgggagacagcgcagtgggcaaatccaaactcatggagagatttctcatggatggctttcagccacagcagctgtccacgtacgccctgaccctgtacaagcacacagccacggtagatggcaagaccatccttgtggcagacataaacgtgacccaaaaaagcttcaattttgccaagaagttctccctgcccctgtatttcgtctcggctgctgatggtaccaatgttgtgaagctcttcaatgatgcaattcgattagctgtgtcttacaaacagaactcccaggacttcatggatgagatttttcaggagctcgagaacttcagcttggagcaggaagaggaggacgtgccagaccaggaacagagcagcagcatcgagaccccatcagaggaggtggcctctccccacagctgaggggctggggctaggggaatagtttggaccttgtgcctcctgtgggaggctgaggact

SEQ ID NO: 172981 - DNA, 1118 bp, Homo sapiens
  Payload ID: 13994
  Gene Symbol: RABL2A
  Gene Name: RAB, member of RAS oncogene family-like 2A
  Uniprot ID: Q9UBK7
  ENST ID: ENST00000393165
  CDS Start-End: 211-900
ctgcgaggacgcggggcgagccggaagtggagtgcgctgcggtgcgagctgggccggcggggtggttcgagagcgcgcagagtccagactggcggcagggcccgaggggccgacccgcagcgtccctggtctctccagccctcactcggaaccgcactgacaataccctcccctcccttgggctggacccctctctacagctaggagccaatggcagaagacaaaaccaaaccgagtgagttggaccaagggaagtatgatgctgatgacaacgtgaagatcatctgcctgggagacagcgcagtgggcaaatccaaactcatggagagatttctcatggatggctttcagccacagcagctgtccacgtacgccctgaccctgtacaagcacacagccacggtagatggcaagaccatccttgtggacttttgggacacggcaggccaggagcggttccagagcatgcatgcctcctactaccacaaggcccatgcctgcatcatggtgtttgatatacagaggaaagtcacctataggaacctgagcacctggtatacagagcttcgggagttcaggccagagatcccatgcatcgtggtggccaataaaattgatgcagacataaacgtgacccaaaaaagcttcaattttgccaagaagttctccctgcccctgtatttcgtctcggctgctgatggtaccaatgttgtgaagctcttcaatgatgcaattcgattagctgtgtcttacaaacagaactcccaggacttcatggatgagatttttcaggagctcgagaacttcagcttggagcaggaagaggaggacgtgccagaccaggaacagagcagcagcatcgagaccccatcagaggaggtggcctctccccacagctgaggggctggggctaggggaatagtttggaccttgtgcctcctgtgggaggctgaggactgcaagaggagagctagcagatatgcctgttcacccctctctggtacttgtggcttgctagtatgtttttatgataatctcgggcattgtttgcattgtgtttattaatagggttttgtttttattgtttccttttttacagtaaaggctgaatgacataa

SEQ ID NO: 172982 - DNA, 1052 bp, Homo sapiens
  Payload ID: 13994
  Gene Symbol: RABL2A
  Gene Name: RAB, member of RAS oncogene family-like 2A
  Uniprot ID: Q9UBK7
  ENST ID: ENST00000393166
  CDS Start-End: 148-834
ggttcgagagcgcgcagagtccagactggcggcagggcccgaggggccgacccgcagcgtccctggtctctccagccctcactcggaaccgcactgacaataccctcccctcccttgggctggacccctctctacagctaggagccaatggcagaagacaaaaccaaaccgagtgagttggaccaagggaagtatgatgctgatgacaacgtgaagatcatctgcctgggagacagcgcagtgggcaaatccaaactcatggagagatttctcatggatggctttcagccacagcagctgtccacgtacgccctgaccctgtacaagcacacagccacggtagatggcaagaccatccttgtggacttttgggacacggcaggccaggagcggttccagagcatgcatgcctcctactaccacaaggcccatgcctgcatcatggtgtttgatatacagaggaaagtcacctataggaacctgagcacctggtatacagagcttcgggagttcaggccagagatcccatgcatcgtggtggccaataaaattgatgacataaacgtgacccaaaaaagcttcaattttgccaagaagttctccctgcccctgtatttcgtctcggctgctgatggtaccaatgttgtgaagctcttcaatgatgcaattcgattagctgtgtcttacaaacagaactcccaggacttcatggatgagatttttcaggagctcgagaacttcagcttggagcaggaagaggaggacgtgccagaccaggaacagagcagcagcatcgagaccccatcagaggaggtggcctctccccacagctgaggggctggggctaggggaatagtttggaccttgtgcctcctgtgggaggctgaggactgcaagaggagagctagcagatatgcctgttcacccctctctggtacttgtggcttgctagtatgtttttatgataatctcgggcattgtttgcattgtgtttattaatagggttttgtttttattgtttccttttttacagtaaaggctgaatgacataa

SEQ ID NO: 172983 - DNA, 2179 bp, Homo sapiens
  Payload ID: 13994
  Gene Symbol: RABL2A
  Gene Name: RAB, member of RAS oncogene family-like 2A
  Uniprot ID: Q9UBK7
  ENST ID: ENST00000393167
  CDS Start-End: 226-912
gcggttgcgtagcagctgcgaggacgcggggcgagccggaagtggagtgcgctgcggtgcgagctgggccggcggggtggttcgagagcgcgcagagtccagactggcggcagggcccgaggggccgacccgcagcgtccctggtctctccagccctcactcggaaccgcactgacaataccctcccctcccttgggctggacccctctctacagctaggagccaatggcagaagacaaaaccaaaccgagtgagttggaccaagggaagtatgatgctgatgacaacgtgaagatcatctgcctgggagacagcgcagtgggcaaatccaaactcatggagagatttctcatggatggctttcagccacagcagctgtccacgtacgccctgaccctgtacaagcacacagccacggtagatggcaagaccatccttgtggacttttgggacacggcaggccaggagcggttccagagcatgcatgcctcctactaccacaaggcccatgcctgcatcatggtgtttgatatacagaggaaagtcacctataggaacctgagcacctggtatacagagcttcgggagttcaggccagagatcccatgcatcgtggtggccaataaaattgatgacataaacgtgacccaaaaaagcttcaattttgccaagaagttctccctgcccctgtatttcgtctcggctgctgatggtaccaatgttgtgaagctcttcaatgatgcaattcgattagctgtgtcttacaaacagaactcccaggacttcatggatgagatttttcaggagctcgagaacttcagcttggagcaggaagaggaggacgtgccagaccaggaacagagcagcagcatcgagaccccatcagaggaggtggcctctccccacagctgaggggctggggctaggggtgggtggagcccttttaaaatacccttcccttcaacaactctccagctctgaatggagaaactctctaggccatcccctcttctacctcctgcaacccacccatcctattagcctcccacattcaaggcccgtgatacagggatgaggtcagcaccagcaaactctggactggtggaagaattccccaccagatctccttgaagcagaattagggatcagcatcattaacaccttccccaccccctccccccaggcagacagtgaagagaatcagaaaacatgattatgtgtcactttaatacaggaaatttaggtgttttttggtgtttttgtttttgttttctttccaaagctcacctcggggacaattccttgggcttctcctgaggtaatgattacccccccacccacagctgagtctgtgaggccccatcctttccctacgttttctcccatcttttttcctcttcaatctcccagtcatctggtttgtttgtttctttgttcgtcctgagacggagtctcgctctgtcgccaggctggagtgcagtggcgcagtctcggctcgctgcaacctctgactccctggttcaaacgattctcctgcctcagcctcccgagtggctggcatcaccacgcccagctaatttttgtatttttagtagagacggggtttcaccatgttgcccaggatggtctcgatctcctcacctcgtgatccgcccgcctcggcctcccaaagtgctgggattacaggcatgagccaccgcgcccggccccaatcatctgtttttaaacaatcgtttttgagcagatagctattcattccagatttccgtgtacccactctgtttcaggagctcttctaggtaaagctgagatcacaggaacagcaggtgacaggcctagctatagttaggaatacacaagcggtaaaatcgagtccttacagccataccacaaggtacgtccatttggactacaagaagagcttcctttaaagttcctatttcagcataaagaggctgtcctttttttttaggaatagtttggaccttgtgcctcctgtgggaggctgaggactgcaagaggagagctagcagatatgcctgttcacccctctctggtacttgtggcttgctagtatgtttttatgataatctcgggcattgtttgcattgtgtttattaatagggttttgtttttattgtttccttttttacagtaaaggctgaatgacataaacatt

SEQ ID NO: 172984 - DNA, 1979 bp, Homo sapiens
  Payload ID: 13994
  Gene Symbol: RABL2A
  Gene Name: RAB, member of RAS oncogene family-like 2A
  ENST ID: ENST00000409842
  CDS Start-End: 219-716
gcagctgcgaggacgcggggcgagccggaagtggagtgcgctgcggtgcgagctgggccggcggggtggttcgagagcgcgcagagtccagactggcggcagggcccgaggggccgacccgcagcgtccctggtctctccagccctcactcggaaccgcacacagtgacaataccctcccctcccttgggctggacccctctctacagctaggagccaatggcagaagacaaaaccaaaccgagtgagttggaccaagggaagtatgatgctgatgacaacgtgaagatcatctgcctgggagacagcgcagtgggcaaatccaaactcatggagagatttctcatggatggctttcagccacagcagctgtccacgtacgccctgaccctgtacaagcacacagccacggtagatggcaagaccatccttgtggcagacataaacgtgacccaaaaaagcttcaattttgccaagaagttctccctgcccctgtatttcgtctcggctgctgatggtaccaatgttgtgaagctcttcaatgatgcaattcgattagctgtgtcttacaaacagaactcccaggacttcatggatgagatttttcaggagctcgagaacttcagcttggagcaggaagaggaggacgtgccagaccaggaacagagcagcagcatcgagaccccatcagaggaggtggcctctccccacagctgaggggctggggctaggggtgggtggagcccttttaaaatacccttcccttcaacaactctccagctctgaatggagaaactctctaggccatcccctcttctacctcctgcaacccacccatcctattagcctcccacattcaaggcccgtgatacagggatgaggtcagcaccagcaaactctggactggtggaagaattccccaccagatctccttgaagcagaattagggatcagcatcattaacaccttccccaccccctccccccaggcagacagtgaagagaatcagaaaacatgattatgtgtcactttaatacaggaaatttaggtgttttttggtgtttttgtttttgttttctttccaaagctcacctcggggacaattccttgggcttctcctgaggtaatgattacccccccacccacagctgagtctgtgaggccccatcctttccctacgttttctcccatcttttttcctcttcaatctcccagtcatctggtttgtttgtttctttgttcgtcctgagacggagtctcgctctgtcgccaggctggagtgcagtggcgcagtctcggctcgctgcaacctctgactccctggttcaaacgattctcctgcctcagcctcccgagtggctggcatcaccacgcccagctaatttttgtatttttagtagagacggggtttcaccatgttgcccaggatggtctcgatctcctcacctcgtgatccgcccgcctcggcctcccaaagtgctgggattacaggcatgagccaccgcgcccggccccaatcatctgtttttaaacaatcgtttttgagcagatagctattcattccagatttccgtgtacccactctgtttcaggagctcttctaggtaaagctgagatcacaggaacagcaggtgacaggcctagctatagttaggaatacacaagcggtaaaatcgagtccttacagccataccacaaggtacgtccatttggactacaagaagagcttcctttaaagttcctatttcagcataaagaggctgtcctttttttttaggaatagtttggaccttgtgcctcctgtgggaggctgaggactgcaagaggagagctagcagatatgcctgttcacccctctctggtacttgtggcttgctagtatgtttttatgataatctcgggcattgtttgcattgtgtttattaatagggttttgtttttattgtttccttttttacagtaaaggctgaatgacataaa

SEQ ID NO: 172985 - DNA, 2282 bp, Homo sapiens
  Payload ID: 13994
  Gene Symbol: RABL2A
  Gene Name: RAB, member of RAS oncogene family-like 2A
  Uniprot ID: Q9UBK7
  ENST ID: ENST00000409875
  CDS Start-End: 303-1019
cgagagcgcgcagagtccagactggcggcagggcccgaggggccgacccgcagcgtccctggtctctccagccctcactcggaaccgcacggtacaggtgaaagggggcagacccctcatcatgctttccaggcatctgccacttcccaggaattgtctccctggataaacaaggcgaagtccctggctgtgcagaagcagtagctgtgtggtggcacagtcaggaaaactcgggggccctgttgacagtgacaataccctcccctcccttgggctggacccctctctacagctaggagccaatggcagaagacaaaaccaaaccgagtgagttggaccaagggaagtatgatgctgatgacaacgtgaagatcatctgcctgggagacagcgcagtgggcaaatccaaactcatggagagatttctcatggatggctttcagccacagcagctgtccacgtacgccctgaccctgtacaagcacacagccacggtagatggcaagaccatccttgtggacttttgggacacggcaggccaggagcggttccagagcatgcatgcctcctactaccacaaggcccatgcctgcatcatggtgtttgatatacagaggaaagtcacctataggaacctgagcacctggtatacagagcttcgggagttcaggccagagatcccatgcatcgtggtggccaataaaattgatgacataaacgtgacccaaaaaagcttcaattttgccaagaagttctccctgcccctgtatttcgtctcggctgctgatggtaccaatgttgtgaaggtgtggttgactgcagaggtagctagcaagctcttcaatgatgcaattcgattagctgtgtcttacaaacagaactcccaggacttcatggatgagatttttcaggagctcgagaacttcagcttggagcaggaagaggaggacgtgccagaccaggaacagagcagcagcatcgagaccccatcagaggaggtggcctctccccacagctgaggggctggggctaggggtgggtggagcccttttaaaatacccttcccttcaacaactctccagctctgaatggagaaactctctaggccatcccctcttctacctcctgcaacccacccatcctattagcctcccacattcaaggcccgtgatacagggatgaggtcagcaccagcaaactctggactggtggaagaattccccaccagatctccttgaagcagaattagggatcagcatcattaacaccttccccaccccctccccccaggcagacagtgaagagaatcagaaaacatgattatgtgtcactttaatacaggaaatttaggtgttttttggtgtttttgtttttgttttctttccaaagctcacctcggggacaattccttgggcttctcctgaggtaatgattacccccccacccacagctgagtctgtgaggccccatcctttccctacgttttctcccatcttttttcctcttcaatctcccagtcatctggtttgtttgtttctttgttcgtcctgagacggagtctcgctctgtcgccaggctggagtgcagtggcgcagtctcggctcgctgcaacctctgactccctggttcaaacgattctcctgcctcagcctcccgagtggctggcatcaccacgcccagctaatttttgtatttttagtagagacggggtttcaccatgttgcccaggatggtctcgatctcctcacctcgtgatccgcccgcctcggcctcccaaagtgctgggattacaggcatgagccaccgcgcccggccccaatcatctgtttttaaacaatcgtttttgagcagatagctattcattccagatttccgtgtacccactctgtttcaggagctcttctaggtaaagctgagatcacaggaacagcaggtgacaggcctagctatagttaggaatacacaagcggtaaaatcgagtccttacagccataccacaaggtacgtccatttggactacaagaagagcttcctttaaagttcctatttcagcataaagaggctgtcctttttttttaggaatagtttggaccttgtgcctcctgtgggaggctgaggactgcaagaggagagctagcagatatgcctgttcacccctctctggtacttgtggcttgctagtatgtttttatgataatctcgggcattgtttgcattgtgtttattaatagggttttgtttttattgtttccttttttacagtaaaggctgaatgacataaa

SEQ ID NO: 172986 - DNA, 556 bp, Homo sapiens
  Payload ID: 13994
  Gene Symbol: RABL2A
  Gene Name: RAB, member of RAS oncogene family-like 2A
  ENST ID: ENST00000413545
  CDS Start-End: 215-556
ctgcgaggacgcggggcgagccggaagtggagtgcgctgcggtgcgagctgggccggcggggtggttcgagagcgcgcagagtccagactggcggcagggcccgaggggccgacccgcagcgtccctggtctctccagccctcactcggaaccgcacacagtgacaataccctcccctcccttgggctggacccctctctacagctaggagccaatggcagaagacaaaaccaaaccgagtgagttggaccaagggaagtatgatgctgatgacaacgtgaagatcatctgcctgggagacagcgcagtgggcaaatccaaactcatggagagatttctcatggatggctttcagccacagcagctgtccacgtacgccctgaccctgtacaagcacacagccacggtagatggcaagaccatccttgtggacttttgggacacggcaggccaggagcggttccagagcatgcatgcctcctactaccacaaggcccatgcctgcatcatggtgtttgatatacagaggaaagtcacctataggaacctgagcacc

SEQ ID NO: 172987 - DNA, 2041 bp, Homo sapiens
  Payload ID: 13994
  Gene Symbol: RABL2A
  Gene Name: RAB, member of RAS oncogene family-like 2A
  ENST ID: ENST00000450954
  CDS Start-End: 195-500
ccggaagtggagtgcgctgcggtgcgagctgggccggcggggtggttcgagagcgcgcagagtccagactggcggcagggcccgaggggccgacccgcagcgtccctggtctctccagccctcactcggaaccgcacacagtgacaataccctcccctcccttgggctggacccctctctacagctaggagccaatggcagaagacaaaaccaaaccgagtgagttggaccaagggaagtatgatgctgatgacaacgtgaagatcatctgcctgggagacagcgcagtgggcaaatccaaactcatggagagatttctcatggatggctttcagccacagcagctgtccacgtacgccctgaccctgtacaagcacacagccacggtagatggcaagaccatccttgtggacttttgggacacggcaggccaggagcggttccagagcatgcatgcctcctactaccacaaggcccatgcctgcatcatgcagacataaacgtgacccaaaaaagcttcaattttgccaagaagttctccctgcccctgtatttcgtctcggctgctgatggtaccaatgttgtgaaggtgtggttgactgcagaggtagctagcaagctcttcaatgatgcaattcgattagctgtgtcttacaaacagaactcccaggacttcatggatgagatttttcaggagctcgagaacttcagcttggagcaggaagaggaggacgtgccagaccaggaacagagcagcagcatcgagaccccatcagaggaggtggcctctccccacagctgaggggctggggctaggggtgggtggagcccttttaaaatacccttcccttcaacaactctccagctctgaatggagaaactctctaggccatcccctcttctacctcctgcaacccacccatcctattagcctcccacattcaaggcccgtgatacagggatgaggtcagcaccagcaaactctggactggtggaagaattccccaccagatctccttgaagcagaattagggatcagcatcattaacaccttccccaccccctccccccaggcagacagtgaagagaatcagaaaacatgattatgtgtcactttaatacaggaaatttaggtgttttttggtgtttttgtttttgttttctttccaaagctcacctcggggacaattccttgggcttctcctgaggtaatgattacccccccacccacagctgagtctgtgaggccccatcctttccctacgttttctcccatcttttttcctcttcaatctcccagtcatctggtttgtttgtttctttgttcgtcctgagacggagtctcgctctgtcgccaggctggagtgcagtggcgcagtctcggctcgctgcaacctctgactccctggttcaaacgattctcctgcctcagcctcccgagtggctggcatcaccacgcccagctaatttttgtatttttagtagagacggggtttcaccatgttgcccaggatggtctcgatctcctcacctcgtgatccgcccgcctcggcctcccaaagtgctgggattacaggcatgagccaccgcgcccggccccaatcatctgtttttaaacaatcgtttttgagcagatagctattcattccagatttccgtgtacccactctgtttcaggagctcttctaggtaaagctgagatcacaggaacagcaggtgacaggcctagctatagttaggaatacacaagcggtaaaatcgagtccttacagccataccacaaggtacgtccatttggactacaagaagagcttcctttaaagttcctatttcagcataaagaggctgtcctttttttttaggaatagtttggaccttgtgcctcctgtgggaggctgaggactgcaagaggagagctagcagatatgcctgttcacccctctctggtacttgtggcttgctagtatgtttttatgataatctcgggcattgtttgcattgtgtttattaatagggttttgtttttattgtttcctttttt

SEQ ID NO: 172988 - DNA, 1944 bp, Homo sapiens
  Payload ID: 13994
  Gene Symbol: RABL2A
  Gene Name: RAB, member of RAS oncogene family-like 2A
  ENST ID: ENST00000452831
  CDS Start-End: 172-336
cggtgcgagctgggccggcggggtggttcgagagcgcgcagagtccagactggcggcagggcccgaggggccgacccgcagcgtccctggtctctccagccctcactcggaaccgcactgacaataccctcccctcccttgggctggacccctctctacagctaggagccaatggcagaagacaaaaccaaaccgagtgagttggaccaagggaagtatgatgctgatgacaacgtgaagatcatctgcctgggagacagcgcagtgggcaaatccaaactcatggagagatttctcatggatggcttccacagcagctgtccacgtacgccctgaccctgtacaagcacacagccacggtagatggcaagaccatccttgtggacttttgggacacggcaggccaggagcggttccagagcatgcatgcctcctactaccacaaggcccatgcctgcatcatgcagacataaacgtgacccaaaaaagcttcaattttgccaagaagttctccctgcccctgtatttcgtctcggctgctgatggtaccaatgttgtgaagctcttcaatgatgcaattcgattagctgtgtcttacaaacagaactcccaggacttcatggatgagatttttcaggagctcgagaacttcagcttggagcaggaagaggaggacgtgccagaccaggaacagagcagcagcatcgagaccccatcagaggaggtggcctctccccacagctgaggggctggggctaggggtgggtggagcccttttaaaatacccttcccttcaacaactctccagctctgaatggagaaactctctaggccatcccctcttctacctcctgcaacccacccatcctattagcctcccacattcaaggcccgtgatacagggatgaggtcagcaccagcaaactctggactggtggaagaattccccaccagatctccttgaagcagaattagggatcagcatcattaacaccttccccaccccctccccccaggcagacagtgaagagaatcagaaaacatgattatgtgtcactttaatacaggaaatttaggtgttttttggtgtttttgtttttgttttctttccaaagctcacctcggggacaattccttgggcttctcctgaggtaatgattacccccccacccacagctgagtctgtgaggccccatcctttccctacgttttctcccatcttttttcctcttcaatctcccagtcatctggtttgtttgtttctttgttcgtcctgagacggagtctcgctctgtcgccaggctggagtgcagtggcgcagtctcggctcgctgcaacctctgactccctggttcaaacgattctcctgcctcagcctcccgagtggctggcatcaccacgcccagctaatttttgtatttttagtagagacggggtttcaccatgttgcccaggatggtctcgatctcctcacctcgtgatccgcccgcctcggcctcccaaagtgctgggattacaggcatgagccaccgcgcccggccccaatcatctgtttttaaacaatcgtttttgagcagatagctattcattccagatttccgtgtacccactctgtttcaggagctcttctaggtaaagctgagatcacaggaacagcaggtgacaggcctagctatagttaggaatacacaagcggtaaaatcgagtccttacagccataccacaaggtacgtccatttggactacaagaagagcttcctttaaagttcctatttcagcataaagaggctgtcctttttttttaggaatagtttggaccttgtgcctcctgtgggaggctgaggactgcaagaggagagctagcagatatgcctgttcacccctctctggtacttgtggcttgctagtatgtttttatgataatctcgggcattgtttgcattg

SEQ ID NO: 172989 - DNA, 2140 bp, Homo sapiens
  Payload ID: 13995
  Gene Symbol: RABL2B
  Gene Name: RAB, member of RAS oncogene family-like 2B
  Uniprot ID: Q9UNT1
  ENST ID: ENST00000354869
  CDS Start-End: 179-868
tgcggcgcgagctgggccggcgggcgtggttcgagagcgcgcagagtccagactggcggcagggcccgaggggccgacccgcagcgtccctggtctctccagccctcactcggaaccgcacacagtgacaataccctcccctcccttgggctggacccctctctacagctaggagccaatggcagaagacaaaaccaaaccgagtgagttggaccaagggaagtatgatgctgatgacaacgtgaagatcatctgcctgggagacagcgcagtgggcaaatccaaactcatggagagatttctcatggatggctttcagccacagcagctgtccacgtacgccctgaccctgtacaagcacacagccacggtagatggaaggaccatccttgtggacttttgggacacggcaggccaggagcggttccagagcatgcatgcctcctactaccacaaggcccacgcctgcatcatggtgtttgatgtacagaggaaagtcacctataggaacctgagcacctggtatacagagcttcgggagttcaggccagagatcccatgcatcgtggtggccaataaaattgatgcagacataaacgtgacccaaaaaagcttcaattttgccaagaagttctccctgcccctgtatttcgtctcggctgctgatggtaccaatgttgtgaagctcttcaatgatgcaattcgattagctgtgtcttacaaacagaactcccaggacttcatggatgagatttttcaggagctcgagaacttcagcttggagcaggaagaggaggacgtgccagaccaggaacagagcagcagcatcgagaccccatcagaggaggcggcctctccccacagctgaggggctggggctaggggtgggtggagcccttttaaaatacccttcccttcaacaactctccagctctgaatggagaaactctctaggccatcccctcttctacctcctgcaacccacccatcctattagcctcccacattctaggcccgtgatacagggatgaggtcagcaccagcaaactctggactggtggaagaattccccaccagatctccttgaagcagaagtagggatcagcatcattaacaccttccccaccccctccccgcaggcagacagtgaagagaatcagaaaacatgattatgtgtcactttaatacaggaaatttaggtgttttttggtgtttttgtttttgtttttgttttctttccaaagctcacctcggggacaattccttgggcttctcctgaggtaatgatttacccccccacccacagctgagtctgtgaggccccatcctttccctacgttttctcccatcttttttcctcttcagtctcccagtcatctggtttgtttgtttctttgttcgttctgagacggagtctcgctctgtcgccaggctggagtgcagtggcgcagtctcggctcgctgcaacctctgactccctggttcaaacgattctcctgcctcagcctcccgagtggctggcatcaccacgcccagctaatttttgtatttttagtagagacggggtttcaccatgttgcccaggatggtctcgatctcctcacctcgtgatccgcccgcctcggcctcccaaagtgctgggattacaggcatgagccaccgcgcccggccccaatcatctgtttttaaacaatcgtttttgagcagatagctattcattccagattttcgtgtacccattctgtttcaggagctcttctaggtaaagctgagatcacaggaacagcaggtgacaggcctagctatagttaggaatacacaagccgtaaaatcgagtccttacagccataccacaaggtacgtccatttggactacaagaagagcttcctttaaagttcctatttcagcataaagaggctgtccttttttttgaggaatagtttggaccttgtgcctcctgtgggaggctgaggactgcaagaggagagctagcagatatgcctgttcacccctctctggtacttgtggcttgctagtatgtttttatgataatctcgggcattgtttgcattgtgtttattaatagggttttgtttttgttgtttccttttttacagtaaaggctgaattacataaaca

SEQ ID NO: 172990 - DNA, 2380 bp, Homo sapiens
  Payload ID: 13995
  Gene Symbol: RABL2B
  Gene Name: RAB, member of RAS oncogene family-like 2B
  ENST ID: ENST00000395590
  CDS Start-End: 184-483
ggagtgcgctgcggcgcgagctgggccggcgggcgtggttcgagagcgcgcagagtccagactggcggcagggcccgaggggccgacccgcagcgtccctggtctctccagccctcactcggaaccgcactgacaataccctcccctcccttgggctggacccctctctacagctaggagccaatggcagaagacaaaaccaaaccgagtgagttggaccaagggaagtatgatgctgatgacaacgtgaagatcatctgcctgggagacagcgcagtgggcaaatccaaactcatggagagatttctcatggatggctttcagccacagcagctgtccacgtacgccctgaccctgtacaagcacacagccacggtagatggaaggaccatccttgtggacttttgggacacggcaggccaggagcggttccagagcatgcatgcctcctactaccacaaggcccacgcctgcatcatgtgactgcttcctgcatctgctgcatctccgtgggctcccctcagaccctcttctgaaggcctggggtgtctctcctgccaccatgcctgtgtctgcaggtgcctgccaccagccccagtctgctgcacgggccctggcgagtagaaagcacttgccttctgaccacacggggagctgagggtcagagacggaaccagggctcgaccctccaccttgaaaccttgagatggggatgctcctcattctagccagctcctcctcagctctcaaaacaaggaacagatgctcaggaaaccagacctggacaaaaggcatctgagcctggtgtgaggcagattccagaagtttagttacagacatcctttataaggagtcttcatcgggaattcaagacaacctggtgattcattgaaatttgcctgtgaaagagaatctacatagacttcctgccacctcttgagatgtgacagttgctgaccctcccgccaccacacagggcgagcccctagccctgagcttgaaccgtgttgcttgcacaaatagctgggtgatttagaagtgaggtcagctgtgccagcggttacagggtggtggttgtctgtaactttaatccactgactgttgtactagggcagtttgggctagacactttggaggagctcctgtgaagggcatgaaggctcactgtagcagcagctcagttgtctttcagagttctgcccttaagagctggtttgcagtgctcatccttcttgctgatattttaaaataggtagaaacaggctgggcgcggtgactcatgcctttaatcccagtactttgggaggcctaggcgggcagatcacctgaggtcaggagttcgagaccagcctgaccaacatgttgaaaccccgtctctactagaaatacaaaaattagccaggcgtggtggtgcgcacctgtaatccagctactcaggaggctgagacaggagaatcatttgaagacaggagaatcgtttgaacccaggaggtggaggttgcagtggcagtgagccaagataccgccactgcactctagcctgggcaacagagcaagactccatctcaaaataaatacataaataaataaaaataaaataggtaaaaacaaattataaagtaatacaattatgaactgcaaataataaaacataaaaattactttaaaaaaatttaaagaggccgggcacagtggcttatgcctgtaatcccagaaatttgggaggccgaggcaggaggatcacttgagaccgggagtccaagaccagcctcgttaatataatgagagcttatctctacaaaaaataaacaaaattagccaggcatggtggcatgtgcctgtagttccagctactcaggaggctgaggtaggatcaccggagcccagggggtggaggagcagtaagccaagattctgccactgcactccagcctggctgacagagtaagaccctatctcaaaaaacaaaaagcagaaagaacaaagaagtaaacagaagcttaaaagtaaatcagccaggtgcagtagctcatgcctgtaatcccagtactttgggaggcctaggcaggcagatcactgcaggtcaagagtttgagaccagcctggccaacatgatgaaaccctgtctctactaaaactacaaaaattagccaggcatggtggtgcgcacctgtaatcccagctactccggaggctgagacaagagaatcacttgaacctaggaagtggaggttgcagtggcagtgagccaagatagcgccactgcactccagcctgggcaacagagcaagactccatatatggagatcccttgagatcaagagttcgagaccagcctggccaacatggcaaaaccctgtctctactaaaaataaaaaaa

SEQ ID NO: 172991 - DNA, 1987 bp, Homo sapiens
  Payload ID: 13995
  Gene Symbol: RABL2B
  Gene Name: RAB, member of RAS oncogene family-like 2B
  ENST ID: ENST00000395591
  CDS Start-End: 220-717
gcagctgcgaggacgcgggccgagccggaagtggagtgcgctgcggcgcgagctgggccggcgggcgtggttcgagagcgcgcagagtccagactggcggcagggcccgaggggccgacccgcagcgtccctggtctctccagccctcactcggaaccgcacacagtgacaataccctcccctcccttgggctggacccctctctacagctaggagccaatggcagaagacaaaaccaaaccgagtgagttggaccaagggaagtatgatgctgatgacaacgtgaagatcatctgcctgggagacagcgcagtgggcaaatccaaactcatggagagatttctcatggatggctttcagccacagcagctgtccacgtacgccctgaccctgtacaagcacacagccacggtagatggaaggaccatccttgtggcagacataaacgtgacccaaaaaagcttcaattttgccaagaagttctccctgcccctgtatttcgtctcggctgctgatggtaccaatgttgtgaagctcttcaatgatgcaattcgattagctgtgtcttacaaacagaactcccaggacttcatggatgagatttttcaggagctcgagaacttcagcttggagcaggaagaggaggacgtgccagaccaggaacagagcagcagcatcgagaccccatcagaggaggcggcctctccccacagctgaggggctggggctaggggtgggtggagcccttttaaaatacccttcccttcaacaactctccagctctgaatggagaaactctctaggccatcccctcttctacctcctgcaacccacccatcctattagcctcccacattctaggcccgtgatacagggatgaggtcagcaccagcaaactctggactggtggaagaattccccaccagatctccttgaagcagaagtagggatcagcatcattaacaccttccccaccccctccccgcaggcagacagtgaagagaatcagaaaacatgattatgtgtcactttaatacaggaaatttaggtgttttttggtgtttttgtttttgtttttgttttctttccaaagctcacctcggggacaattccttgggcttctcctgaggtaatgatttacccccccacccacagctgagtctgtgaggccccatcctttccctacgttttctcccatcttttttcctcttcagtctcccagtcatctggtttgtttgtttctttgttcgttctgagacggagtctcgctctgtcgccaggctggagtgcagtggcgcagtctcggctcgctgcaacctctgactccctggttcaaacgattctcctgcctcagcctcccgagtggctggcatcaccacgcccagctaatttttgtatttttagtagagacggggtttcaccatgttgcccaggatggtctcgatctcctcacctcgtgatccgcccgcctcggcctcccaaagtgctgggattacaggcatgagccaccgcgcccggccccaatcatctgtttttaaacaatcgtttttgagcagatagctattcattccagattttcgtgtacccattctgtttcaggagctcttctaggtaaagctgagatcacaggaacagcaggtgacaggcctagctatagttaggaatacacaagccgtaaaatcgagtccttacagccataccacaaggtacgtccatttggactacaagaagagcttcctttaaagttcctatttcagcataaagaggctgtccttttttttgaggaatagtttggaccttgtgcctcctgtgggaggctgaggactgcaagaggagagctagcagatatgcctgttcacccctctctggtacttgtggcttgctagtatgtttttatgataatctcgggcattgtttgcattgtgtttattaatagggttttgtttttgttgtttccttttttacagtaaaggctgaattacataaa

SEQ ID NO: 172992 - DNA, 2341 bp, Homo sapiens
  Payload ID: 13995
  Gene Symbol: RABL2B
  Gene Name: RAB, member of RAS oncogene family-like 2B
  Uniprot ID: Q9UNT1
  ENST ID: ENST00000395593
  CDS Start-End: 355-1071
cgagccggaagtggagtgcgctgcggcgcgagctgggccggcgggcgtggttcgagagcgcgcagagtccagactggcggcagggcccgaggggccgacccgcagcgtccctggtctctccagccctcactcggaaccgcacggtacaggtgaaagggggcagacccctcatcatgctttccaggcatctgccacttcccaggaattgtctccctggataaacaaggcgaagtccctggctgtgcagaagcagtagctgtgtggtggcacagtcaggaaaactcgggggccctgttgacagtgacaataccctcccctcccttgggctggacccctctctacagctaggagccaatggcagaagacaaaaccaaaccgagtgagttggaccaagggaagtatgatgctgatgacaacgtgaagatcatctgcctgggagacagcgcagtgggcaaatccaaactcatggagagatttctcatggatggctttcagccacagcagctgtccacgtacgccctgaccctgtacaagcacacagccacggtagatggaaggaccatccttgtggacttttgggacacggcaggccaggagcggttccagagcatgcatgcctcctactaccacaaggcccacgcctgcatcatggtgtttgatgtacagaggaaagtcacctataggaacctgagcacctggtatacagagcttcgggagttcaggccagagatcccatgcatcgtggtggccaataaaattgatgacataaacgtgacccaaaaaagcttcaattttgccaagaagttctccctgcccctgtatttcgtctcggctgctgatggtaccaatgttgtgaaggtgtggttgactgcagaggtagctagcaagctcttcaatgatgcaattcgattagctgtgtcttacaaacagaactcccaggacttcatggatgagatttttcaggagctcgagaacttcagcttggagcaggaagaggaggacgtgccagaccaggaacagagcagcagcatcgagaccccatcagaggaggcggcctctccccacagctgaggggctggggctaggggtgggtggagcccttttaaaatacccttcccttcaacaactctccagctctgaatggagaaactctctaggccatcccctcttctacctcctgcaacccacccatcctattagcctcccacattctaggcccgtgatacagggatgaggtcagcaccagcaaactctggactggtggaagaattccccaccagatctccttgaagcagaagtagggatcagcatcattaacaccttccccaccccctccccgcaggcagacagtgaagagaatcagaaaacatgattatgtgtcactttaatacaggaaatttaggtgttttttggtgtttttgtttttgtttttgttttctttccaaagctcacctcggggacaattccttgggcttctcctgaggtaatgatttacccccccacccacagctgagtctgtgaggccccatcctttccctacgttttctcccatcttttttcctcttcagtctcccagtcatctggtttgtttgtttctttgttcgttctgagacggagtctcgctctgtcgccaggctggagtgcagtggcgcagtctcggctcgctgcaacctctgactccctggttcaaacgattctcctgcctcagcctcccgagtggctggcatcaccacgcccagctaatttttgtatttttagtagagacggggtttcaccatgttgcccaggatggtctcgatctcctcacctcgtgatccgcccgcctcggcctcccaaagtgctgggattacaggcatgagccaccgcgcccggccccaatcatctgtttttaaacaatcgtttttgagcagatagctattcattccagattttcgtgtacccattctgtttcaggagctcttctaggtaaagctgagatcacaggaacagcaggtgacaggcctagctatagttaggaatacacaagccgtaaaatcgagtccttacagccataccacaaggtacgtccatttggactacaagaagagcttcctttaaagttcctatttcagcataaagaggctgtccttttttttgaggaatagtttggaccttgtgcctcctgtgggaggctgaggactgcaagaggagagctagcagatatgcctgttcacccctctctggtacttgtggcttgctagtatgtttttatgataatctcgggcattgtttgcattgtgtttattaatagggttttgtttttgttgtttccttttttacagtaaaggctgaattacataaa

SEQ ID NO: 172993 - DNA, 2428 bp, Homo sapiens
  Payload ID: 13995
  Gene Symbol: RABL2B
  Gene Name: RAB, member of RAS oncogene family-like 2B
  Uniprot ID: Q9UNT1
  ENST ID: ENST00000395595
  CDS Start-End: 469-1158
agcagctgcgaggacgcgggccgagccggaagtggagtgcgctgcggcgcgagctgggccggcgggcgtggttcgagagcgcgcagagtccagactggcggcagggcccgaggggccgacccgcagcgtccctggtctctccagccctcactcggaaccgcacatggcaaggacacggacaagcaagtcttcgcccgtaagcggtggctcacgcctatagtccagggatgccgaggagggaggatcgcttgagtccaggagttggaggctgcagtgagccgtgatcgcgccaccgcactccagcctgggcgacagagtgagaccctatctctaaacaaaagaaagaacgtcttcaagcatggagccatgaagctggatttggctttctgtcgctctctctacagggtacagacagtgacaataccctcccctcccttgggctggacccctctctacagctaggagccaatggcagaagacaaaaccaaaccgagtgagttggaccaagggaagtatgatgctgatgacaacgtgaagatcatctgcctgggagacagcgcagtgggcaaatccaaactcatggagagatttctcatggatggctttcagccacagcagctgtccacgtacgccctgaccctgtacaagcacacagccacggtagatggaaggaccatccttgtggacttttgggacacggcaggccaggagcggttccagagcatgcatgcctcctactaccacaaggcccacgcctgcatcatggtgtttgatgtacagaggaaagtcacctataggaacctgagcacctggtatacagagcttcgggagttcaggccagagatcccatgcatcgtggtggccaataaaattgatgcagacataaacgtgacccaaaaaagcttcaattttgccaagaagttctccctgcccctgtatttcgtctcggctgctgatggtaccaatgttgtgaagctcttcaatgatgcaattcgattagctgtgtcttacaaacagaactcccaggacttcatggatgagatttttcaggagctcgagaacttcagcttggagcaggaagaggaggacgtgccagaccaggaacagagcagcagcatcgagaccccatcagaggaggcggcctctccccacagctgaggggctggggctaggggtgggtggagcccttttaaaatacccttcccttcaacaactctccagctctgaatggagaaactctctaggccatcccctcttctacctcctgcaacccacccatcctattagcctcccacattctaggcccgtgatacagggatgaggtcagcaccagcaaactctggactggtggaagaattccccaccagatctccttgaagcagaagtagggatcagcatcattaacaccttccccaccccctccccgcaggcagacagtgaagagaatcagaaaacatgattatgtgtcactttaatacaggaaatttaggtgttttttggtgtttttgtttttgtttttgttttctttccaaagctcacctcggggacaattccttgggcttctcctgaggtaatgatttacccccccacccacagctgagtctgtgaggccccatcctttccctacgttttctcccatcttttttcctcttcagtctcccagtcatctggtttgtttgtttctttgttcgttctgagacggagtctcgctctgtcgccaggctggagtgcagtggcgcagtctcggctcgctgcaacctctgactccctggttcaaacgattctcctgcctcagcctcccgagtggctggcatcaccacgcccagctaatttttgtatttttagtagagacggggtttcaccatgttgcccaggatggtctcgatctcctcacctcgtgatccgcccgcctcggcctcccaaagtgctgggattacaggcatgagccaccgcgcccggccccaatcatctgtttttaaacaatcgtttttgagcagatagctattcattccagattttcgtgtacccattctgtttcaggagctcttctaggtaaagctgagatcacaggaacagcaggtgacaggcctagctatagttaggaatacacaagccgtaaaatcgagtccttacagccataccacaaggtacgtccatttggactacaagaagagcttcctttaaagttcctatttcagcataaagaggctgtccttttttttgaggaatagtttggaccttgtgcctcctgtgggaggctgaggactgcaagaggagagctagcagatatgcctgttcacccctctctggtacttgtggcttgctagtatgtttttatgataatctcgggcattgtttgcattgtgtttattaatagggttttgtttttgttgtttccttttttacagtaaaggctgaattacataaa

SEQ ID NO: 172994 - DNA, 2169 bp, Homo sapiens
  Payload ID: 13995
  Gene Symbol: RABL2B
  Gene Name: RAB, member of RAS oncogene family-like 2B
  Uniprot ID: Q9UNT1
  ENST ID: ENST00000395598
  CDS Start-End: 213-899
gctgcgaggacgcgggccgagccggaagtggagtgcgctgcggcgcgagctgggccggcgggcgtggttcgagagcgcgcagagtccagactggcggcagggcccgaggggccgacccgcagcgtccctggtctctccagccctcactcggaaccgcactgacaataccctcccctcccttgggctggacccctctctacagctaggagccaatggcagaagacaaaaccaaaccgagtgagttggaccaagggaagtatgatgctgatgacaacgtgaagatcatctgcctgggagacagcgcagtgggcaaatccaaactcatggagagatttctcatggatggctttcagccacagcagctgtccacgtacgccctgaccctgtacaagcacacagccacggtagatggaaggaccatccttgtggacttttgggacacggcaggccaggagcggttccagagcatgcatgcctcctactaccacaaggcccacgcctgcatcatggtgtttgatgtacagaggaaagtcacctataggaacctgagcacctggtatacagagcttcgggagttcaggccagagatcccatgcatcgtggtggccaataaaattgatgacataaacgtgacccaaaaaagcttcaattttgccaagaagttctccctgcccctgtatttcgtctcggctgctgatggtaccaatgttgtgaagctcttcaatgatgcaattcgattagctgtgtcttacaaacagaactcccaggacttcatggatgagatttttcaggagctcgagaacttcagcttggagcaggaagaggaggacgtgccagaccaggaacagagcagcagcatcgagaccccatcagaggaggcggcctctccccacagctgaggggctggggctaggggtgggtggagcccttttaaaatacccttcccttcaacaactctccagctctgaatggagaaactctctaggccatcccctcttctacctcctgcaacccacccatcctattagcctcccacattctaggcccgtgatacagggatgaggtcagcaccagcaaactctggactggtggaagaattccccaccagatctccttgaagcagaagtagggatcagcatcattaacaccttccccaccccctccccgcaggcagacagtgaagagaatcagaaaacatgattatgtgtcactttaatacaggaaatttaggtgttttttggtgtttttgtttttgtttttgttttctttccaaagctcacctcggggacaattccttgggcttctcctgaggtaatgatttacccccccacccacagctgagtctgtgaggccccatcctttccctacgttttctcccatcttttttcctcttcagtctcccagtcatctggtttgtttgtttctttgttcgttctgagacggagtctcgctctgtcgccaggctggagtgcagtggcgcagtctcggctcgctgcaacctctgactccctggttcaaacgattctcctgcctcagcctcccgagtggctggcatcaccacgcccagctaatttttgtatttttagtagagacggggtttcaccatgttgcccaggatggtctcgatctcctcacctcgtgatccgcccgcctcggcctcccaaagtgctgggattacaggcatgagccaccgcgcccggccccaatcatctgtttttaaacaatcgtttttgagcagatagctattcattccagattttcgtgtacccattctgtttcaggagctcttctaggtaaagctgagatcacaggaacagcaggtgacaggcctagctatagttaggaatacacaagccgtaaaatcgagtccttacagccataccacaaggtacgtccatttggactacaagaagagcttcctttaaagttcctatttcagcataaagaggctgtccttttttttgaggaatagtttggaccttgtgcctcctgtgggaggctgaggactgcaagaggagagctagcagatatgcctgttcacccctctctggtacttgtggcttgctagtatgtttttatgataatctcgggcattgtttgcattgtgtttattaatagggttttgtttttgttgtttccttttttacagtaaaggctgaattacataaa

SEQ ID NO: 172995 - DNA, 2049 bp, Homo sapiens
  Payload ID: 13995
  Gene Symbol: RABL2B
  Gene Name: RAB, member of RAS oncogene family-like 2B
  ENST ID: ENST00000436958
  CDS Start-End: 196-501
ccggaagtggagtgcgctgcggcgcgagctgggccggcgggcgtggttcgagagcgcgcagagtccagactggcggcagggcccgaggggccgacccgcagcgtccctggtctctccagccctcactcggaaccgcacacagtgacaataccctcccctcccttgggctggacccctctctacagctaggagccaatggcagaagacaaaaccaaaccgagtgagttggaccaagggaagtatgatgctgatgacaacgtgaagatcatctgcctgggagacagcgcagtgggcaaatccaaactcatggagagatttctcatggatggctttcagccacagcagctgtccacgtacgccctgaccctgtacaagcacacagccacggtagatggaaggaccatccttgtggacttttgggacacggcaggccaggagcggttccagagcatgcatgcctcctactaccacaaggcccacgcctgcatcatgcagacataaacgtgacccaaaaaagcttcaattttgccaagaagttctccctgcccctgtatttcgtctcggctgctgatggtaccaatgttgtgaaggtgtggttgactgcagaggtagctagcaagctcttcaatgatgcaattcgattagctgtgtcttacaaacagaactcccaggacttcatggatgagatttttcaggagctcgagaacttcagcttggagcaggaagaggaggacgtgccagaccaggaacagagcagcagcatcgagaccccatcagaggaggcggcctctccccacagctgaggggctggggctaggggtgggtggagcccttttaaaatacccttcccttcaacaactctccagctctgaatggagaaactctctaggccatcccctcttctacctcctgcaacccacccatcctattagcctcccacattctaggcccgtgatacagggatgaggtcagcaccagcaaactctggactggtggaagaattccccaccagatctccttgaagcagaagtagggatcagcatcattaacaccttccccaccccctccccgcaggcagacagtgaagagaatcagaaaacatgattatgtgtcactttaatacaggaaatttaggtgttttttggtgtttttgtttttgtttttgttttctttccaaagctcacctcggggacaattccttgggcttctcctgaggtaatgatttacccccccacccacagctgagtctgtgaggccccatcctttccctacgttttctcccatcttttttcctcttcagtctcccagtcatctggtttgtttgtttctttgttcgttctgagacggagtctcgctctgtcgccaggctggagtgcagtggcgcagtctcggctcgctgcaacctctgactccctggttcaaacgattctcctgcctcagcctcccgagtggctggcatcaccacgcccagctaatttttgtatttttagtagagacggggtttcaccatgttgcccaggatggtctcgatctcctcacctcgtgatccgcccgcctcggcctcccaaagtgctgggattacaggcatgagccaccgcgcccggccccaatcatctgtttttaaacaatcgtttttgagcagatagctattcattccagattttcgtgtacccattctgtttcaggagctcttctaggtaaagctgagatcacaggaacagcaggtgacaggcctagctatagttaggaatacacaagccgtaaaatcgagtccttacagccataccacaaggtacgtccatttggactacaagaagagcttcctttaaagttcctatttcagcataaagaggctgtccttttttttgaggaatagtttggaccttgtgcctcctgtgggaggctgaggactgcaagaggagagctagcagatatgcctgttcacccctctctggtacttgtggcttgctagtatgtttttatgataatctcgggcattgtttgcattgtgtttattaatagggttttgtttttgttgtttcctttttt

SEQ ID NO: 172996 - DNA, 1868 bp, Homo sapiens
  Payload ID: 13995
  Gene Symbol: RABL2B
  Gene Name: RAB, member of RAS oncogene family-like 2B
  ENST ID: ENST00000425098
  CDS Start-End: 21-326
ctctctacagctaggagccaatggcagaagacaaaaccaaaccgagtgagttggaccaagggaagtatgatgctgatgacaacgtgaagatcatctgcctgggagacagcgcagtgggcaaatccaaactcatggagagatttctcatggatggctttcagccacagcagctgtccacgtacgccctgaccctgtacaagcacacagccacggtagatggaaggaccatccttgtggacttttgggacacggcaggccaggagcggttccagagcatgcatgcctcctactaccacaaggcccacgcctgcatcatgcagacataaacgtgacccaaaaaagcttcaattttgccaagaagttctccctgcccctgtatttcgtctcggctgctgatggtaccaatgttgtgaagctcttcaatgatgcaattcgattagctgtgtcttacaaacagaactcccaggacttcatggatgagatttttcaggagctcgagaacttcagcttggagcaggaagaggaggacgtgccagaccaggaacagagcagcagcatcgagaccccatcagaggaggcggcctctccccacagctgaggggctggggctaggggtgggtggagcccttttaaaatacccttcccttcaacaactctccagctctgaatggagaaactctctaggccatcccctcttctacctcctgcaacccacccatcctattagcctcccacattctaggcccgtgatacagggatgaggtcagcaccagcaaactctggactggtggaagaattccccaccagatctccttgaagcagaagtagggatcagcatcattaacaccttccccaccccctccccgcaggcagacagtgaagagaatcagaaaacatgattatgtgtcactttaatacaggaaatttaggtgttttttggtgtttttgtttttgtttttgttttctttccaaagctcacctcggggacaattccttgggcttctcctgaggtaatgatttacccccccacccacagctgagtctgtgaggccccatcctttccctacgttttctcccatcttttttcctcttcagtctcccagtcatctggtttgtttgtttctttgttcgttctgagacggagtctcgctctgtcgccaggctggagtgcagtggcgcagtctcggctcgctgcaacctctgactccctggttcaaacgattctcctgcctcagcctcccgagtggctggcatcaccacgcccagctaatttttgtatttttagtagagacggggtttcaccatgttgcccaggatggtctcgatctcctcacctcgtgatccgcccgcctcggcctcccaaagtgctgggattacaggcatgagccaccgcgcccggccccaatcatctgtttttaaacaatcgtttttgagcagatagctattcattccagattttcgtgtacccattctgtttcaggagctcttctaggtaaagctgagatcacaggaacagcaggtgacaggcctagctatagttaggaatacacaagccgtaaaatcgagtccttacagccataccacaaggtacgtccatttggactacaagaagagcttcctttaaagttcctatttcagcataaagaggctgtccttttttttgaggaatagtttggaccttgtgcctcctgtgggaggctgaggactgcaagaggagagctagcagatatgcctgttcacccctctctggtacttgtggcttgctagtatgtttttatgataatctcgggcattgtttgcattgtgtttattaatagggttttgtttttgttgtttccttttttacagtaaaggctgaattacataaa

SEQ ID NO: 172997 - DNA, 1126 bp, Homo sapiens
  Payload ID: 13995
  Gene Symbol: RABL2B
  Gene Name: RAB, member of RAS oncogene family-like 2B
  Uniprot ID: Q9UNT1
  ENST ID: ENST00000435118
  CDS Start-End: 216-902
gcagctgcgaggacgcgggccgagccggaagtggagtgcgctgcggcgcgagctgggccggcgggcgtggttcgagagcgcgcagagtccagactggcggcagggcccgaggggccgacccgcagcgtccctggtctctccagccctcactcggaaccgcactgacaataccctcccctcccttgggctggacccctctctacagctaggagccaatggcagaagacaaaaccaaaccgagtgagttggaccaagggaagtatgatgctgatgacaacgtgaagatcatctgcctgggagacagcgcagtgggcaaatccaaactcatggagagatttctcatggatggctttcagccacagcagctgtccacgtacgccctgaccctgtacaagcacacagccacggtagatggaaggaccatccttgtggacttttgggacacggcaggccaggagcggttccagagcatgcatgcctcctactaccacaaggcccacgcctgcatcatggtgtttgatgtacagaggaaagtcacctataggaacctgagcacctggtatacagagcttcgggagttcaggccagagatcccatgcatcgtggtggccaataaaattgatgacataaacgtgacccaaaaaagcttcaattttgccaagaagttctccctgcccctgtatttcgtctcggctgctgatggtaccaatgttgtgaagctcttcaatgatgcaattcgattagctgtgtcttacaaacagaactcccaggacttcatggatgagatttttcaggagctcgagaacttcagcttggagcaggaagaggaggacgtgccagaccaggaacagagcagcagcatcgagaccccatcagaggaggcggcctctccccacagctgaggggctggggctaggggaatagtttggaccttgtgcctcctgtgggaggctgaggactgcaagaggagagctagcagatatgcctgttcacccctctctggtacttgtggcttgctagtatgtttttatgataatctcgggcattgtttgcattgtgtttattaatagggttttgtttttgttgtttccttttttacagtaaaggctgaattacataaacattg

SEQ ID NO: 172998 - DNA, 391 bp, Homo sapiens
  Payload ID: 13995
  Gene Symbol: RABL2B
  Gene Name: RAB, member of RAS oncogene family-like 2B
  ENST ID: ENST00000413505
  CDS Start-End: 331-391
ggtacaggtgaaagggggcagacccctcatcatgctttccaggcatctgccacttcccaggaattgtctccctggataaacaaggcgaagtccctggctgtgcagaagcagtagctgtgtggtggcacagtcaggaaaactcgggggccctgttggtattttctacccctgacccgtgtgcatacttctgtcgtagctctcaccacagtagactctgctatcattgtgtcttccatcctctgaaccctgtgcaaggtctgctcatggtgaatgcccatgacaataccctcccctcccttgggctggacccctctctacagctaggagccaatggcagaagacaaaaccaaaccgagtgagttggaccaagggaagtatgatgctgatgaca

SEQ ID NO: 172999 - DNA, 561 bp, Homo sapiens
  Payload ID: 13995
  Gene Symbol: RABL2B
  Gene Name: RAB, member of RAS oncogene family-like 2B
  ENST ID: ENST00000468451
  CDS Start-End: 158-277
gggcgtggttcgagagcgcgcagagtccagactggcggcagggcccgaggggccgacccgcagcgtccctggtctctccagccctcactcggaaccgcacacagtgacaataccctcccctcccttgggctggacccctctctacagctaggagccaatggcagaagacaaaaccaaaccgagtgagttggaccaagggaagtatgatgctgatgacaacgtgaagatcatctgcctgggagacagcgcagtgggcaaatccaaacacaacaattagaaaacaaggcagtcttcatccactagcagtatctcaggcaaaaggttgtcccagatacaaagaccatggtggaaacagtgcatctgagggaagactcatggagagatttctcatggatggctttcagccacagcagctgtccacgtacgccctgaccctgtacaagcacacagccacggtagatggaaggaccatccttgtggacttttgggacacggcaggccaggagcggttccagagcatgcatgcctcctactaccacaaggcccacgcctgcatcatgg

SEQ ID NO: 173000 - DNA, 3883 bp, Homo sapiens
  Payload ID: 13996
  Gene Symbol: RABL3
  Gene Name: RAB, member of RAS oncogene family-like 3
  Uniprot ID: Q5HYI8
  ENST ID: ENST00000273375
  CDS Start-End: 31-741
aggcgttaacccagggaaggcagtggcaagatggcgtccctggatcgggtgaaggtactggtgttgggagactcaggtgttgggaaatcttcgttagtccatctcctatgccaaaatcaagtgctgggaaatccatcatggactgtgggctgctcagtggatgtcagagttcatgattacaaagaaggaaccccagaagagaagacctactacatagaattatgggatgttggaggctctgtgggcagtgccagcagcgtgaaaagcacaagagcagtattctacaactccgtaaatggtattattttcgtacacgacttaacaaataagaagtcctcccaaaacttgcgtcgttggtcattggaagctctcaacagggatttggtgccaactggagtcttggtgacaaatggggattatgatcaagaacagtttgctgataaccaaataccactgttggtaatagggactaaactggaccagattcatgaaacaaagcgccatgaagttttaactaggactgctttcctggctgaggatttcaatccagaagaaattaatttggactgcacaaatccacggtacttagctgcaggttcttccaatgctgtcaagctcagtaggttttttgataaggtcatagagaagagatactttttaagagaaggtaatcagattccaggctttcctgatcggaaaagatttggggcaggaacattaaagagccttcattatgactgaattacactcatcctttggaagagtgagcaagcagtggcagtttttcacagctcatcttgctgtgttcaattattaccatcacagccttttaacaaaatcatcttaaaatgctacccttcagccttaccctttaatggaaaaatgaaaggaagtgacaatacgggaggtccaaactttgtccctgttctctgtgttccttacctttctgtccctgtgtatagattatgtaaaagccttgtgtaaatatgagatgttgtcaaaatgatgcagtaaatgagcaatgacagtgtactgcagagaaaatttactcttgcctagaactggagggtttttatgggtctgtaattttcccacactcattgctgaaagcttaattaagtacttcaaaaacgtatctccattgttttaccttcttgaggggaacggtcttgttaaccagccctgagttgtctaccccaaacaatctctgtcattttcaaagatgcaaaatggtgttatttaattgtctccaccattgtcacacacaggaatgcctaataatagcaacccttgtctccctcttctctcctttgcaaatggctcagtgactggaagaggcggactaatagccagagttaaatataaatacaaattaataatacatagagaacagcaataccagaaaaaaagaattctggtaaaatgatgtgaaaaattgacagctccctcactcttaaggttgctgctatatacagtctaggttttctgtttggaaataggtagggtaaaatctaagacctgcacaagggcagtgagagacatttacagcctcctctctatttgtttttttaaggaaaagtcaactcctgaaatgtcccttagctataatcagaaaactaagaatattattctgtgtcaacaatgtatttatggagagaagtaaaaataagttccacagcaacacatttacatgaattatgaactaggattcttggatttcataatcactccaaagctttttggggatggtgtgtgtgtgtgtgtgtgtccgtaattgttcatcattactttttttaacctatctttttgcttgcttaatcttctctgccccagttcttcctgagtatatgaatttgatttctaaaaacaatttattcaacactctatcacccgtattctctctctggctctgctgcaggtctctgcactcctgattttgctccatacttttaaataacaataataaatatacagttttcatttctcatttaaaaaataggtggaaaacaccaaattcactttctgttccattttaattaggtttcagaagtatcttggaaatcaaggtatgctgcaagaggatattaaaataagaatgttagagagtccttttagaaaggcagtcttgggaatttggaaaaggatttttaaagcagctttcatcagctagactgttctccagcctttctttacttcctctttgaaaggacatagccctggtttctttttgacacaaaggaaagctatgcaaatcatgatctgtatgtagaattggtcacaagtatgttgttgcataggctgtacagttgggaagtagaaaccaaatgctacccagagacctaacccaattaagctctttgtatttctccttcaagaaataaatcttccttccttctttcttcctctttcttttaattttaaaaaaattcatcctgatttttttattttctatcttatttaaaaaataaaaataggccaggcgcggtggctcacacctttaatcccaacactttgggaggcgggtcgatcacttgatatcaggagtttgagaccagcctggccaacatagggaaaccctgtctctactaaaaatacaaaaattagccaggcctggtggcacgcgcctgtaatcccagctacttgggaggctgaggcaggagaatcacttgaacctgggaggtggaggttgcagtgagtcaagatcgtgtcactgcactccagcctaggtgacagagtgagactccaactaaaagaaaataaataaataaatatataaatatataaataaataataaaagtaaactattgctgatgactccagggtcaatctggaaaaattaacagtattcctcaactccattactttctgcagccaagcttgattccttgaattatagttttctaagaaaaaatagtttttaataatctaaggtaaatttgttgcaattattagcagcagcataataaggctttttgcgcaaatgaatgttattagctagagttattcaaaaaagaatgaagcacaatttttgctaggacttcttgagaactattcataaaaatgcttttagataataaacaagtataaatgtcaaaatatttttttaaaagtataattggccaggtgctggctcacgcctataatcccagcactctaggagactgaggcaggaggatcacttgagctcgggagtttgaggctgcagtgattcatgattgcaccactgccttccagcagcctgatgacagagtgggactccatctctttacatatgtatatcttactctcttgatgggacaagttggtagaaataaagattttttttttctgttgtgatttcggtgtctgaccaattttctgactcattgtgaaggtgaccagatatgaaggcatatatatgactactcctctgtcccttaggtgtataagacttagctggaatccaactaaagatttgggctggtctctccatcttaacgttgatgggattcaggacacataaccccaaaatattgcaccctgttatttgagaaaactgcagaagcaaggtttctcataccttccccttaccccttctcccctgaagcaggccataaaccctaagtgactgttccctgaagtagatcataaaaccttcattccataggtaccctttatcctcacagatacagagacaccaagaagaatctggacaaataggacttgctaagttctccacagtttattaccattagattatgtccttttgtcctctgattatacttctgcataagactgtacataaaaatacacaagttttcctatttcttttttgtcttcatttctgaagattcctgtcatgtaaaacttacagtaaataaatgtgtgtgcttttctcaataa

SEQ ID NO: 173001 - DNA, 1715 bp, Homo sapiens
  Payload ID: 13996
  Gene Symbol: RABL3
  Gene Name: RAB, member of RAS oncogene family-like 3
  ENST ID: ENST00000485161
  CDS Start-End: 8-169
tggcaagatggcgtccctggatcgggtgaaggtactggtgttgggagactcaggtgttgggaaatcttcgttagtccatctcctatgccaaaatcaagtgctgggaaatccatcatggactgtgggctgctcagtggatgtcagagtattattttcgtacacgacttaacaaataagaagtcctcccaaaacttgcgtcgttggtcattggaagctctcaacagggatttggtgccaactggagtcttggtgacaaatggggattatgatcaagaacagtttgctgataaccaaataccactgttggtaatagggactaaactggaccagattcatgaaacaaagcgccatgaagttttaactaggactgctttcctggctgaggatttcaatccagaagaaattaatttggactgcacaaatccacggtacttagctgcaggttcttccaatgctgtcaagctcagtaggttttttgataaggtcatagagaagagatactttttaagagaaggtaatcagattccaggctttcctgatcggaaaagatttggggcaggaacattaaagagccttcattatgactgaattacactcatcctttggaagagtgagcaagcagtggcagtttttcacagctcatcttgctgtgttcaattattaccatcacagccttttaacaaaatcatcttaaaatgctacccttcagccttaccctttaatggaaaaatgaaaggaagtgacaatacgggaggtccaaactttgtccctgttctctgtgttccttacctttctgtccctgtgtatagattatgtaaaagccttgtgtaaatatgagatgttgtcaaaatgatgcagtaaatgagcaatgacagtgtactgcagagaaaatttactcttgcctagaactggagggtttttatgggtctgtaattttcccacactcattgctgaaagcttaattaagtacttcaaaaacgtatctccattgttttaccttcttgaggggaacggtcttgttaaccagccctgagttgtctaccccaaacaatctctgtcattttcaaagatgcaaaatggtgttatttaattgtctccaccattgtcacacacaggaatgcctaataatagcaacccttgtctccctcttctctcctttgcaaatggctcagtgactggaagaggcggactaatagccagagttaaatataaatacaaattaataatacatagagaacagcaataccagaaaaaaagaattctggtaaaatgatgtgaaaaattgacagctccctcactcttaaggttgctgctatatacagtctaggttttctgtttggaaataggtagggtaaaatctaagacctgcacaagggcagtgagagacatttacagcctcctctctatttgtttttttaaggaaaagtcaactcctgaaatgtcccttagctataatcagaaaactaagaatattattctgtgtcaacaatgtatttatggagagaagtaaaaataagttccacagcaacacatttacatgaattatgaactaggattcttggatttcataatcactccaaagctttttggggatggtgtgtgtgtgtgtgtgtgtccgtaattgttcatcattactttttttaacctatctttttgcttgcttaatcttctctgccccagttcttcctgagtatatgaatttgatttctaaaaac

SEQ ID NO: 173002 - DNA, 833 bp, Homo sapiens
  Payload ID: 13996
  Gene Symbol: RABL3
  Gene Name: RAB, member of RAS oncogene family-like 3
  ENST ID: ENST00000481015
  CDS Start-End: 1-160
ggcgtccctggatcgggtgaaggtactggtgttgggagactcaggtgttgggaaatcttcgttagtccatctcctatgccaaaatcaagtgctgggaaatccatcatggactgtgggctgctcagtggatgtcagagtattattttcgtacacgacttaacaaataagaagtcctcccaaaacttgcgtcgttggtcattggaagctctcaacagggatttggtgccaactggagtcttggtgacaaatgggactgcacaaatccacggtacttagctgcaggttcttccaatgctgtcaagctcagtaggttttttgataaggtcatagagaagagatactttttaagagaaggtaatcagattccaggctttcctgatcggaaaagatttggggcaggaacattaaagagccttcattatgactgaattacactcatcctttggaagagtgagcaagcagtggcagtttttcacagctcatcttgctgtgttcaattattaccatcacagccttttaacaaaatcatcttaaaatgctacccttcagccttaccctttaatggaaaaatgaaaggaagtgacaatacgggaggtccaaactttgtccctgttctctgtgttccttacctttctgtccctgtgtatagattatgtaaaagccttgtgtaaatatgagatgttgtcaaaatgatgcagtaaatgagcaatgacagtgtactgcagagaaaatttactcttgcctagaactggagggtttttatgggtctgtaattttcccacactcattgctgaaagcttaattaagtacttcaaaaacgtatctccattgtt

SEQ ID NO: 173003 - DNA, 2370 bp, Homo sapiens
  Payload ID: 13996
  Gene Symbol: RABL3
  Gene Name: RAB, member of RAS oncogene family-like 3
  ENST ID: ENST00000473654
  CDS Start-End: 487-876
ggcgcagccaagcccgccctacccgaggtcgcacacgggccgctccggggtcaatggttctttggaggaccaagaggaccaaggcaacagggtaattcattaggggaggatagttaagagggagcgaaaggaagaagaaatcatgaaatgcaatgcccggccagggaactccgaacaaggaacagggaacaaggtttaccaaggcgaatcctggaacactcccactacagctgcccccagcgcttcaactaccggcttaaatgaaccacgccccttgcgcgacaaagaaaacgcactattcctgcgaccagctggggaagcaccccgctaccttttaccagaccagccaatgagttcagtgaaaccttcgatcaagacagtcacgctccgagtggccaatgaaattgaaggctctgccctccatgcccaactctgattggcttacaatccaggaacaggcgttaacccagggaaggcagtggcaagatggcgtccctggatcgggtgaaggtactggtgttgggagactcaggtgttgggaaatcttcgttagtccatctcctatgccaaaatcaagtgctgggaaatccatcatggactgtgggctgctcagtggatgtcagagttcatgattacaaagaaggaaccccagaagagaagacctactacatagaattatgggatgttggaggctctgtgggcagtgccagcagcgtgaaaagcacaagagcagtattctacaactccgtaaatggtattattttcgtacacgacttaacaaataagaagtcctcccaaaacttgcgtcgttggtcattggaagctctcaacagggatttggtgccaactggagtcttggtgacaaatggggactaaactggaccagattcatgaaacaaagcgccatgaagttttaactaggactgctttcctggctgaggatttcaatccagaagaaattaatttggactgcacaaatccacggtacttagctgcaggttcttccaatgctgtcaagctcagtaggttttttgataaggtcatagagaagagatactttttaagagaaggtaatcagattccaggctttcctgatcggaaaagatttggggcaggaacattaaagagccttcattatgactgaattacactcatcctttggaagagtgagcaagcagtggcagtttttcacagctcatcttgctgtgttcaattattaccatcacagccttttaacaaaatcatcttaaaatgctacccttcagccttaccctttaatggaaaaatgaaaggaagtgacaatacgggaggtccaaactttgtccctgttctctgtgttccttacctttctgtccctgtgtatagattatgtaaaagccttgtgtaaatatgagatgttgtcaaaatgatgcagtaaatgagcaatgacagtgtactgcagagaaaatttactcttgcctagaactggagggtttttatgggtctgtaattttcccacactcattgctgaaagcttaattaagtacttcaaaaacgtatctccattgttttaccttcttgaggggaacggtcttgttaaccagccctgagttgtctaccccaaacaatctctgtcattttcaaagatgcaaaatggtgttatttaattgtctccaccattgtcacacacaggaatgcctaataatagcaacccttgtctccctcttctctcctttgcaaatggctcagtgactggaagaggcggactaatagccagagttaaatataaatacaaattaataatacatagagaacagcaataccagaaaaaaagaattctggtaaaatgatgtgaaaaattgacagctccctcactcttaaggttgctgctatatacagtctaggttttctgtttggaaataggtagggtaaaatctaagacctgcacaagggcagtgagagacatttacagcctcctctctatttgtttttttaaggaaaagtcaactcctgaaatgtcccttagctataatcagaaaactaagaatattattctgtgtcaacaatgtatttatggagagaagtaaaaataagttccacagcaacacatttacatgaattatgaactaggattcttggatttcataatcactccaaagctttttggggatggtgtgtgtgtgtgtgtgtgtccgtaattgttcatcattactttttttaacctatctttttgcttgcttaatcttctctgccccagttcttcctgagtatatgaatttgatttctaaaaacaatttattcaacactctatcacccgtattctctctctggctctgctgcaggtctctgcactcctgattttgctccatacttttaaataacaataataaa

SEQ ID NO: 173004 - DNA, 760 bp, Homo sapiens
  Payload ID: 13996
  Gene Symbol: RABL3
  Gene Name: RAB, member of RAS oncogene family-like 3
  ENST ID: ENST00000483733
  CDS Start-End: 14-652
aggcagtggcaagatggcgtccctggatcgggtgaaggtactggtgttgggagactcaggtgttgggaaatcttcgttagtccatctcctatgccaaaatcaagtgctgggaaatccatcatggactgtgggctgctcagtggatgtcagagttcatgattacaaagaaggaaccccagaagagaagacctactacatagaattatgggatgttggaggctctgtgggcagtgccagcagcgtgaaaagcacaagagcagtattctacaactccgtaaatggtattattttcgtacacgacttaacaaataagaagtcctcccaaaacttgcgtcgttggtcattggaagctctcaacagggatttggtgccaactggagtcttggtgacaaatggggattatgatcaagaacagtttgctgataaccaaataccactgttggtaatagggactaaactggaccagattcatgaaacaaagcgccatgaagttttaactaggactgctttcctggctgaggatttcaatccagaagaaattaatttggtcatagagaagagatactttttaagagaaggtaatcagattccaggctttcctgatcggaaaagatttggggcaggaacattaaagagccttcattatgactgaattacactcatcctttggaagagtgagcaagcagtggcagtttttcacagctcatcttgctgtgttcaattattaccatcacagccttttaacaaaatcatcttaaaa

SEQ ID NO: 173005 - DNA, 839 bp, Homo sapiens
  Payload ID: 13996
  Gene Symbol: RABL3
  Gene Name: RAB, member of RAS oncogene family-like 3
  ENST ID: ENST00000465022
  CDS Start-End: 4-411
aagatggcgtccctggatcgggtgaaggtactggtgttgggagactcaggtgttgggaaatcttcgttagtccatctcctatgccaaaatcaagtgctgggaaatccatcatggactgtgggctgctcagtggatgtcagagttcatgattacaaagaaggaaccccagaagagaagacctactacatagaattatgggatgttggaggctctgtgggcagtgccagcagcgtgaaaagcacaagagcagtattctacaactccgtaaatggtattattttcgtacacgacttaacaaataagaagtcctcccaaaacttgcgtcgttggtcattggaagctctcaacagggatttggtgccaactggagtcttggtgacaaatgggactgcacaaatccacggtacttagctgcaggttcttccaatgctgtcaagctcagtaggttttttgataaggtcatagagaagagatactttttaagagaaggtaatcagattccaggctttcctgatcggaaaagatttggggcaggaacattaaagagccttcattatgactgaattacactcatcctttggaagagtgagcaagcagtggcagtttttcacagctcatcttgctgtgttcaattattaccatcacagccttttaacaaaatcatcttaaaatgctacccttcagccttaccctttaatggaaaaatgaaaggaagtgacaatacgggaggtccaaactttgtccctgttctctgtgttccttacctttctgtccctgtgtatagattatgtaaaagccttgtgtaaatatgagatgttgtcaaaatgatgcagtaaatg

SEQ ID NO: 173006 - DNA, 3091 bp, Homo sapiens
  Payload ID: 13997
  Gene Symbol: RABL6
  Gene Name: RAB, member RAS oncogene family-like 6
  Uniprot ID: Q3YEC7
  ENST ID: ENST00000311502
  CDS Start-End: 237-2426
gactcctggagagcggtcgcgccggaggccgcgggggccggagcggagcagccgcggctgaggttcccgagtcgccgctcggggctgcgctccgccgccgggaccccggcctctggccgcgccggctccggcctccgggggggccggggccgccgggacatggtgccagtcgcaccccttccccgccgccgctgagctcgccggccgcgcccgggctgggacgtccgagcgggaagatgttttccgccctgaagaagctggtggggtcggaccaggccccgggccgggacaagaacatccccgccgggctgcagtccatgaaccaggcgttgcagaggcgcttcgccaagggggtgcagtacaacatgaagatagtgatccggggagacaggaacacgggcaagacagcgctgtggcaccgcctgcagggccggccgttcgtggaggagtacatccccacacaggagatccaggtcaccagcatccactggagctacaagaccacggatgacatcgtgaaggttgaagtctgggatgtagtagacaaaggaaaatgcaaaaagcgaggcgacggcttaaagatggagaacgacccccaggaggcggagtctgaaatggccctggatgctgagttcctggacgtgtacaagaactgcaacggggtggtcatgatgttcgacattaccaagcagtggaccttcaattacattctccgggagcttccaaaagtgcccacccacgtgccagtgtgcgtgctgggaaactaccgggacatgggcgagcaccgagtcatcctgccggacgacgtgcgtgacttcatcgacaacctggacagacctccaggttcctcctacttccgctatgctgagtcttccatgaagaacagcttcggcctaaagtaccttcataagttcttcaatatcccatttttgcagcttcagagggagacgctgttgcggcagctggagacgaaccagctggacatggacgccacgctggaggagctgtcggtgcagcaggagacggaggaccagaactacggcatcttcctggagatgatggaggctcgcagccgtggccatgcgtccccactggcggccaacgggcagagcccatccccgggctcccagtcaccagtggtgcctgcaggcgctgtgtccacggggagctccagccccggcacaccccagcccgccccacagctgcccctcaatgccgccccaccatcctctgtgccccctgtaccaccctcagaggccctgcccccacctgcgtgcccctcagcccccgccccacggcgcagcatcatctctaggctgtttgggacgtcacctgccaccgaggcagcccctccacctccagagccagtcccggccgcagagggcccagcaacggtccagagtgtggaggactttgttcctgacgaccgcctggaccgcagcttcctggaagacacaacccccgccagggacgagaagaaggtgggggccaaggctgcccagcaggacagcgacagtgatggggaggccctgggcggcaacccgatggtggcagggttccaggacgatgtggacctcgaagaccagccacgtgggagtcccccgctgcctgcaggccccgtccccagtcaagacatcactctttcgagtgaggaggaagcagaagtggcagctcccacaaaaggccctgccccagctccccagcagtgctcagagccagagaccaagtggtcctccataccagcttcgaagccacggagggggacagctcccacgaggaccgcagcacccccctggccaggcggtgtctctgttcgcacaggtccggagaagcgcagcagcaccaggccccctgctgagatggagccggggaagggtgagcaggcctcctcgtcggagagtgaccccgagggacccattgctgcacaaatgctgtccttcgtcatggatgaccccgactttgagagcgagggatcagacacacagcgcagggcggatgactttcccgtgcgagatgacccctccgatgtgactgacgaggatgagggccctgccgagccgcccccaccccccaagctccctctccccgccttcagactgaagaatgactcggacctcttcgggctggggctggaggaggccggacccaaggagagcagtgaggaaggtaaggagggcaaaaccccctctaaggagaagaagaagaagaagaaaaaaggcaaagaggaagaagaaaaagctgccaagaagaagagcaaacacaagaagagcaaggacaaggaggagggcaaggaggagcggcgacggcggcagcagcggcccccgcgcagcagggagaggacggctgccgatgagctggaggctttcctggggggcggggccccgggcggccgccaccctgggggtggcgactacgaggagctctaggccggcgtgggcagtggccgccctggggcggggggcgtgcctgtcactgcctggggaggcatttgcctctgtaccatcgcctttgccgctgccccgtggctgccgtgtgcgcttctgagctggaagaggccgggcattggtggtccccaggctgggccctgcaggtgctgggccttcaggcccagtgtgagcctgctctgcaagaagggaggggacagctggcttcagccaggctcggtggacaccctggccctctcggggcagagccgccagtgtttctcagggatgtgactgaggcccaggagggacctgtgagggtctgtttacagaggctgggcaggggccgcttggctgtggggtgtgcgctgccccggcacctgcttgccctccgcgctcatctggggccgcagcatgcctatggttccgcttccggccgggagccctgaacacgggtgtgcagactcaccctaaagggcggcccaggccccacgctagaaggctggcgagaccgaaggcagcatgtgaggcctctcctgggagtgggggttgtgtttcccacagtggcctcagctgcgcccccgctcaggtgagcccgaaggcaggagccgggaggcactcctcccaaacactccactcagaccataaagcactcctgtttcactctg

SEQ ID NO: 173007 - DNA, 1820 bp, Homo sapiens
  Payload ID: 13997
  Gene Symbol: RABL6
  Gene Name: RAB, member RAS oncogene family-like 6
  Uniprot ID: Q3YEC7
  ENST ID: ENST00000357466
  CDS Start-End: 39-1601
cgccggccgcgcccgggctgggacgtccgagcgggaagatgttttccgccctgaagaagctggtggggtcggaccaggccccgggccgggacaagaacatccccgccgggctgcagtccatgaaccaggcgttgcagaggcgcttcgccaagggggtgcagtacaacatgaagatagtgatccggggagacaggaacacgggcaagacagcgctgtggcaccgcctgcagggccggccgttcgtggaggagtacatccccacacaggagatccaggtcaccagcatccactggagctacaagaccacggatgacatcgtgaaggttgaagtctgggatgtagtagacaaaggaaaatgcaaaaagcgaggcgacggcttaaagatggagaacgacccccaggaggcggagtctgaaatggccctggatgctgagttcctggacgtgtacaagaactgcaacggggtggtcatgatgttcgacattaccaagcagtggaccttcaattacattctccgggagcttccaaaagtgcccacccacgtgccagtgtgcgtgctgggaaactaccgggacatgggcgagcaccgagtcatcctgccggacgacgtgcgtgacttcatcgacaacctggacagacctccaggttcctcctacttccgctatgctgagtcttccatgaagaacagcttcggcctaaagtaccttcataagttcttcaatatcccatttttgcagcttcagagggagacgctgttgcggcagctggagacgaaccagctggacatggacgccacgctggaggagctgtcggtgcagcaggagacggaggaccagaactacggcatcttcctggagatgatggaggctcgcagccgtggccatgcgtccccactggcggccaacgggcagagcccatccccgggctcccagtcaccagtggtgcctgcaggcgctgtgtccacggggagctccagccccggcacaccccagcccgccccacagctgcccctcaatgccgccccaccatcctctgtgccccctgtaccaccctcagaggccctgcccccacctgcgtgcccctcagcccccgccccacggcgcagcatcatctctaggccgccaccctgggggtggcgactacgaggagctctaggccggcgtgggcagtggccgccctggggcggggggcgtgcctgtcactgcctggggaggcatttgcctctgtaccatcgcctttgccgctgccccgtggctgccgtgtgcgcttctgagctggaagaggccgggcattggtggtccccaggctgggccctgcaggtgctgggccttcaggcccagtgtgagcctgctctgcaagaagggaggggacagctggcttcagccaggctcggtggacaccctggccctctcggggcagagccgccagtgtttctcagggatgtgactgaggcccaggagggacctgtgagggtctgtttacagaggctgggcaggggccgcttggctgtggggtgtgcgctgccccggcacctgcttgccctccgcgctcatctggggccgcagcatgcctatggttccgcttccggccgggagccctgaacacgggtgtgcagactcaccctaaagggcggcccaggccccacgctagaaggctggcgagaccgaaggcagcatgtgaggcctctcctgggagtgggggttgtgtttcccacagtggcctcagctgcgcccccgctcaggtgagcccgaaggcaggagccgggaggcactcctcccaaacactccactcagaccataaagcactcctgtttcactctg

SEQ ID NO: 173008 - DNA, 2379 bp, Homo sapiens
  Payload ID: 13997
  Gene Symbol: RABL6
  Gene Name: RAB, member RAS oncogene family-like 6
  Uniprot ID: Q3YEC7
  ENST ID: ENST00000371663
  CDS Start-End: 231-2379
tggagagcggtcgcgccggaggccgcgggggccggagcggagcagccgcggctgaggttcccgagtcgccgctcggggctgcgctccgccgccgggaccccggcctctggccgcgccggctccggcctccgggggggccggggccgccgggacatggtgccagtcgcaccccttccccgccgccgctgagctcgccggccgcgcccgggctgggacgtccgagcgggaagatgttttccgccctgaagaagctggtggggtcggaccaggccccgggccgggacaagaacatccccgccgggctgcagtccatgaaccaggcgttgcagaggcgcttcgccaagggggtgcagtacaacatgaagatagtgatccggggagacaggaacacgggcaagacagcgctgtggcaccgcctgcagggccggccgttcgtggaggagtacatccccacacaggagatccaggtcaccagcatccactggagctacaagaccacggatgacatcgtgaaggttgaagtctgggatgtagtagacaaaggaaaatgcaaaaagcgaggcgacggcttaaagatggagaacgacccccaggaggcggagtctgaaatggccctggatgctgagttcctggacgtgtacaagaactgcaacggggtggtcatgatgttcgacattaccaagcagtggaccttcaattacattctccgggagcttccaaaagtgcccacccacgtgccagtgtgcgtgctgggaaactaccgggacatgggcgagcaccgagtcatcctgccggacgacgtgcgtgacttcatcgacaacctggacagcagacctccaggttcctcctacttccgctatgctgagtcttccatgaagaacagcttcggcctaaagtaccttcataagttcttcaatatcccatttttgcagcttcagagggagacgctgttgcggcagctggagacgaaccagctggacatggacgccacgctggaggagctgtcggtgcagcaggagacggaggaccagaactacggcatcttcctggagatgatggaggctcgcagccgtggccatgcgtccccactggcggccaacgggcagagcccatccccgggctcccagtcaccagtggtgcctgcaggcgctgtgtccacggggagctccagccccggcacaccccagcccgccccacagctgcccctcaatgccgccccaccatcctctgtgccccctgtaccaccctcagaggccctgcccccacctgcgtgcccctcagcccccgccccacggcgcagcatcatctctaggctgtttgggacgtcacctgccaccgaggcagcccctccacctccagagccagtcccggccgcagagggcccagcaacggtccagagtgtggaggactttgttcctgacgaccgcctggaccgcagcttcctggaagacacaacccccgccagggacgagaagaaggtgggggccaaggctgcccagcaggacagcgacagtgatggggaggccctgggcggcaacccgatggtggcagggttccaggacgatgtggacctcgaagaccagccacgtgggagtcccccgctgcctgcaggccccgtccccagtcaagacatcactctttcgagtgaggaggaagcagaagtggcagctcccacaaaaggccctgccccagctccccagcagtgctcagagccagagaccaagtggtcctccataccagcttcgaagccacggagggggacagctcccacgaggaccgcagcacccccctggccaggcggtgtctctgttcgcacaggtccggagaagcgcagcagcaccaggccccctgctgagatggagccggggaagggtgagcaggcctcctcgtcggagagtgaccccgagggacccattgctgcacaaatgctgtccttcgtcatggatgaccccgactttgagagcgagggatcagacacacagcgcagggcggatgactttcccgtgcgagatgacccctccgatgtgactgacgaggatgagggccctgccgagccgcccccaccccccaagctccctctccccgccttcagactgaagaatgactcggacctcttcgggctggggctggaggaggccggacccaaggagagcagtgaggaaggtaaggagggcaaaaccccctctaaggagaagaagaagaagaagaaaaaaggcaaagaggaagaagaaaaagctgccaagaagaagagcaaacacaagaagagcaaggacaaggaggagggcaaggaggagcggcgacggcggcagcagcggcccccgcgcagcagggagaggacggctgccgatgagctggaggctttcctggggggcggggccc

SEQ ID NO: 173009 - DNA, 1580 bp, Homo sapiens
  Payload ID: 13997
  Gene Symbol: RABL6
  Gene Name: RAB, member RAS oncogene family-like 6
  Uniprot ID: Q3YEC7
  ENST ID: ENST00000371671
  CDS Start-End: 255-1199
cgccaagatggcggcgctgactcctggagagcggtcgcgccggaggccgcgggggccggagcggagcagccgcggctgaggttcccgagtcgccgctcggggctgcgctccgccgccgggaccccggcctctggccgcgccggctccggcctccgggggggccggggccgccgggacatggtgccagtcgcaccccttccccgccgccgctgagctcgccggccgcgcccgggctgggacgtccgagcgggaagatgttttccgccctgaagaagctggtggggtcggaccaggccccgggccgggacaagaacatccccgccgggctgcagtccatgaaccaggcgttgcagaggcgcttcgccaagggggtgcagtacaacatgaagatagtgatccggggagacaggaacacgggcaagacagcgctgtggcaccgcctgcagggccggccgttcgtggaggagtacatccccacacaggagatccaggtcaccagcatccactggagctacaagaccacggatgacatcgtgaaggttgaagtctgggatgtagtagacaaaggaaaatgcaaaaagcgaggcgacggcttaaagatggagaacgacccccaggaggcggagtctgaaatggccctggatgctgagttcctggacgtgtacaagaactgcaacggggtggtcatgatgttcgacattaccaagcagtggaccttcaattacattctccgggagcttccaaaagtgcccacccacgtgccagtgtgcgtgctgggaaactaccgggacatgggcgagcaccgagtcatcctgccggacgacgtgcgtgacttcatcgacaacctggacagacctccaggttcctcctacttccgctatgctgagtcttccatgaagaacagcttcggcctaaagtaccttcataagttcttcaatatcccatttttgcagcttcagaaggatgtcaggcttgcccaggaaaggggctgtgctgtcgtcctggtgtcagaagaagtgaggatgcctgcaggctgggactgctgctggggacgtttgggttggaaggaaggcggcagtcagacttgtcctgtgccggcactgctggggaggcccctccttcctgcagagccgtcccctcatcactgggttgattactccttagagagctccccactgctcagctgctccattccctaatggtttgccctccaaacccttccaaagcctcccagggagagaacgggaccctggacagagtcttgagctggaagcgtagggctgagctgtgtgtgactatccttttgctatggatgtgttcaagcagatctgatgtcctcgcctgtctcagcagcgggacccctgtttcctctttgtcttgcccctggattgcctggaagcaaatttcaggccttctttatgtcacctaaaaatatttcaaacacatctctaaaaaaatcagttgtttttttaacctgaccgtagtacctaatgtaataccgcatgttaaactcacagaaggtttttcttggagaaataagccacaataacaaattgaaaaaataaaattcccaaagagtt

SEQ ID NO: 173010 - DNA, 2547 bp, Homo sapiens
  Payload ID: 13997
  Gene Symbol: RABL6
  Gene Name: RAB, member RAS oncogene family-like 6
  ENST ID: ENST00000436380
  CDS Start-End: 1-646
gaagatagtgatccggggagacaggaacacgggcaagacagcgctgtggcaccgcctgcagggccggccgttcgtggaggagtacatccccacacaggagatccaggtcaccagcatccactggagctacaagaccacggatgacatcgtgaaggttgaagtctgggatgtagtagacaaaggaaaatgcaaaaagcgaggcgacggcttaaagatggagaacgacccccaggaggcggagtctgaaatggccctggatgctgagttcctggacgtgtacaagaactgcaacggggtggtcatgatgttcgacattaccaagcagtggaccttcaattacattctccgggagcttccaaaagtgcccacccacgtgccagtgtgcgtgctgggaaactaccgggacatgggcgagcaccgagtcatcctgccggacgacgtgcgtgacttcatcgacaacctggacagcagacctccaggttcctcctacttccgctatgctgagtcttccatgaagaacagcttcggcctaaagtaccttcataagttcttcaatatcccatttttgcagcttcaggtaagcactcaccacgtggggtggagtggctgctggtctctcacctccttccaggtgtctcctgtgtagcaacgggtctccctcctaacccctgagaaagctgtggacctgctcggagattggctgctggcaagggcccagcgttctactgcacctgcctgctctgggtggcagagggtacagggtcctgagggctagacccagtcccaggagcccctccacctctgcggggaccccttgctcagtttcccccagtgtttttggttgtttttgtttgttgagataaggtcttgctgtgtggcccaggctggagtgcagtggcgcaatcatggctcactgcggcctcaaactccggggctcaggcaatcctcccacctgtctcccaaagtgctgggatgccaggcgtgagtcaccgaggtactcgctgttcacatctcacatttccctggtgcttgtgtcaaaaccaaggaaccaactttggcctacggactaaactcactttcctttgtagaaacaagggccaggccagctgtggctgcaaagtagcccagcaaatgatgaggcttgaacctcctcgccctgggctgccctgattgggtctgggggacctgaacctcctcgccctgggctgccctgactgggtctgggggacctgaacctcctcgccctgggctgccccagctgggtctggggacctgaacctcctcgccctgggctgccccgcctgggtctggggacctgaacctcctcgccctgggctgccccgcctgggtctggggacctgaacctcctcgccctgggctgccccacctgggtctggggacctgaacctcctcgccctgggctgccccagctgggtctgggggacctgaacctcctcgccctgggctgccccagctgggtctgggggacctgaacctcctcgccctgggctgccccagctggatctgggggacctgaacctcctcgccctgggctgccccgcctgggtctgggggacctgaacctccttgcctgggctgccccgcctgggtctgggggacctgaacctcctcgccctgggctgccccagctgggtctgggggacctgtacctcctcgccctgggctgccccgcctgggtctgggggacctgaacctcctcgccctgggctgccccgactgggtctgggggacctgaatctcctcaccctgggctgccccagctgggtctggggacctgaacctcctcgccctgggctgccccagctgggtctgggggacctgaacctcctcgccctgggctgccccgactgggtctgggggacctggggcccagctgcagctgcagcagccttggtctttctccagaaggatgtcaggcttgcccaggaaaggggctgtgctgtcgtcctggtgtcagaagaagtgaggatgcctgcaggctgggactgctgctggggacgtttgggttggaaggaaggcggcagtcagacttgtcctgtgccggcactgctggggaggcccctccttcctgcagagccgtcccctcatcactgggttgattactccttagagagctccccactgctcagctgctccattccctaatggtttgccctccaaacccttccaaagcctcccagggagagaacgggaccctggacagagtcttgagctggaagcgtagggctgagctgtgtgtgactatccttttgctatggatgtgttcaagcagatctgatgtcctcgcctgtctcagcagcgggacccctgtttcctctttgtcttgcccctggattgcctggaagcaaatttcaggccttctttatgtcacctaaaaatatttcaaacacatctctaaaaaaatcagttgtttttttaacctgaccgtagtacctaatgtaataccgcatgttaaactcacagaaggtttttcttggagaaataagccacaataacaaattgaaaaaataaaattcccaaagagtt

SEQ ID NO: 173011 - DNA, 3969 bp, Homo sapiens
  Payload ID: 13997
  Gene Symbol: RABL6
  Gene Name: RAB, member RAS oncogene family-like 6
  ENST ID: ENST00000432842
  CDS Start-End: 2345-2917
gttcccgcaggggtgctgggcccctgcggctcccaccacattgcgctggactcttgtggcccgtgctgacctggtgttccagatgctgtctctgcagagctctgcgtggtctctggtgttagagaggtggccacccaccgccctatcattgtcctcatccccactgtgaggagaagctatcagatctgcctgtggcccccaggtggctcaggaagggccgtcctgacccccatcctggcccctttcggagctgcagagatttcctgtgcctccagctctggcttcctgggtctgtccttggcgtggagcgggcacaggcttcccgtagacacggttgcccagagtggggttcataactgggcactgtaaagggtgtggtctccacggcttaggatgggcccccccttcctggtggcctgctgtgcccggggctggtgtggaggcctgtgggtgcagaggccgcctggccctgggcttcctctggggttacatgtgtacccttgcacccacctgttagcacccaccgggagagtctcactcagcctaaaccagggcccctcaggaggaaaaggtccccagcttcatgatggggcccagtgtgccttccatccccgccctgactcagtgcccactgtgcgaggtgtgagcactgtccacagcagccagggcggccggtggggagtgcattggagggggttgaggtctcttgggcacctggtgagttctcaagggtgagaggaagccgaggccatcaggcttagctgacgctgcatggggcaggctgccaagagggaggctgaatggagcagcctcaggtgagccgacaatcctcacctccgcctggtcagccaggacccggctcccctccagtcccgcctgctttccccaaagcagatccagccagtctcaatggctcgcccggggggtgctggttaggctgtgagcatccttcctgggtgcaggcccccgacagccagcagtgctgtgctgtgtgtgtgttggggactctgctgagccctttgtggccagactggggaggctcctccgggctggctctgtcccctgtaccttgtgagggaggggctgaccccctgactgggttacatcgtggtgagcagttcagaaacaagctgtggaatgaagtggacgtggcgttttaaacacatgagccccatctgttcttaggggttttgtttgttgtcccagtccgtgactccaagactgggacccccagagttcccaggatggtctggagcctttatcctcaggtcagcattgtggagttaaagggaggggaccacggcccctcattctcaggagagccatggtgaccttgatggcggaggctcagggggacctggaccgtggacaccacacagctgccctcctccctcccgaggccatttcagggctggaatccctgcccccctctcctttcctcccgggctggttgttgccttgagagtccgtgcgctcatctccccacttttaccccagggggaggcccctcaccttcccaccatatcccttgtacttcctcccaccctggacttgggggagctggggggagggggcccttccttcagcagcaaaccctcctggtgtagggctgtaggccatcccaccgcagcctgtccaggagctgctgagcctgtcagccccaactagcacctcctgtccaggcccggcccagccctgcctccagagcctacagaggggcctcgcccaggtcctgctgctccagagcttgtgggtgcccacgctgcaggctgtttggggtggtggagtagagcacccgctggagctgggggctgagtggccatggggggaccatgctcctcctatggcccaaggcccaggggttccacctcgtaatttttgtttgtttttaaataaggaaaatgcaaaaagcgaggcgacggcttaaagatggagaacgacccccaggaggcggagtctgaaatggccctggatgctgagttcctggacgtgtacaagaactgcaacggggtggtcatgatgttcgacattaccaagcagtggaccttcaattacattctccgggagcttccaaaagtgcccacccacgtgccagtgtgcgtgctgggaaactaccgggacatgggcgagcaccgagtcatcctgccggacgacgtgcgtgacttcatcgacaacctggacaggtgggtgcggtggccctgctcccgagggaccctgcccggtgctccggtgtgcgggggagggtgctgaggcagaggcccagggaggggttaacgttagcatggggcccggcggatgtgggtctcgccgctgagtggggctcactgaagcctgggtctccccgatggcagggccgggaactgtgtgctggggaactgtgtgccagggtgaagtgctggcactgtggggtcacctgcagaagggcactcggcttagctgcttagcagggctcagcagggtcctgtggcctcaggagcctgcaggaggagggagggcagtgcggacccacagctgtgggcccaggggtgatccttggcaccagggcaagggtctttctcttgcatcttttttcctttctgaaagcagacctccaggttcctcctacttccgctatgctgagtcttccatgaagaacagcttcggcctaaagtaccttcataagttcttcaatatcccatttttgcagcttcagagggagacgctgttgcggcagctggagacgaaccagctggacatggacgccacgctggaggagctgtcggtgcagcaggagacggaggaccagaactacggcatgtatgtggccggacccgcccgtgcgggcggtgtgggggctgcgggcgtggccgtggtgcagggccatgggctgcaccaaggagacagcagaggggagtgtcccctgtttggggtaaattagtcacctttgggcacgggtggaggaggactcaggtttgcactgcccccagcagcccccccacagtcacccctggcgtggactcctcatacaggtcatgctgtgcctgccactctgagtaccgctgaccgtggccaggtgctggtgctcatggagtgctgctggggctgcctgcccatcaggggcttggcctcccagattgatgccagcatggggtgtgctttctggggagctgcttgactttgggaagctccctgtgttgaagaggcatacaggccaggacatggaggtctctggtcctcgatagcagagggcggctcagagcatcctcctgagtgggcctgggcagtgcatagccccggggttgcggccagtgggacagctggcccgttctctgcctcaggctcctgtacagctaggggcttggtgcctcccctgggacccaggcagggaccacggaatcagtggccctcctgaggccccccaggaggtctctgtttccagaaggagagccctgtgggtcaccttggatctggctgttggctcagacacagcaagagaccgagagggaaggcagtttgatgcctggagagggacccgtggcttccagctgccaggccagccccagaatggagccccccgcatgggcgcttctctgttgaaccaatcctggcatttcctgggcctgagagttgggtcagctggatgctgcgatggccgcacgtgctccaccaagccccagccccctcctcttcccagaaacccccgctcacgggaaggtccagttgctgccatctggccacctctgcatggagcccccaacagctgtgcctcagaacagatccgaagtgactttcaggggagctggacacatgtacgctggtgcctgctgtccccaccctttggcactgctgctctttctttttctgagatggagtctcgctctgtcgcccaggctggagcgcagtggtgtgatctcggctcaccgcaagctccgcctcccgggttcacgccattctcctgcctcagcctcccaagtaatggggaggctgagg

SEQ ID NO: 173012 - DNA, 3361 bp, Homo sapiens
  Payload ID: 13997
  Gene Symbol: RABL6
  Gene Name: RAB, member RAS oncogene family-like 6
  ENST ID: ENST00000464941
  CDS Start-End: 713-2128
actcccgggaaagacccggagacgggaccaccgcatgtggaaaccaccgggaagcacagcgcgtgggccgcctgagcggtgccggggcggggaggcagggccgccgctcaggccgtggacctcggggccgcgggacggacgtggatggcgccgccgttctctcgcgggcccagcgaggctatgcgtgcgcggcccgggcagtctctgcgagcccgggctgctgctcatctgggggggacggcggccgcccgactgagcccagagctgtgggccgcgcccgggttcctgcctcgggccggaggagggagggcgccgcggcccgtctcgggcctcccgccgcgctggggcctggctccctcctggctgcgctgagcgcctgcggctccgcttggggctgctgtgctctccacaggccgggccgccgggctggagggcgctgcaggcggcctctgttctccaagttctccgcgggagagggaggggaacgagggcccagccttccgcggggtgggctcggccgggagaagcgcggagcctcctggctgcccccagccggtgcggccgccaccgtggccgtgagggcgcctgggtcccctctggaggttttgccgcagcgctggccggcgccgagatatgaccagaggcgttgaaagttggcgcgttgaggtacctaggatgggcgaggaaatgaacaagcttcaggggagaagaaatgactgtgggaacagtgaagatagtgatccggggagacaggaacacgggcaagacagcgctgtggcaccgcctgcagggccggccgttcgtggaggagtacatccccacacaggagatccaggtcaccagcatccactggagctacaagaccacggatgacatcgtgaaggttgaagtctgggatgtagtagacaaaggaaaatgcaaaaagcgaggcgacggcttaaagatggagaacgacccccaggaggcggagtctgaaatggccctggatgctgagttcctggacgtgtacaagaactgcaacggggtggtcatgatgttcgacattaccaagcagtggaccttcaattacattctccgggagcttccaaaagtgcccacccacgtgccagtgtgcgtgctgggaaactaccgggacatgggcgagcaccgagtcatcctgccggacgacgtgcgtgacttcatcgacaacctggacagacctccaggttcctcctacttccgctatgctgagtcttccatgaagaacagcttcggcctaaagtaccttcataagttcttcaatatcccatttttgcagcttcagagggagacgctgttgcggcagctggagacgaaccagctggacatggacgccacgctggaggagctgtcggtgcagcaggagacggaggaccagaactacggcatcttcctggagatgatggaggctcgcagccgtggccatgcgtccccactggcggccaacgggcagagcccatccccgggctcccagtcaccagtggtgcctgcaggcgctgtgtccacggggagctccagccccggcacaccccagcccgccccacagctgcccctcaatgccgccccaccatcctctgtgccccctgtaccaccctcagaggccctgcccccacctgcgtgcccctcagcccccgccccacggcgcagcatcatctctaggctgtttgggacgtcacctgccaccgaggcagcccctccacctccagagccagtcccggccgcagagggcccagcaacggtccagagtgtggaggactttgttcctgacgaccgcctggaccgcagcttcctggaagacacaacccccgccagggacgagaagaaggtgggggccaaggctgcccagcaggacagcgacagtgatggggaggccctgggcggcaacccgatggtggcagggttccaggacgatgtggacctcgaagaccagccacgtgggagtcccccgctgcctgcaggccccgtccccagtcaagacatcactctttcgagtgaggaggaagcagaagtggcagctcccacaaaaggccctgccccagctccccagcagtgctcagagccagagaccaagtggtccggagaagcgcagcagcaccaggccccctgctgagatggagccggggaagggtgagcaggcctcctcgtcggagagtgaccccgagggacccattgctgcacaaatgctgtccttcgtcatggatgaccccgactttgagagcgagggatcagacacacagcgcagggcggatgactttcccgtgcgagatgacccctccgatgtgactgacgaggatgagggccctgccgagccgcccccaccccccaagctccctctccccgccttcagactgaagaatgactcggacctcttcgggctggggctggaggaggccggacccaaggagagcagtgaggaaggtaaggagggcaaaaccccctctaaggagaagaagaagaagaagaaaaaaggcaaagaggaagaagaaaaagctgccaagaagaagagcaaacacaagaagagcaaggacaaggaggagggcaaggaggagcggcgacggcggcagcagcggcccccgcgcagcagggagaggacggctgccgatgagctggaggctttcctggggggcggggccccgggcggccgccaccctgggggtggcgactacgaggagctctaggccggcgtgggcagtggccgccctggggcggggggcgtgcctgtcactgcctggggaggcatttgcctctgtaccatcgcctttgccgctgccccgtggctgccgtgtgcgcttctgagctggaagaggccgggcattggtggtccccaggctgggccctgcaggtgctgggccttcaggcccagtgtgagcctgctctgcaagaagggaggggacagctggcttcagccaggctcggtggacaccctggccctctcggggcagagccgccagtgtttctcagggatgtgactgaggcccaggagggacctgtgagggtctgtttacagaggctgggcaggggccgcttggctgtggggtgtgcgctgccccggcacctgcttgccctccgcgctcatctggggccgcagcatgcctatggttccgcttccggccgggagccctgaacacgggtgtgcagactcaccctaaagggcggcccaggccccacgctagaaggctggcgagaccgaaggcagcatgtgaggcctctcctgggagtgggggttgtgtttcccacagtggcctcagctgcgcccccgctcaggtgagcccgaaggcaggagccgggaggcactcctcccaaacactccactcagaccataaagcactcctgtttcactctg

SEQ ID NO: 173013 - DNA, 2746 bp, Homo sapiens
  Payload ID: 13997
  Gene Symbol: RABL6
  Gene Name: RAB, member RAS oncogene family-like 6
  ENST ID: ENST00000484471
  CDS Start-End: 237-1691
gactcctggagagcggtcgcgccggaggccgcgggggccggagcggagcagccgcggctgaggttcccgagtcgccgctcggggctgcgctccgccgccgggaccccggcctctggccgcgccggctccggcctccgggggggccggggccgccgggacatggtgccagtcgcaccccttccccgccgccgctgagctcgccggccgcgcccgggctgggacgtccgagcgggaagatgttttccgccctgaagaagctggtggggtcggaccaggccccgggccgggacaagaacatccccgccgggctgcagtccatgaaccaggcgttgcagaggcgcttcgccaagggggtgcagtacaacatgaagatagtgatccggggagacaggaacacgggcaagacagcgctgtggcaccgcctgcagggccggccgttcgtggaggagtacatccccacacaggagatccaggtcaccagcatccactggagctacaagaccacggatgacatcgtgaaggttgaagtctgggatgtagtagacaaaggaaaatgcaaaaagcgaggcgacggcttaaagatggagaacgacccccaggaggcggagtctgaaatggccctggatgctgagttcctggacgtgtacaagaactgcaacggggtggtcatgatgttcgacattaccaagcagtggaccttcaattacattctccgggagcttccaaaagtgcccacccacgtgccagtgtgcgtgctgggaaactaccgggacatgggcgagcaccgagtcatcctgccggacgacgtgcgtgacttcatcgacaacctggacagacctccaggttcctcctacttccgctatgctgagtcttccatgaagaacagcttcggcctaaagtaccttcataagttcttcaatatcccatttttgcagcttcagagggagacgctgttgcggcagctggagacgaaccagctggacatggacgccacgctggaggagctgtcggtgcagcaggagacggaggaccagaactacggcatcttcctggagatgatggaggctcgcagccgtggccatgcgtccccactggcggccaacgggcagagcccatccccgggctcccagtcaccagtggtgcctgcaggcgctgtgtccacggggagctccagccccggcacaccccagcccgccccacagctgcccctcaatgccgccccaccatcctctgtgccccctgtaccaccctcagaggccctgcccccacctgcgtgcccctcagcccccgccccacggcgcagcatcatctctaggctgtttgggacgtcacctgccaccgaggcagcccctccacctccagagccagtcccggccgcagagggcccagcaacggtccagagtgtggaggactttgttcctgacgaccgcctggaccgcagcttcctggaagacacaacccccgccagggacgagaagaaggtccggagaagcgcagcagcaccaggccccctgctgagatggagccggggaagggtgagcaggcctcctcgtcggagagtgaccccgagggacccattgctgcacaaatgctgtccttcgtcatggatgaccccgactttgagagcgagggatcagacacacagcgcagggcggatgactttcccgtgcgagatgacccctccgatgtgactgacgaggatgagggccctgccgagccgcccccaccccccaagctccctctccccgccttcagactgaagaatgactcggacctcttcgggctggggctggaggaggccggacccaaggagagcagtgaggaaggtaaggagggcaaaaccccctctaaggagaagaagaagaagaagaaaaaaggcaaagaggaagaagaaaaagctgccaagaagaagagcaaacacaagaagagcaaggacaaggaggagggcaaggaggagcggcgacggcggcagcagcggcccccgcgcagcagggagaggacggctgccgatgagctggaggctttcctggggggcggggccccgggcggccgccaccctgggggtggcgactacgaggagctctaggccggcgtgggcagtggccgccctggggcggggggcgtgcctgtcactgcctggggaggcatttgcctctgtaccatcgcctttgccgctgccccgtggctgccgtgtgcgcttctgagctggaagaggccgggcattggtggtccccaggctgggccctgcaggtgctgggccttcaggcccagtgtgagcctgctctgcaagaagggaggggacagctggcttcagccaggctcggtggacaccctggccctctcggggcagagccgccagtgtttctcagggatgtgactgaggcccaggagggacctgtgagggtctgtttacagaggctgggcaggggccgcttggctgtggggtgtgcgctgccccggcacctgcttgccctccgcgctcatctggggccgcagcatgcctatggttccgcttccggccgggagccctgaacacgggtgtgcagactcaccctaaagggcggcccaggccccacgctagaaggctggcgagaccgaaggcagcatgtgaggcctctcctgggagtgggggttgtgtttcccacagtggcctcagctgcgcccccgctcaggtgagcccgaaggcaggagccgggaggcactcctcccaaacactccactcagaccataaagcactcctgtttca

SEQ ID NO: 173014 - DNA, 1416 bp, Homo sapiens
  Payload ID: 13997
  Gene Symbol: RABL6
  Gene Name: RAB, member RAS oncogene family-like 6
  ENST ID: ENST00000629216
  CDS Start-End: 1-1416
atgactgtgggaacagtgaagatagtgatccggggagacaggaacacgggcaagacagcgctgtggcaccgcctgcagggccggccgttcgtggaggagtacatccccacacaggagatccaggtcaccagcatccactggagctacaagaccacggatgacatcgtgaaggttgaagtctgggatgtagtagacaaaggaaaatgcaaaaagcgaggcgacggcttaaagatggagaacgacccccaggaggcggagtctgaaatggccctggatgctgagttcctggacgtgtacaagaactgcaacggggtggtcatgatgttcgacattaccaagcagtggaccttcaattacattctccgggagcttccaaaagtgcccacccacgtgccagtgtgcgtgctgggaaactaccgggacatgggcgagcaccgagtcatcctgccggacgacgtgcgtgacttcatcgacaacctggacagacctccaggttcctcctacttccgctatgctgagtcttccatgaagaacagcttcggcctaaagtaccttcataagttcttcaatatcccatttttgcagcttcagagggagacgctgttgcggcagctggagacgaaccagctggacatggacgccacgctggaggagctgtcggtgcagcaggagacggaggaccagaactacggcatcttcctggagatgatggaggctcgcagccgtggccatgcgtccccactggcggccaacgggcagagcccatccccgggctcccagtcaccagtggtgcctgcaggcgctgtgtccacggggagctccagccccggcacaccccagcccgccccacagctgcccctcaatgccgccccaccatcctctgtgccccctgtaccaccctcagaggccctgcccccacctgcgtgcccctcagcccccgccccacggcgcagcatcatctctaggctgtttgggacgtcacctgccaccgaggcagcccctccacctccagagccagtcccggccgcagagggcccagcaacggtccagagtgtggaggactttgttcctgacgaccgcctggaccgcagcttcctggaagacacaacccccgccagggacgagaagaaggtgggggccaaggctgcccagcaggacagcgacagtgatggggaggccctgggcggcaacccgatggtggcagggttccaggacgatgtggacctcgaagaccagccacgtgggagtcccccgctgcctgcaggccccgtccccagtcaagacatcactctttcgagtgaggaggaagcagaagtggcagctcccacaaaaggccctgccccagctccccagcagtgctcagagccagagaccaagtggtccggagaagcgcagcagcaccaggccccctgctga

SEQ ID NO: 173015 - DNA, 2193 bp, Homo sapiens
  Payload ID: 13998
  Gene Symbol:
  Gene Name: RAB, member RAS oncogene family-like 6 [Source:EntrezGene
  Acc:55684]
  ENST ID: ENST00000425121
  CDS Start-End: 1-2193
atgttttccgccctgaagaagctggtggggtcggaccaggccccgggccgggacaagaacatccccgccgggctgcagtccatgaaccaggcgttgcagaggcgcttcgccaagggggtgcagtacaacatgaagatagtgatccggggagacaggaacacgggcaagacagcgctgtggcaccgcctgcagggccggccgttcgtggaggagtacatccccacacaggagatccaggtcaccagcatccactggagctacaagaccacggatgacatcgtgaaggttgaagtctgggatgtagtagacaaaggaaaatgcaaaaagcgaggcgacggcttaaagatggagaacgacccccaggaggcggagtctgaaatggccctggatgctgagttcctggacgtgtacaagaactgcaacggggtggtcatgatgttcgacattaccaagcagtggaccttcaattacattctccgggagcttccaaaagtgcccacccacgtgccagtgtgcgtgctgggaaactaccgggacatgggcgagcaccgagtcatcctgccggacgacgtgcgtgacttcatcgacaacctggacagcagacctccaggttcctcctacttccgctatgctgagtcttccatgaagaacagcttcggcctaaagtaccttcataagttcttcaatatcccatttttgcagcttcagagggagacgctgttgcggcagctggagacgaaccagctggacatggacgccacgctggaggagctgtcggtgcagcaggagacggaggaccagaactacggcatcttcctggagatgatggaggctcgcagccgtggccatgcgtccccactggcggccaacgggcagagcccatccccgggctcccagtcaccagtggtgcctgcaggcgctgtgtccacggggagctccagccccggcacaccccagcccgccccacagctgcccctcaatgccgccccaccatcctctgtgccccctgtaccaccctcagaggccctgcccccacctgcgtgcccctcagcccccgccccacggcgcagcatcatctctaggctgtttgggacgtcacctgccaccgaggcagcccctccacctccagagccagtcccggccgcagagggcccagcaacggtccagagtgtggaggactttgttcctgacgaccgcctggaccgcagcttcctggaagacacaacccccgccagggacgagaagaaggtgggggccaaggctgcccagcaggacagcgacagtgatggggaggccctgggcggcaacccgatggtggcagggttccaggacgatgtggacctcgaagaccagccacgtgggagtcccccgctgcctgcaggccccgtccccagtcaagacatcactctttcgagtgaggaggaagcagaagtggcagctcccacaaaaggccctgccccagctccccagcagtgctcagagccagagaccaagtggtcctccataccagcttcgaagccacggagggggacagctcccacgaggaccgcagcacccccctggccaggcggtgtctctgttcgcacaggtccggagaagcgcagcagcaccaggccccctgctgagatggagccggggaagggtgagcaggcctcctcgtcggagagtgaccccgagggacccattgctgcacaaatgctgtccttcgtcatggatgaccccgactttgagagcgagggatcagacacacagcgcagggcggatgactttcccgtgcgagatgacccctccgatgtgactgacgaggatgagggccctgccgagccgcccccaccccccaagctccctctccccgccttcagactgaagaatgactcggacctcttcgggctggggctggaggaggccggacccaaggagagcagtgaggaaggtaaggagggcaaaaccccctctaaggagaagaagaagaagaagaaaaaaggcaaagaggaagaagaaaaagctgccaagaagaagagcaaacacaagaagagcaaggacaaggaggagggcaaggaggagcggcgacggcggcagcagcggcccccgcgcagcagggagaggacggctgccgatgagctggaggctttcctggggggcggggccccgggcggccgccaccctgggggtggcgactacgaggagctctag

SEQ ID NO: 173016 - DNA, 3535 bp, Homo sapiens
  Payload ID: 13999
  Gene Symbol: RAB10
  Gene Name: RAB10, member RAS oncogene family
  Uniprot ID: P61026
  ENST ID: ENST00000264710
  CDS Start-End: 500-1102
gagagggcacggggaaaaggtggctctggccggggtggctcggtttcctggggctatgtaactgagctcgtcgacttaggggtccttcttcgctgccctcgccgcgtgctagcagggagtttccgctcgggagagagactgtcctcacgcccgctgcgcctcctcgacggcagagcaggcttgctcgcccgtgggagcgtcccggccgagaagccctgaggggggaggggaggccattttgtcccgaccgactccccggaaccgggcggacgggctgggagaggctgcggagccgcggtcgccgccctcggaggcactggacgccgccactgtcggggcttcctcaaagctgttcgtaggtcgcccgcgccgtctcgagcctttttcccacgcttccccggtcctccggcctgagaacgcccgagtgaggagttggccgtagtgagagggaccgatcccttggggccgccggcggcgagagcccgagccgctcctcccaatggcgaagaagacgtacgacctgcttttcaagctgctcctgatcggggattccggagtggggaagacctgcgtcctttttcgtttttcggatgatgccttcaatactacctttatttccaccataggaatagacttcaagatcaaaacagttgaattacaaggaaagaagatcaagctacagatatgggatacagcaggccaggagcgatttcacaccatcacaacctcctactacagaggcgcaatgggtatcatgctagtatatgacatcaccaatggtaaaagttttgaaaacatcagcaaatggcttagaaacatagatgagcatgccaatgaagatgtggaaagaatgttactaggaaacaagtgtgatatggacgacaaaagagttgtacctaaaggaaaaggagaacagattgcaagggagcatggtattaggttttttgagactagtgcaaaagcaaatataaacatcgaaaaggcgttcctcacgttagctgaagatatccttcgaaagacccctgtaaaagagcccaacagtgaaaatgtagatatcagcagtggaggaggcgtgacaggctggaagagcaaatgctgctgagcattctcctgttccatcagttgccatccactaccccgttttctcttcttgctgcaaaataaaccactctgtccatttttaactctaaacagatatttttgtttctcatcttaactatccaagccacctattttatttgttctttcatctgtgactgcttgctgactttatcataattttcttcaaacaaaaaaatgtatagaaaaatcatgtctgtgagttcatttttaaatgtacttgctcagctcaactgcatttcagttgtattatagtccagttcttatcaacattaaaacctatagcaatcatttcaaatctattctgcaaattgtataagaataaagttagaattaacaattttattttgtacaacagtggaattttctgtcatggataatgtgcttgagtccctataatctatagacatgtgatagcaaaagaaacaaacaaaagccaggaaaacactcattttcgccttgaatatgtaaatgggattaattttgtcctgtgccttatgtggaaaggaacttctttggttttccttttttgttctggtggaagcatgtgcaggagacatatcatccaaacataaaccattaaaatgtttgtggtttgcttggctgtaattttcaaagtagttaattgaggacaaagggtaatgcagaagtgatagctttggtttgctgagtcttgttttaagtggccttgatatttaaaactattcctgccaccatttcttctccttggccacttcttccttgcgtctccctgcatgctgctttatttgcttctccctccccaaccacctcatggtatatttaagagtgaaagggacaaactagtaggtttgtcaagtttaatataaagcactgatgtaacttgctaggtaaacggaaagataagttctaactgcctactatccaatgtcagttaattggtgtcttcccccctcatttgctctcttccctaaaatgtgtcccagatgccttcatttgctgttttacttctatgttctgcttttcctcctctctttgttcccttcctgtctatccattgagtttatgaaatggaagagttaactgcatgcactagtgtttggagggtgttgtggtttgtctttctaattaggtgtatagcctattcactttcctagaataaatctcttaacctaaatttgagtagtctgcattttggcaactcctctagcagcttggtagcctagtacaggttgtttttttaaaaaaggaaaagcaggaaggaggagtgaattttattaacatgtttgccaaatgtattgagatttggcctctgaagaacactttttcagtgttaagtttctttaccttaagattcagaaatactttagaatattattaattttaagtcctgtctttacatccttttggaaaacttgtattaccatgggtttggaaaaaggacaacgaaaggcttttcatgtaaagataagatctttagctatctctaaccctgtccttttttcactgcattttttctagttttgcttcattgcttatcattaggatagggtaagtgaagtttgctatgctgctagcatcctaagatgatacctttgttgaaagaattgtgaatagcatgattcatttctagcagaggctgagtttaggacagcagcttccattgagaagtctttctgtgtcgtgaatagcattttaatgacctcttggctcacataagcaaacaacatagggacgtatctgctatgaaaatccacaaatttttcagatagtgccctaaaaacaattttatatgcctcactggttgttattcttaggttattcccacacttgactttatcattgtttactactagtaaaaagcagcattgccaaataatccctaattttccactaaaaatataatgaaatgatgttaagctttttgaaaagtttaggttaaacctactgttgttagattaatgtatttgttgcttccctttatctggaatgtggcattagcttttttattttaaccctctttaattcttattcaattccatgacttaaggttggagagctaaacactgggatttttggataacagactgacagttttgcataattataatcggcattgtacatagaaaggatatggctaccttttgttaaatctgcactttctaaatatcaaaaaagggaaatgaagtataaatcaatttttgtataatctgtttgaaacatgagttttatttgcttaatattagggctttgccccttttctgtaagtctcttgggatcctgtgtagaagctgttctcattaaacaccaaacagttaagtccattctctggtactagctacaaattcggtttcatattctacttaacaatttaaataaactgaaatatttctagatggtctacttctgttcatataaaaacaaaacttgatttcca

SEQ ID NO: 173017 - DNA, 6253 bp, Homo sapiens
  Payload ID: 14000
  Gene Symbol: RAB11FIP1
  Gene Name: RAB11 family interacting protein 1 (class I)
  Uniprot ID: Q6WKZ4
  ENST ID: ENST00000287263
  CDS Start-End: 27-1976
ctcgcttctggagtgttatcgtcaccatgtccctaatggtctcggctggccggggcctgggggccgtgtggtccccaacccacgtgcaggtgacggtgctgcaggcgcggggcctgcgggccaagggccccgggggcacgagcgacgcgtacgcggtgatccaggtgggcaaggagaagtacgccacctccgtgtcggagcgcagcctgggcgcgcccgtgtggcgcgaggaggccaccttcgagctgccatcgctgctgtcctccggacccgcggccgccgccaccctgcagctcaccgtgctgcaccgcgcgctgctcggcctcgacaagttcctgggccgcgccgaggtggacctgcgggatctgcaccgcgaccagggccgcaggaagacgcagtggtataagttgaaatccaaaccaggaaagaaggacaaggagcgaggagaaattgaggttgacatccagtttatgagaaacaacatgactgccagcatgtttgacctttctatgaaagacaagtctcggaatccatttggaaagctgaaggacaagatcaaggggaagaataaggacagtgggtcagacaccgcctccgccatcatccctagcacgacaccttcggtcgacagtgatgatgagtctgtggttaaagacaagaaaaagaaatcaaagatcaagaccttactttccaagtcaaatttgcagaagacgcctctttcccagtccatgtctgtcctgccgacttcaaagccagaaaaagtgctgcttcgtcccggagactttcagtcccagtgggatgaagatgacaatgaggatgagtcctcctcggcctcggatgtcatgtctcacaagagaacagcgagtacggatcttaagcaactgaaccaggtcaactttacccttcccaagaaggaaggactttcctttcttggtggccttcggtctaagaatgatgtcctttcccgctctaatgtctgcatcaatgggaaccatgtttacctggagcagccagaagccaagggtgagatcaaggatagcagcccgtcctcctccccatcccccaagggcttcagaaagaagcatttgttctcttctacagagaacctggcggctgggtcttggaaggagcctgctgaaggaggtgggctgtcttctgacaggcagctctccgaatcttccaccaaggactccttgaagtctatgaccctgccgtcctaccgacctgccccactggtcagtggggacctcagggaaaacatggcccccgcaaactcagaggccacaaaagaagctaaggagagcaagaagccagagagcaggaggtcctctttgctgtctctgatgacggggaagaaggatgtggctaagggcagtgaaggtgaaaaccctctcacggtcccagggagggagaaggaaggcatgctgatgggggttaagccgggggaggacgcatcggggcctgctgaagaccttgtgagaagatctgagaaagatactgcagctgttgtctccagacagggcagctccctgaacctctttgaagatgtgcagatcacagaaccagaagctgagccagagtccaagtctgaaccgagacctccaatttcctctccgagggctccccagaccagagctgtcaagccccgacttcatcctgtgaagccaatgaatgcaatggccaccaaggttgctaactgcagcttgggaactgccaccatcatcagtgagaacttgaacaatgaggtcatgatgaagaaatacagcccctcggaccctgcatttgcatatgcgcagctgacccacgatgagctgattcagctggtcctcaaacagaaggaaacgataagcaagaaggagttccaggtccgcgagctggaagactacattgacaacctgcttgtcagggtcatggaagaaacccccaatatcctccgcatcccgactcaggttggcaaaaaagcaggaaagatgtaaatcagcagaaaaaaaacaccgagacgtttctgtgacttcactttcacctgctccaggggtcaaggacttgccttgcctgataaccagccagcaggctccgaatcaccatctccctcacatgttatccggcaagagtgaattctaccaatggaagccaggttaatgattacaattaatcttttactgtacattcccaaggctttagttttaaatgccactgtgcctttaacaaggttgtaaatattttatgcccaccagagatgtggtcataagatctgatcctgagccagagattcagatggcacaggaagtattcatgtattttaacactggggttttctttctttcatactgagattttttttcagtatgtatcctccagctcttaaagcttacctgagaaagctttaaatgagaaaaggaccatgcgattggtgctgtgttacatacacatactttcttggcttctgagtagctcaggtgtggcttttggctgcagatgttaaattttgataccatgtaaacctacccagcttctcagacttgggtcttgttttttgatgggaacagaggtgtttagagaaagcctctgagtatgcctttcagattttgaacaagcggccttttctaaacatcgacttctactactctctagccttaaaataccttctgcttagatccagggcccttctactggagataggaaaagtagaattcaggaattaaaagaattactctttattcaatttgaggaacttggtgaaagcccctcctcttatgacagccaggttcctgctggctagaccagcctattcagcgctttgctaggggattgggtggtccacgcactcgctaatacagttctccaggtgtggaatgatgtcaatacgattgcttggccttttccccctgtgcctttgctcggtgctctggtttcctcagcaacactccttgtaaggggcagagacagggtccaccaactccccaagatgaagaagccccttcaggccagtcgtggtggctcatgcctgtaatcccagcactttgcaaggccgaggagggtggatcacttgaggtcaggagttcgagaccagcctgaccaacatggcgaaaccccatctctactaaaaatacaaaaattagcttggcatggtggtgcgtgcctgtaatcccagctactcgggaggctggggcaggagaattgcttgaacttgggagatggaggctgcagcgagccaagatcgtgccactgcactccagcctgggcaagagtttttttaagactcttaaaaaaagagcctgggcaatttttttaagactctgtcttaaaaaaaactaaaaagaaaaaaagaagccccttcactctacaggggacaggagaccatggattggaccccaaagggattgaactgcatctgcatgtctgtcctttgaacactttctctccctgcccaaaaggaaacccaaattatttgtgggatactggggaaattgtagtgaagggcttaatgtagttaataaaagttaaaagtcagtagaaaacaggtgcctcagccttcaaatggttgctttttttccattttccctcatgaatagactcaccagcattttacccccttgttataaaactgtgcagagcaagaagatgatacttatttttgaatttgtatttttaaaactagatttatagactttttttttttttaactagggcacttgcttccttcttagctaaaagcaccagctgagatttttcaggtaattttgttgttactcacttaagactggaattagaatgtttctggtatttctcatttttttccctggctatgatagaatctcatctaatcttgacatctctcctaggggaagaatatcacaggctaatagcgtggttgggggtgaagatgatagcagttattaaatcaggaatctcttttatgtgtgtccttgttacattgaggttaagagacaaaatcattggcagtgcaatctctttccaggatttcgtttgctgtggcattggttatatcagagcactttaatctgaaggatgatactgtaacttgatttatctaattagcttttaattatctacagctattttattttatttaattctctcctacagtactgggaccactgtaaacttctcagatgacttgtatttttgtagtgctatgaaatttatttacatacttataaagaaaactgtatgttcacttgaactctgaaaatgtacatgtatggctggacgcggtggctcacgcctgtaatcccagcactttgggaggctgaggcgggtgaatcacttgattgaggtcaggagttcgagaccagcctggccaacatggcaaaaccccgtctctactaaaaaatacagaaattagctgggtgtggtggcagacagctgtaatctcagctgctcgggaggctgaggcacaagaatcgcttgagccagggaggtggaggttgcagtgagctgagatcacatcattgcactccagcctgggcaacgggcgagactctgtctcaaaaaaaagaaagaaagaaaaggtacatgtatatatttgtcctgcattatgttttttacttgatataaatgtatttttactgtgatagtccaagtgccctggggggcaggtgtgctctatgtggttcttcttccattggagagctggcgtagagatctgcagtgttcacaaggatgttggtttggagatgtctgctgctaggacctggggtgtgtgactcagtccatatgagagggacatctgggtggaggagtaaattcctgtgctctgaaatgccacttggtagctctggacaatgaaggacaattgactcaagggtgcctggcttctgctgctgctgggaaaaaattcagtttatagcattcctgcacctcccaaagtagataacctggaggtcattcagttaacaactgtccctgaggactcagttttgggggaggggttatctgggagaagctttagcctgttctgagccattaggagacattagtgaattggagcactggagaatcctacaaatggcctatgtctcagaagagctgggacctccttccagctgctgcagatgctgacaggccctgggaggctgctgtgctctggagaagctggagcagctcatttcttggcctagcctggctgcctcagaaagagcagtcaggacttgagggaagcatcaaattctatacccataaactgcagttggaagtcagctttttgaaatgtccagcctttgcccaattgtttcagatcatctcatgcctcaggctttggcaggtatcctgccctccatcttattccagtgtgttcacctcatcaaggcagcagagtggatgaaggagtaagtctgccctttgccatactgaacagctgtggaccccgattggtgagggctctgcatatgcctgtatgaaggagatacaggtgtgtgtgcacatgccggtatgaagaagacacaggcatgtgcttctcagttttgctaacagtgggagctcaacggggcagagggaggaaggtccatgatgctcagccacatactgtagagagaggcaatttaatgttaaatgacgcaccatcctccctcccacccttctcccagtcaactttttttctttttctagaactactaattatctctcaaggctgaaaaattaattgccttaggtggagaacttaattcctagtatccaccaaacttaactccgtatctccatatggtgtctccatatctactgtgtgagctacttaactgacgccctcttcctccaactgaaggatcgcccaacgtttttggattatagaattattatttcctgctttctttctttgggacttttgaatttctttggtttcgtttttaagaagtaacccaacatttcctacaacactaaataaaatggtacttacctttcaaagatttgtgtctgtagtttggtatgggtgcaataaaaatttattttgtcttcctggaaaacctctcttggtgggggtggggggatgaccagtgtttctcatcccatgagggtctctcactgggatttctgttgctgccatcttgcctggttcccaggagtcccaaggccctttttctcaaagaggacggacatgtctggtcccttcggatgcacccttcatcttggcctgagggaccatggcactggccagagaaactgagttggaacgtgctgcccccttttcctttgcagccggtacccttggctgagcatttggacagggtctttcctc

SEQ ID NO: 173018 - DNA, 7811 bp, Homo sapiens
  Payload ID: 14000
  Gene Symbol: RAB11FIP1
  Gene Name: RAB11 family interacting protein 1 (class I)
  Uniprot ID: Q6WKZ4
  ENST ID: ENST00000330843
  CDS Start-End: 14-3865
tgttatcgtcaccatgtccctaatggtctcggctggccggggcctgggggccgtgtggtccccaacccacgtgcaggtgacggtgctgcaggcgcggggcctgcgggccaagggccccgggggcacgagcgacgcgtacgcggtgatccaggtgggcaaggagaagtacgccacctccgtgtcggagcgcagcctgggcgcgcccgtgtggcgcgaggaggccaccttcgagctgccatcgctgctgtcctccggacccgcggccgccgccaccctgcagctcaccgtgctgcaccgcgcgctgctcggcctcgacaagttcctgggccgcgccgaggtggacctgcgggatctgcaccgcgaccagggccgcaggaagacgcagtggtataagttgaaatccaaaccaggaaagaaggacaaggagcgaggagaaattgaggttgacatccagtttatgagaaacaacatgactgccagcatgtttgacctttctatgaaagacaagtctcggaatccatttggaaagctgaaggacaagatcaaggggaagaataaggacagtgggtcagacaccgcctccgccatcatccctagcacgacaccttcggtcgacagtgatgatgagtctgtggttaaagacaagaaaaagaaatcaaagatcaagaccttactttccaagtcaaatttgcagaagacgcctctttcccagtccatgtctgtcctgccgacttcaaagccagaaaaagtgctgcttcgtcccggagactttcagtcccagtgggatgaagatgacaatgaggatgagtcctcctcggcctcggatgtcatgtctcacaagagaacagcgagtacggatcttaagcaactgaaccaggtcaactttacccttcccaagaaggaaggactttcctttcttggtggccttcggtctaagaatgatgtcctttcccgctctaatgtctgcatcaatgggaaccatgtttacctggagcagccagaagccaagggtgagatcaaggatagcagcccgtcctcctccccatcccccaagggcttcagaaagaagcatttgttctcttctacagagaacctggcggctgggtcttggaaggagcctgctgaaggaggtgggctgtcttctgacaggcagctctccgaatcttccaccaaggactccttgaagtctatgaccctgccgtcctaccgacctgccccactggtcagtggggacctcagggaaaacatggcccccgcaaactcagaggccacaaaagaagctaaggagagcaagaagccagagagcaggaggtcctctttgctgtctctgatgacggggaagaaggatgtggctaagggcagtgaaggtgaaaaccctctcacggtcccagggagggagaaggaaggcatgctgatgggggttaagccgggggaggacgcatcggggcctgctgaagaccttgtgagaagatctgagaaagatactgcagctgttgtctccagacagggcagctccctgaacctctttgaagatgtgcagatcacagaaccagaagctgagccagagtccaagtctgaaccgagacctccaatttcctctccgagggctccccagaccagagctgtcaagccccgactggaagtgtctccagaggcgcaacccacagccaggcttccttcccctactgactccccttcctctcttcctcctcttccttctagctctggccaggcatctgtcccctctgaattgggacatggtgcagacacacagtcctctgagagtccttctgtcttctcctctctctcatctcccatagcagctcccatttccacatccactccaattgaaagctggcctctcgtagacaggggccaggccaagtctgaaggaccacccttgctccctaaggcagagttgcaaactgagagtttaacaccggttccaaattctggttcttctgccctgggatcacttttcaaacagccatcctttccagcaaataaagggacagaagattctctgatgggcaggacccgtgagacaggcacagagaagaacaccagcagccttgagttggaggagtctctcccagagcagcctgaaacagggcgacaagaggaagaacttccgagattcccctgcaaaaaacaagactacagcccatcatctggagaagcccaggaagtaccgtttgccctttcactcagcagtgatggagctgtgagccctgttggggagcttgcagcaggaggagacagagacttggagagtcaggctgggtctcttgtggagagcaaagccagggatgcagctgaagaagtggcgccccctcttcccatgggagcatcagtcccttccattgattccatgatgcggaagctggaagagatgggtctgaacctccgcaaggaccagaagaaaaccaagaagcgtgtgtcattttctgagcagctcttcacggaagaggcagtggcgggggctgccttgctggtggaaggacacagcagttgtccccaggagctgaaccctgcatggtctgttgctggaaacgcgtctgacggagagcctcctgagtctccccacgcagaggactcagaaagggaatcggtgaccacacctgggccagcgacgtgtggtgcgccagcctccccagcggatcacctcctcctcccctcccaggaggagagtttctccgaagtccccatgagtgaagcaagctcagcgaaagacactccactctttaggatggagggagaggatgcccttgtgactcagtatcagagcaaagccagtgaccacgaaggtttattgtctgaccccttgagtgaccttcagttggtctcagattttaaatctccaatcatggccgatctgaacttaagccttccttccattcctgaagtcgcatcggatgatgaaagaatagatcaggttgaagatgacggagatcaggttgaagatgatggagagacagcaaagtcgtcaactctggacataggagctttgtccttgggcttggtagtcccctgtcctgagaggggaaaggggcccagtggcgaggcagataggttggtactgggggagggcctgtgtgatttcaggctgcaagcaccccaggcatctgtgacagctccttcagagcagaccacagagttcggaattcacaaaccacatcttggcaagagctcaagcttggataaacagctgccaggccccagtggtggtgaggaagaaaaaccgatgggaaatgggagtccaagcccgcctcctggcacatccctggacaatcctgtacccagcccctccccttctgagatctttcctgtcacacactctttccccagctctgcacattctgacactcaccacaccagcacagcagaatctcaaaaaaaagccacagcagagggctccgctggtagagttgaaaattttggcaagaggaagccactcctccaggcctgggtctcaccctcggagacacatccagtctcagctcagccaggcgctggaactgggtcagccaagcacagacttcatcctgtgaagccaatgaatgcaatggccaccaaggttgctaactgcagcttgggaactgccaccatcatcagtgagaacttgaacaatgaggtcatgatgaagaaatacagcccctcggaccctgcatttgcatatgcgcagctgacccacgatgagctgattcagctggtcctcaaacagaaggaaacgataagcaagaaggagttccaggtccgcgagctggaagactacattgacaacctgcttgtcagggtcatggaagaaacccccaatatcctccgcatcccgactcaggttggcaaaaaagcaggaaagatgtaaatcagcagaaaaaaaacaccgagacgtttctgtgacttcactttcacctgctccaggggtcaaggacttgccttgcctgataaccagccagcaggctccgaatcaccatctccctcacatgttatccggcaagagtgaattctaccaatggaagccaggttaatgattacaattaatcttttactgtacattcccaaggctttagttttaaatgccactgtgcctttaacaaggttgtaaatattttatgcccaccagagatgtggtcataagatctgatcctgagccagagattcagatggcacaggaagtattcatgtattttaacactggggttttctttctttcatactgagattttttttcagtatgtatcctccagctcttaaagcttacctgagaaagctttaaatgagaaaaggaccatgcgattggtgctgtgttacatacacatactttcttggcttctgagtagctcaggtgtggcttttggctgcagatgttaaattttgataccatgtaaacctacccagcttctcagacttgggtcttgttttttgatgggaacagaggtgtttagagaaagcctctgagtatgcctttcagattttgaacaagcggccttttctaaacatcgacttctactactctctagccttaaaataccttctgcttagatccagggcccttctactggagataggaaaagtagaattcaggaattaaaagaattactctttattcaatttgaggaacttggtgaaagcccctcctcttatgacagccaggttcctgctggctagaccagcctattcagcgctttgctaggggattgggtggtccacgcactcgctaatacagttctccaggtgtggaatgatgtcaatacgattgcttggccttttccccctgtgcctttgctcggtgctctggtttcctcagcaacactccttgtaaggggcagagacagggtccaccaactccccaagatgaagaagccccttcaggccagtcgtggtggctcatgcctgtaatcccagcactttgcaaggccgaggagggtggatcacttgaggtcaggagttcgagaccagcctgaccaacatggcgaaaccccatctctactaaaaatacaaaaattagcttggcatggtggtgcgtgcctgtaatcccagctactcgggaggctggggcaggagaattgcttgaacttgggagatggaggctgcagcgagccaagatcgtgccactgcactccagcctgggcaagagtttttttaagactcttaaaaaaagagcctgggcaatttttttaagactctgtcttaaaaaaaactaaaaagaaaaaaagaagccccttcactctacaggggacaggagaccatggattggaccccaaagggattgaactgcatctgcatgtctgtcctttgaacactttctctccctgcccaaaaggaaacccaaattatttgtgggatactggggaaattgtagtgaagggcttaatgtagttaataaaagttaaaagtcagtagaaaacaggtgcctcagccttcaaatggttgctttttttccattttccctcatgaatagactcaccagcattttacccccttgttataaaactgtgcagagcaagaagatgatacttatttttgaatttgtatttttaaaactagatttatagactttttttttttttaactagggcacttgcttccttcttagctaaaagcaccagctgagatttttcaggtaattttgttgttactcacttaagactggaattagaatgtttctggtatttctcatttttttccctggctatgatagaatctcatctaatcttgacatctctcctaggggaagaatatcacaggctaatagcgtggttgggggtgaagatgatagcagttattaaatcaggaatctcttttatgtgtgtccttgttacattgaggttaagagacaaaatcattggcagtgcaatctctttccaggatttcgtttgctgtggcattggttatatcagagcactttaatctgaaggatgatactgtaacttgatttatctaattagcttttaattatctacagctattttattttatttaattctctcctacagtactgggaccactgtaaacttctcagatgacttgtatttttgtagtgctatgaaatttatttacatacttataaagaaaactgtatgttcacttgaactctgaaaatgtacatgtatggctggacgcggtggctcacgcctgtaatcccagcactttgggaggctgaggcgggtgaatcacttgattgaggtcaggagttcgagaccagcctggccaacatggcaaaaccccgtctctactaaaaaatacagaaattagctgggtgtggtggcagacagctgtaatctcagctgctcgggaggctgaggcacaagaatcgcttgagccagggaggtggaggttgcagtgagctgagatcacatcattgcactccagcctgggcaacgggcgagactctgtctcaaaaaaaagaaagaaagaaaaggtacatgtatatatttgtcctgcattatgttttttacttgatataaatgtatttttactgtgatagtccaagtgccctggggggcaggtgtgctctatgtggttcttcttccattggagagctggcgtagagatctgcagtgttcacaaggatgttggtttggagatgtctgctgctaggacctggggtgtgtgactcagtccatatgagagggacatctgggtggaggagtaaattcctgtgctctgaaatgccacttggtagctctggacaatgaaggacaattgactcaagggtgcctggcttctgctgctgctgggaaaaaattcagtttatagcattcctgcacctcccaaagtagataacctggaggtcattcagttaacaactgtccctgaggactcagttttgggggaggggttatctgggagaagctttagcctgttctgagccattaggagacattagtgaattggagcactggagaatcctacaaatggcctatgtctcagaagagctgggacctccttccagctgctgcagatgctgacaggccctgggaggctgctgtgctctggagaagctggagcagctcatttcttggcctagcctggctgcctcagaaagagcagtcaggacttgagggaagcatcaaattctatacccataaactgcagttggaagtcagctttttgaaatgtccagcctttgcccaattgtttcagatcatctcatgcctcaggctttggcaggtatcctgccctccatcttattccagtgtgttcacctcatcaaggcagcagagtggatgaaggagtaagtctgccctttgccatactgaacagctgtggaccccgattggtgagggctctgcatatgcctgtatgaaggagatacaggtgtgtgtgcacatgccggtatgaagaagacacaggcatgtgcttctcagttttgctaacagtgggagctcaacggggcagagggaggaaggtccatgatgctcagccacatactgtagagagaggcaatttaatgttaaatgacgcaccatcctccctcccacccttctcccagtcaactttttttctttttctagaactactaattatctctcaaggctgaaaaattaattgccttaggtggagaacttaattcctagtatccaccaaacttaactccgtatctccatatggtgtctccatatctactgtgtgagctacttaactgacgccctcttcctccaactgaaggatcgcccaacgtttttggattatagaattattatttcctgctttctttctttgggacttttgaatttctttggtttcgtttttaagaagtaacccaacatttcctacaacactaaataaaatggtacttacctttcaaa

SEQ ID NO: 173019 - DNA, 1866 bp, Homo sapiens
  Payload ID: 14000
  Gene Symbol: RAB11FIP1
  Gene Name: RAB11 family interacting protein 1 (class I)
  ENST ID: ENST00000522727
  CDS Start-End: 225-1730
tgttatcgtcaccatgtccctaatggtctcggctggccggggcctgggggccgtgtggtccccaacccacgtgcaggtgacggtgctgcaggcgcggggcctgcgggccaagggccccgggggcacgagcgacgcgtacgcggtgatccaggtggtataagttgaaatccaaaccaggaaagaaggacaaggagcgaggagaaattgaggttgacatccagtttatgagaaacaacatgactgccagcatgtttgacctttctatgaaagacaagtctcggaatccatttggaaagctgaaggacaagatcaaggggaagaataaggacagtgggtcagacaccgcctccgccatcatccctagcacgacaccttcggtcgacagtgatgatgagtctgtggttaaagacaagaaaaagaaatcaaagatcaagaccttactttccaagtcaaatttgcagaagacgcctctttcccagtccatgtctgtcctgccgacttcaaagccagaaaaagtgctgcttcgtcccggagactttcagtcccagtgggatgaagatgacaatgaggatgagtcctcctcggcctcggatgtcatgtctcacaagagaacagcgagtacggatcttaagcaactgaaccaggtcaactttacccttcccaagaaggaaggactttcctttcttggtggccttcggtctaagaatgatgtcctttcccgctctaatgtctgcatcaatgggaaccatgtttacctggagcagccagaagccaagggtgagatcaaggatagcagcccgtcctcctccccatcccccaagggcttcagaaagaagcatttgttctcttctacagagaacctggcggctgggtcttggaaggagcctgctgaaggaggtgggctgtcttctgacaggcagctctccgaatcttccaccaaggactccttgaagtctatgaccctgccgtcctaccgacctgccccactggtcagtggggacctcagggaaaacatggcccccgcaaactcagaggccacaaaagaagctaaggagagcaagaagccagagagcaggaggtcctctttgctgtctctgatgacggggaagaaggatgtggctaagggcagtgaaggtgaaaaccctctcacggtcccagggagggagaaggaaggcatgctgatgggggttaagccgggggaggacgcatcggggcctgctgaagaccttgtgagaagatctgagaaagatactgcagctgttgtctccagacagggcagctccctgaacctctttgaagatgtgcagatcacagaaccagaagctgagccagagtccaagtctgaaccgagacctccaatttcctctccgagggctccccagaccagagctgtcaagccccgacttcatcctgtgaagccaatgaatgcaatggccaccaaggttgctaactgcagcttgggaactgccaccatcatcagtgagaacttgaacaatgaggtcatgatgaagaaatacagcccctcggaccctgcatttgcatatgcgcagctgacccacgatgagctgattcagctggtcctcaaacagaaggaaacgataagcaagaaggagttccaggtccgcgagctggaagactacattgacaacctgcttgtcagggtcatggaagaaacccccaatatcctccgcatcccgactcaggttggcaaaaaagcaggaaagatgtaaatcagcagaaaaaaaacaccgagacgtttctgtgacttcactttcacctgctccaggggtcaaggacttgccttgcctgataaccagccagcaggctccgaatcaccatctccctcacatgttatccggcaagagt

SEQ ID NO: 173020 - DNA, 1959 bp, Homo sapiens
  Payload ID: 14000
  Gene Symbol: RAB11FIP1
  Gene Name: RAB11 family interacting protein 1 (class I)
  Uniprot ID: Q6WKZ4
  ENST ID: ENST00000524118
  CDS Start-End: 640-1959
acactggatcctatctttgtctagcgcgtgtcttctcaaaaataaaagtgcaaaataaaaaacaaaacaaaagaaataaaagtgcaaattctgctctcagccgggtgcagtggctcacgcctgtaatcccaacattttgggaggctgaggcgggcggatcatctgaggtcaggagttcgagtccagcctggctaccatggtgaaaccccatctctactaaaaatacaaaaattagctggacatggtcacgcgctcctgtaatctcagctactcaggaggctgaggcaggagaatcacttgaacccaggaggcagaggctgcagtgagccgagatggtggcattgcactccagcctgggtgacagagcaagactctgtgtcaaaaaaaaaaaaaaaaaaaaaaaaaaaaattctgctctcatctaccacttcccgaagagaaagcatgagaatgcatgcattgaagaggctgctggtagcagagaggagaggccagttcatggggattgtgaacattgttgcagttgcttccattcaaaggtaactcctcagcctttctcctttcaggtggtataagttgaaatccaaaccaggaaagaaggacaaggagcgaggagaaattgaggttgacatccagtttatgagaaacaacatgactgccagcatgtttgacctttctatgaaagacaagtctcggaatccatttggaaagctgaaggacaagatcaaggggaagaataaggacagtgggtcagacaccgcctccgccatcatccctagcacgacaccttcggtcgacagtgatgatgagtctgtggttaaagacaagaaaaagaaatcaaagatcaagaccttactttccaagtcaaatttgcagaagacgcctctttcccagtccatgtctgtcctgccgacttcaaagccagaaaaagtgctgcttcgtcccggagactttcagtcccagtgggatgaagatgacaatgaggatgagtcctcctcggcctcggatgtcatgtctcacaagagaacagcgagtacggatcttaagcaactgaaccaggtcaactttacccttcccaagaaggaaggactttcctttcttggtggccttcggtctaagaatgatgtcctttcccgctctaatgtctgcatcaatgggaaccatgtttacctggagcagccagaagccaagggtgagatcaaggatagcagcccgtcctcctccccatcccccaagggcttcagaaagaagcatttgttctcttctacagagaacctggcggctgggtcttggaaggagcctgctgaaggaggtgggctgtcttctgacaggcagctctccgaatcttccaccaaggactccttgaagtctatgaccctgccgtcctaccgacctgccccactggtcagtggggacctcagggaaaacatggcccccgcaaactcagaggccacaaaagaagctaaggagagcaagaagccagagagcaggaggtcctctttgctgtctctgatgacggggaagaaggatgtggctaagggcagtgaaggtgaaaaccctctcacggtcccagggagggagaaggaaggcatgctgatgggggttaagccgggggaggacgcatcggggcctgctgaagaccttgtgagaagatctgagaaagatactgcagctgttgtctccagacagggcagctccctgaacctctttgaagatgtgcagatcacagaaccagaagctgagccagagtccaagtctgaaccgagacctccaatttcctctccgagggctccccagaccagagctgtcaagccccgacttcatcctgtgaagccaatgaatgcaatggccaccaaggttgctaactgcagcttgggaactgccaccatcatcagtgagaacttgaacaatgaggtcatgatgaaggtatgtcctctgagaagctggtgtgttcgttag

SEQ ID NO: 173021 - DNA, 6061 bp, Homo sapiens
  Payload ID: 14001
  Gene Symbol: RAB11FIP2
  Gene Name: RAB11 family interacting protein 2 (class I)
  Uniprot ID: Q7L804
  ENST ID: ENST00000355624
  CDS Start-End: 441-1979
gggcgggcgggaggcgcggaggcagcggaggctgctcggccgcaaggaggcaggcgggaggccaggggtgcagaattggggcgggggctcccttcacccccgcagccctccgcccgggtccgtgtggccaggcctcacgtgccccgcaggcctggggaaggtggagacaggggcgggggtccgcgcagaggcctgcacggcgcggccaggtgatggtgggcctctgtgtttctccagacgaaaggggacccccggagcggccgtgcccctgggctgcccccgcgaggcgttttgacatcagccatagggaagtcggggagccctgagcctgcctgtttccgttaagtgtccttaggatgcagtgattaaggaattaggctctccctccgggaggggcactgcctgtgctagggaactcgggggcagagaaacaggacaggatgatgctgtccgagcaagcccaaaagtggtttccaacccacgtgcaggtcacagtgctccaagccaaagatctgaagccaaaaggcaaaagtggtaccaatgacacatacactataattcagctgggcaaggaaaagtactccacctctgtagctgagaaaacccttgagccagtttggaaggaggaggcctctttcgagctacctggattgctaattcagggaagtccagagaaatacattcttttccttatagttatgcacaggtccctggtgggtctggataaatttttagggcaggtggcaatcaatctcaatgacatctttgaggacaaacaaagaaggaaaacagagtggtttagattagaatccaaacaaggaaaacgaatcaaaaacaggggtgagataaaggtcaatattcagtttatgaggaacaatatgaccgcaagtatgtttgacttatcaatgaaggacaaaaccagatctccttttgcaaagttaaaagataagatgaagggtagaaaaaatgatggaacattttctgatacgtcttctgcaatcattccaagtactcacatgcccgatgccaatagtgaattttcaagtggtgaaatacagatgaaatccaaaccaaaaaagccttttctcttgggtcctcagcgactctcgtcagcgcattcaatgtctgatttatctgggtcccatatgtcttctgagaaactgaaggctggcaccataggtcaaacacatcttctcggacaccagttagattcctttggaacagttccagaaagtggaagtctcaaatctccacacagaagaacattaagctttgatacttctaaaatgaaccaacctgacagcattgtggatgaaggtgaattgtgtttcggaagacaaaatgacccatttacaaatgtgactgcttcattaccccaaaaatttgcaacactgccaaggaagaaaaatccatttgaagaaagcagcgaaacatgggacagcagcatgaatttattttcaaaaccaattgaaataagaaaagaaaataaaagagagaaaagggagaaagttagcctgtttgaaagagtgactggaaaaaaagatagcagaagatctgataaacttaacaatgggggatctgatagcccttgtgacttgaaatcacctaatgcatttagtgaaaatcgccaggactattttgattatgagtcaaccaatccatttacagcaaaattcagggcttcaaatataatgccatcttcaagttttcatatgagtccaacaagcaatgaagacctcaggaaaatcccggacagcaacccctttgatgccactgcagggtatcgtagtctgacctatgaagaggttctacaggagctggtgaaacacaaagaactccttaggaggaaagacacccacatccgggaactcgaggactacatcgacaacctccttgtaagggtaatggaagaaacgcccagtattctcagagtgccgtatgaaccatccaggaaagctggcaaattctctaacagttaataaagccaattgtattgtattgataattggacaaagagagagaaagaaagaaggaaggaaggaaaaacttgttactgaaagagactacactatcaggtttcattacatattctcctttattgtgaagagtagttttacctgtaaatattagcagggactatcaagagtgacctttgaagcaagctaaatcatttaaatgtttaaattgaaaatgggccagattctcaatgaataagtggttccttaggactcactcaggtgctggtactgacccactaatctgccataggcccagaaatatcttcagaagtacgtgagttgttcctcaggaatagatttttcataaagcagaattgatcctgtggctggtttctcagaaatcagtttgtagaaatatttagcttcaggaatactgctcgttataaacactactaaaaaaacagtttatattttatatacacatatgtacatgaatatatatatattcatgtatcttgtatataaaatataggcatatacctcatatatacatgtgtttttagaacatttagaaacaattgattgcctctaaagttaggctaccaatttcttgatttgaaaatgtgtgtgctctattgatgcaagacaagtcatccttcctactgtcatggtttgttatagagaagctgcttcaaatcactcttgactacatggaccttggtttcaaagtgagctgctatatattattctagcatcaaagtttttctctttccccaaaagtgatgatctcaagtccttttttaaagaatgacaaattttaggagacttcattaacttcataacagcatgaatttatttgaattaattaacatttgagtttgtttaaggtataagcagaagataagctaatatagcttgttttgttgaaattctgcatgcctttaaatcactagcaaagcaaatattataaagttatatctgaaaataattgtgggaagtatgtgattgcctggtgtgtctgataacccaaagcagcgggcagattccaggaatgaagaattaggcttggtttcaggttacataaataatagagcagatggttgcctttgggtcttgaaccaaaataagacttactaaaggaagagtgagtttttagaagagaactttacgagcgtgacattatgcattactccacatccaccctttaagaattgatttattacaaaattatgttctattttaaagtccactcccccaaaatactgatttcttccatggattatttttatatgatttgtacaaattttttctgaaatttaaattgacaagcaatgttataaaaatattgctaatcttctgcttatttttcagcctttaaagtctgaaatactataaaacactgagagtatctatgtctttctgaatttaaaatgaaaattcatgtccatatggagacttacatattccccaatctttccatgaattgcatttttttctaatacttatctctgttaagactccattgaaagttaaacaaaaagccgatataatagtttgggttttttttttttgcttattttagtattttgaatcagagaatacttggccaagctcgtatttgtaaactaaaaccccttgttatttgtatcttctgcatttcagttttactgtaagaacatacattttgaaattatgaacatttttttcataaaaattaaatgctttaagaaatggagaaggaaaaatagcttttatcaatttttttctcctcaagattctgtaataaacctcaaagtctggtgtagaatggtattttcccgtttgaggtcttggtagttttttttttttttttaaacatggtgccacttttaattaactaaatgttacaaaattctcagcatttgtttttgtctggtagtattattgagtcttttcatacacttcttaaaatgtgaaaatctatgttttcagtattatgacagtatctgcagatactataataatatgctttggccaaatttgctgtttatagagtgaaccaagatgtcagttttgtattggggatatgttttacataaatagaactcatttaaaagtatggttcaagtactgctcttctttttatggggaaattgatttttaaggagcgattcttttcctatataaaagctattgaggcttagctttattcatacatgagtgatttggttataactcaatcaaaatttttatctttaaatctgagacaagtattatatttaaaactagatctattaatacattcatcactgcctgaaaatttgctgttctaatgtttgtgaattttcactcattacctagagtaaacttattgcatattttcataatcagtcaaaataataaaactaaaaacaaaaagtaaaaattagttcccaagtaaatatatcagtgtttcctgtgtttgggcagaagtgcaaagtagttttaatttctcacgttgtagaaaaagaggccaaaaaggtcaccttagtttatttttccaaaacataactttaggtattctaatgtattttgttagttgcttagaaatggaaataaaatatatgtgcttattaaataatgcacagtacactagattatagagtttatttttgcttttatgctttaaagaatgcatgcccaaaacactactaccaacaagaggattttttaaaatcacagaattgatatttatctcaagactatcttaagctaatgtacttctgttacataattaaactatttctgctattatttttaaagcagtattattttataaccaattctaaaattcagctttaaaaatattgaacataccttcctaccacttacgcttcaagtttcatttattgaataccagggtcatatcttagaattgtatataaaacaacatgtaacccattcatgaaaaacgtttttaagtattgctttttgctgctatgttctgcattgagcctagttttgccattgtcccctgaatgtagtattatctatagattatacataactacatctattgcttttggtggtaaatcaagatttagttgtaattttccagctgtgaaaatgttgccttgtatttaaaagggtttcatgaatggaaacctaagtaaaactaagctcattagtgacagacttgttttcttcttgttattcctccagcaactccctcaccaccacgcctccctgcctaccatccccggaagggtgcttattctttaacaaagagaatctaaaaaaaaaaacaaaaaactgttgtctaatatatctacagtaaatgttacactagagcttttattttcctctgtagcttttcagaagaagcaatttaccttggatttgtaaatcaagctgaaacttttttgatgttcatgtactcatatgtcttgtaggtggtaggtgtcacttgtgtgtatgtgtaagtgaagtatgatgcatgctcattcacttggtccctttgaaataagggaaaggatcacagtgctgctgggccatgatggtatgtagaagggtctgtcagcacacatggaaagcccccatttgcacagatgtagaactttaataatccagatgcaatcattggaagtatttaatatgcaattggtagcaccttagctaattaatctgcatatgaagcattttctgatatatttaataagaggtatagaagctcttcaagcattaaaatagagttgatgtttcattccatttgttttatccatcaaaaaatgcactctcacagtggagttgaagtctaatacatgatacatgtgggcctgttagtcttcgaagcttccagatggtttgtgttttgaggtacaaaaaaatgctgcagatctagaaatgcatatatttagcgggtatttgaaagatagaagcattatttataactgaagagtataacacttatcttcttaagtaaatgctctcataacttgtatacatttttgcaggtacaaattcaaaagtatgtaagcattgtataatgtgacaattgtataatttatgtaatctgatgcatgaatcagaatttttatataatatatgattattgacttatagttgattaaagtgtttaaacttaa

SEQ ID NO: 173022 - DNA, 6119 bp, Homo sapiens
  Payload ID: 14001
  Gene Symbol: RAB11FIP2
  Gene Name: RAB11 family interacting protein 2 (class I)
  Uniprot ID: Q7L804
  ENST ID: ENST00000369199
  CDS Start-End: 441-2039
gggcgggcgggaggcgcggaggcagcggaggctgctcggccgcaaggaggcaggcgggaggccaggggtgcagaattggggcgggggctcccttcacccccgcagccctccgcccgggtccgtgtggccaggcctcacgtgccccgcaggcctggggaaggtggagacaggggcgggggtccgcgcagaggcctgcacggcgcggccaggtgatggtgggcctctgtgtttctccagacgaaaggggacccccggagcggccgtgcccctgggctgcccccgcgaggcgttttgacatcagccatagggaagtcggggagccctgagcctgcctgtttccgttaagtgtccttaggatgcagtgattaaggaattaggctctccctccgggaggggcactgcctgtgctagggaactcgggggcagagaaacaggacaggatgatgctgtccgagcaagcccaaaagtggtttccaacccacgtgcaggtcacagtgctccaagccaaagatctgaagccaaaaggcaaaagtggtaccaatgacacatacactataattcagctgggcaaggaaaagtactccacctctgtagctgagaaaacccttgagccagtttggaaggaggaggcctctttcgagctacctggattgctaattcagggaagtccagagaaatacattcttttccttatagttatgcacaggtccctggtgggtctggataaatttttagggcaggtggcaatcaatctcaatgacatctttgaggacaaacaaagaaggaaaacagagtggtttagattagaatccaaacaaggaaaacgaatcaaaaacaggggtgagataaaggtcaatattcagtttatgaggaacaatatgaccgcaagtatgtttgacttatcaatgaaggacaaaaccagatctccttttgcaaagttaaaagataagatgaagggtagaaaaaatgatggaacattttctgatacgtcttctgcaatcattccaagtactcacatgcccgatgccaatagtgaattttcaagtggtgaaatacagatgaaatccaaaccaaaaaagccttttctcttgggtcctcagcgactctcgtcagcgcattcaatgtctgatttatctgggtcccatatgtcttctgagaaactgaaggctggcaccataggtcaaacacatcttctcggacaccagttagattcctttggaacagttccagaaagtggaagtctcaaatctccacacagaagaacattaagctttgatacttctaaaatgaaccaacctgacagcattgtggatgaaggtgaattgtgtttcggaagacaaaatgacccatttacaaatgtgactgcttcattaccccaaaaatttgcaacactgccaaggaagaaaaatccatttgaagaaagcagcgaaacatgggacagcagcatgaatttattttcaaaaccaattgaaataagaaaagaaaataaaagagagaaaagggagaaagttagcctgtttgaaagagtgactggaaaaaaagatagcagaagatctgataaacttaacaatgggggatctgatagcccttgtgacttgaaatcacctaatgcatttagtgaaaatcgccaggactattttgattatgagtcaaccaatccatttacagcaaaattcagggcttcaaatataatgccatcttcaagaaatactttgctgacccctgcagtagctgaatggagaggatctttgagatgggcagagctttttcatatgagtccaacaagcaatgaagacctcaggaaaatcccggacagcaacccctttgatgccactgcagggtatcgtagtctgacctatgaagaggttctacaggagctggtgaaacacaaagaactccttaggaggaaagacacccacatccgggaactcgaggactacatcgacaacctccttgtaagggtaatggaagaaacgcccagtattctcagagtgccgtatgaaccatccaggaaagctggcaaattctctaacagttaataaagccaattgtattgtattgataattggacaaagagagagaaagaaagaaggaaggaaggaaaaacttgttactgaaagagactacactatcaggtttcattacatattctcctttattgtgaagagtagttttacctgtaaatattagcagggactatcaagagtgacctttgaagcaagctaaatcatttaaatgtttaaattgaaaatgggccagattctcaatgaataagtggttccttaggactcactcaggtgctggtactgacccactaatctgccataggcccagaaatatcttcagaagtacgtgagttgttcctcaggaatagatttttcataaagcagaattgatcctgtggctggtttctcagaaatcagtttgtagaaatatttagcttcaggaatactgctcgttataaacactactaaaaaaacagtttatattttatatacacatatgtacatgaatatatatatattcatgtatcttgtatataaaatataggcatatacctcatatatacatgtgtttttagaacatttagaaacaattgattgcctctaaagttaggctaccaatttcttgatttgaaaatgtgtgtgctctattgatgcaagacaagtcatccttcctactgtcatggtttgttatagagaagctgcttcaaatcactcttgactacatggaccttggtttcaaagtgagctgctatatattattctagcatcaaagtttttctctttccccaaaagtgatgatctcaagtccttttttaaagaatgacaaattttaggagacttcattaacttcataacagcatgaatttatttgaattaattaacatttgagtttgtttaaggtataagcagaagataagctaatatagcttgttttgttgaaattctgcatgcctttaaatcactagcaaagcaaatattataaagttatatctgaaaataattgtgggaagtatgtgattgcctggtgtgtctgataacccaaagcagcgggcagattccaggaatgaagaattaggcttggtttcaggttacataaataatagagcagatggttgcctttgggtcttgaaccaaaataagacttactaaaggaagagtgagtttttagaagagaactttacgagcgtgacattatgcattactccacatccaccctttaagaattgatttattacaaaattatgttctattttaaagtccactcccccaaaatactgatttcttccatggattatttttatatgatttgtacaaattttttctgaaatttaaattgacaagcaatgttataaaaatattgctaatcttctgcttatttttcagcctttaaagtctgaaatactataaaacactgagagtatctatgtctttctgaatttaaaatgaaaattcatgtccatatggagacttacatattccccaatctttccatgaattgcatttttttctaatacttatctctgttaagactccattgaaagttaaacaaaaagccgatataatagtttgggttttttttttttgcttattttagtattttgaatcagagaatacttggccaagctcgtatttgtaaactaaaaccccttgttatttgtatcttctgcatttcagttttactgtaagaacatacattttgaaattatgaacatttttttcataaaaattaaatgctttaagaaatggagaaggaaaaatagcttttatcaatttttttctcctcaagattctgtaataaacctcaaagtctggtgtagaatggtattttcccgtttgaggtcttggtagttttttttttttttttaaacatggtgccacttttaattaactaaatgttacaaaattctcagcatttgtttttgtctggtagtattattgagtcttttcatacacttcttaaaatgtgaaaatctatgttttcagtattatgacagtatctgcagatactataataatatgctttggccaaatttgctgtttatagagtgaaccaagatgtcagttttgtattggggatatgttttacataaatagaactcatttaaaagtatggttcaagtactgctcttctttttatggggaaattgatttttaaggagcgattcttttcctatataaaagctattgaggcttagctttattcatacatgagtgatttggttataactcaatcaaaatttttatctttaaatctgagacaagtattatatttaaaactagatctattaatacattcatcactgcctgaaaatttgctgttctaatgtttgtgaattttcactcattacctagagtaaacttattgcatattttcataatcagtcaaaataataaaactaaaaacaaaaagtaaaaattagttcccaagtaaatatatcagtgtttcctgtgtttgggcagaagtgcaaagtagttttaatttctcacgttgtagaaaaagaggccaaaaaggtcaccttagtttatttttccaaaacataactttaggtattctaatgtattttgttagttgcttagaaatggaaataaaatatatgtgcttattaaataatgcacagtacactagattatagagtttatttttgcttttatgctttaaagaatgcatgcccaaaacactactaccaacaagaggattttttaaaatcacagaattgatatttatctcaagactatcttaagctaatgtacttctgttacataattaaactatttctgctattatttttaaagcagtattattttataaccaattctaaaattcagctttaaaaatattgaacataccttcctaccacttacgcttcaagtttcatttattgaataccagggtcatatcttagaattgtatataaaacaacatgtaacccattcatgaaaaacgtttttaagtattgctttttgctgctatgttctgcattgagcctagttttgccattgtcccctgaatgtagtattatctatagattatacataactacatctattgcttttggtggtaaatcaagatttagttgtaattttccagctgtgaaaatgttgccttgtatttaaaagggtttcatgaatggaaacctaagtaaaactaagctcattagtgacagacttgttttcttcttgttattcctccagcaactccctcaccaccacgcctccctgcctaccatccccggaagggtgcttattctttaacaaagagaatctaaaaaaaaaaacaaaaaactgttgtctaatatatctacagtaaatgttacactagagcttttattttcctctgtagcttttcagaagaagcaatttaccttggatttgtaaatcaagctgaaacttttttgatgttcatgtactcatatgtcttgtaggtggtaggtgtcacttgtgtgtatgtgtaagtgaagtatgatgcatgctcattcacttggtccctttgaaataagggaaaggatcacagtgctgctgggccatgatggtatgtagaagggtctgtcagcacacatggaaagcccccatttgcacagatgtagaactttaataatccagatgcaatcattggaagtatttaatatgcaattggtagcaccttagctaattaatctgcatatgaagcattttctgatatatttaataagaggtatagaagctcttcaagcattaaaatagagttgatgtttcattccatttgttttatccatcaaaaaatgcactctcacagtggagttgaagtctaatacatgatacatgtgggcctgttagtcttcgaagcttccagatggtttgtgttttgaggtacaaaaaaatgctgcagatctagaaatgcatatatttagcgggtatttgaaagatagaagcattatttataactgaagagtataacacttatcttcttaagtaaatgctctcataacttgtatacatttttgcaggtacaaattcaaaagtatgtaagcattgtataatgtgacaattgtataatttatgtaatctgatgcatgaatcagaatttttatataatatatgattattgacttatagttgattaaagtgtttaaactt

SEQ ID NO: 173023 - DNA, 4831 bp, Homo sapiens
  Payload ID: 14002
  Gene Symbol: RAB11FIP3
  Gene Name: RAB11 family interacting protein 3 (class II)
  Uniprot ID: O75154
  ENST ID: ENST00000262305
  CDS Start-End: 389-2659
cgttagttctccgggtacctcaggcgcctcagcctccttagtctcctcatcctgcttcacaggctccgcggcctccggcctcctcggcccccgtcccccggcctcctcggcccccgtcccccgccatccgccgcccggatcctcgccgccctccctaggccgccccgccgccatgggcctgcgcccgccgcgccgccgggccgagggcagctgaggcgcggtgcgaagatgggcgaggacagagcagggcccgagcgccagccccagcagcccgggcgccccgcgcgcgcccgcccgcgccgccgaggggatgcccgcgcccgccgccgcgccctgagcgcctttgtctgccgcccgcgcccttccgcaccactagcctctcgggagcatggcgtcggccccgccggcctcgcccccgggctcggagccgccggggcccgacccggagccgggcgggccggacgggccgggggcggcacaactggctccgggccctgcggagctacgcctcggagcgcccgtcggcggccccgacccgcagtccccgggcctggatgagcctgcgcccggggccgctgcagatggcggggcgcgttggagcgccgggccggccccggggctggagggaggcccgcgagaccccgggccgtccgccccgccgccgcgctccggcccgcgggggcagcttgcgagccccgacgccccgggcccagggccgcgctccgaagcgccgcttccagaactcgacccgttgttctcctggactgaggagcccgaggagtgtggccccgcgagctgcccggagagcgcgcctttccgcttgcaggggtccagcagcagccaccgagcgcggggcgaggtcgacgtcttctctcccttccccgcgcccacggcgggcgagctggcgctggagcaaggtcccgggtccccgccgcagccctcggacctcagccagacccacccccttccgagcgagcccgtggggagtcaggaggacggcccccgcctccgagccgtgttcgatgccctggacggggatggggacggtttcgtccgcatcgaggacttcatccagtttgctacggtctacggggcagagcaggtgaaggacttaactaagtacttggatcccagtgggctcggcgtgatcagctttgaagacttctaccaagggatcacagccatcagaaacggagatcctgatggccagtgctacggtggtgtcgcttctgcccaagatgaggagcccctggcctgcccggacgagttcgatgacttcgtcacctatgaggccaacgaggtgacggacagcgcgtacatgggctccgagagcacctacagtgagtgtgagaccttcacggacgaggacaccagcaccctggtgcaccctgagctgcaacctgaaggggacgcagacagtgccggcggctcggccgtgccctctgagtgcctggacgccatggaggagcccgaccatggtgccctgctgctgctcccaggcaggcctcacccccatggccagtctgtcatcacggtgatcgggggcgaggagcactttgaggactacggtgaaggcagtgaggcggagctgtccccagagaccctatgcaacgggcagctgggctgcagtgaccccgctttcctcacgcccagtccgacaaagcggctctccagcaagaaggtggcaaggtacctgcaccagtcaggggccctgaccatggaggccctggaggacccttcccccgagctcatggagggcccagaggaggacattgctgacaaggttgtcttcctggaaaggcgtgtgctggagctggaaaaggacacggcagccaccggtgagcaacacagccgcctgaggcaggagaacctgcagctggtgcacagagcaaacgccctggaggagcagctgaaggagcaggagctgagagcctgcgagatggtcctggaagagacccggcgtcagaaggagctcctgtgcaagatggagagggagaagagcattgagatcgagaacctgcagaccaggctacagcaactggacgaggagaacagtgaactccggtcctgcacgccctgtctgaaggccaacattgagcgtctggaggaggagaagcagaagctgttggatgagatagagtcgctgacgctgcggctcagtgaagagcaggagaacaagaggagaatgggggacaggctgagtcacgagaggcaccagttccagagggacaaggaggccacccaggagctgatcgaggacctccgaaagcagctggagcacctgcagctcctcaagctggaggccgagcagcggcggggccgcagcagcagcatgggcctgcaggagtaccacagccgcgcccgggagagcgagctggagcaggaggtccgcaggctgaagcaggacaaccgcaacctgaaggagcagaacgaggagctgaacgggcagatcattaccctcagcatccagggcgccaagagcctcttctccacagccttctctgagtccctggctgcagagatcagctccgtctcccgagatgagctcatggaggcgattcagaagcaggaggagatcaacttccgcctgcaggactacatcgacaggatcatcgtggccatcatggagaccaacccgtccatcctggaggtcaagtagaggcaggaaggtccagcctgagctggattcgggactccaacaccctggagtggttccgtcagaccatgaggagccaagaccagcaggtcccacagccgacagtgcccagagcatgcagggaaccctcgtgcagctgagctggggccgccaaagaccggggctgccaaaggggcagagggtggtggagaggagagggagaaagggaagtcccagggcccggggtccacagaggatgagggttgtggcagggccgtccatcagcgctgaccttccgggggcccagagcttcccagccctgagtcaagctggccatgaacgcgtacacttcagttcagcaggatgggctggagagcctctctgtgcagcggtgtggggtgagccctgctgtggcctccttgtggtggtccctcttcccacgtgcagccctgttgggaagaaaggaagaaaacaggtccctccaggggtgctgctgcctaagccacccacataagtacgctggtgccgtgtcacccatgttgagccgctcctgatggctgacgggctcccagaccctcacctcggacatggtggtgggggaaggacgggtgggcaaggctggtgcgttccccagctctccctacgctgctcgggccattgcccagccagatgtggtcacctcagtccagctctggggcctccaggccatgtggctgttcccacggcccagtcctcgctgcagtaacccctgggggctctgaccacctatgggggccgggcaggagcctctggggcctccactccgacatcaggacctgagatgaccgctgtgtggcgctctctccctgggcagggtggatgccacaggcccctctggctcccaggtgctgcttctccacaggtgcggcctggcccggcctcctaaaggccacaccctccccacgcacttcccaggccagaatccaaacatcgggaaccctgttttcttctgggtgtgtctcacttagaaatcgtggttcttccccgagggtgcatgttgcaggagggagagggcagggaagactcacagcagagcaggagggggcctgtgcttctcggggtctgcaccccaggcacagcggtgtcaccccgcaggaccgcgggcctgccccaacccccagcattcccgggtgggcccagaccccatcaccaagactggccacccgctgcgtgtgtgtgcgcgcgcgtgtacgtgtggccccacatccgccgccttccacgctaggatgtaagaggtcgcctcctattgtacatttggggaaagccttgggtgtaaatcagtgtaaacttggaggagagatttttctatcatgtagagtaggtattttttatagattgaaggttgatcaattttttaatactttcaagagaaaactgtgtatacacatgaaatatatatatatatatatatatatatatgtataatatataaagactggcaccctgcctctctgtgcccaggcccagccctggtgacatggcaccactcagcagtgctgtcactgtaagcatggactcccaggagacagtgtgggaaacgctcctgctttaattccccgagaaacggctcttcctgcctggatgcaggagggcaggggccaccacagattaaagctgttactgcacacgcagaggccggcttcttcctccaggggggccacagggtggggtgggagtcttctgggcctggcccagcttccctcaaggcgtccgaggccatcagttgtctgagctcagaacccagcagacctgcctggctctgcagcttggtcagactaagacccttccaaggccgtaggattgcacctccaggcccagtggagcctggcagctttccagccaggttctggatcctgacgagctgctgagacagcatcaaggtggggcaggtggggcggggcaaattgggcagcacagggctgtgtgggcatcagggctctgggtcacacgcctctggggacgtacgtcccatgtcgggagagccgtcaaaacgtccccgggattaagagaagagtggggggcagggcgcagaggctcacgccataatctcagcactttgggaggccaaggcaggaggatcgcttgaacccgggagttcaagaccagcctgggcaacatagcaaggccccatctctaaaaaataaaaaattaaccagg

SEQ ID NO: 173024 - DNA, 804 bp, Homo sapiens
  Payload ID: 14002
  Gene Symbol: RAB11FIP3
  Gene Name: RAB11 family interacting protein 3 (class II)
  ENST ID: ENST00000452814
  CDS Start-End: 258-804
caggttaaactttctcctaggtggtgatgtgcctccaggtgagcgcacaggctttgcagaaaccccagcatgacaagcaagtaggaaggtgacattgttgtttgagaaaagccagtgacccggttgggacggagacacgatggggagccggtctccaacagcatgcccttcctgaaggtgtgtacagagccaggcccagcctgtgaggccacccgggccagcatctgagggccaacgaggtgacggacagcgcgtacatgggctccgagagcacctacagtgagtgtgagaccttcacggacgaggacaccagcaccctggtgcaccctgagctgcaacctgaaggggacgcagacagtgccggcggctcggccgtgccctctgagtgcctggacgccatggaggagcccgaccatggtgccctgctgctgctcccaggcaggcctcacccccatggccagtctgtcatcacggtgatcgggggcgaggagcactttgaggactacggtgaaggcagtgaggcggagctgtccccagagaccctatgcaacgggcagctgggctgcagtgaccccgctttcctcacgcccagtccgacaaagcggctctccagcaagaaggtggcaaggtacctgcaccagtcaggggccctgaccatggaggccctggaggacccttcccccgagctcatggagggcccagaggaggacattgctgacaaggttgtcttcctggaaaggcgtgtgctggagctggaaaaggacacggcagccaccggtgagcaacacagccgcctgaggcagg

SEQ ID NO: 173025 - DNA, 3550 bp, Homo sapiens
  Payload ID: 14002
  Gene Symbol: RAB11FIP3
  Gene Name: RAB11 family interacting protein 3 (class II)
  ENST ID: ENST00000434585
  CDS Start-End: 1-2034
tggactgaggagcccgaggagtgtggccccgcgagctgcccggagagcgcgcctttccgcttgcaggggtccagcagcagccaccgagcgcggggcgaggtcgacgtcttctctcccttccccgcgcccacggcgggcgagctggcgctggagcaaggtcccgggtccccgccgcagccctcggacctcagccagacccacccccttccgagcgagcccgtggggagtcaggaggacggcccccgcctccgagccgtgttcgatgccctggacggggatggggacggtttcgtccgcatcgaggacttcatccagtttgctacggtctacggggcagagcaggtgaaggacttaactaagtacttggatcccagtgggctcggcgtgatcagctttgaagacttctaccaagggatcacagccatcagaaacggagatcctgatggccagtgctacggtggtgtcgcttctgcccaagatgaggagcccctggcctgcccggacgagttcgatgacttcgtcacctatgaggccaacgaggtgacggacagcgcgtacatgggctccgagagcacctacagtgagtgtgagaccttcacggacgaggacaccagcaccctggtgcaccctgagctgcaacctgaaggggacgcagacagtgccggcggctcggccgtgccctctgagtgcctggacgccatggaggagcccgaccatggtgccctgctgctgctcccaggcaggcctcacccccatggccagtctgtcatcacggtgatcgggggcgaggagcactttgaggactacggtgaaggcagtgaggcggagctgtccccagagaccctatgcaacgggcagctgggctgcagtgaccccgctttcctcacgcccagcactgaccctcttgccgcaaagctgcacagcatcctcactgatgaggcgtttgagttttactgtagccagtgccacaaacaaatcaaccgccttgaggatctttctgcccgcctgagtgatcttgaaatgaatagtccgacaaagcggctctccagcaagaaggtggcaaggtacctgcaccagtcaggggccctgaccatggaggccctggaggacccttcccccgagctcatggagggcccagaggaggacattgctgacaaggttgtcttcctggaaaggcgtgtgctggagctggaaaaggacacggcagccaccggtgagcaacacagccgcctgaggcaggagaacctgcagctggtgcacagagcaaacgccctggaggagcagctgaaggagcaggagctgagagcctgcgagatggtcctggaagagacccggcgtcagaaggagctcctgtgcaagatggagagggagaagagcattgagatcgagaacctgcagaccaggctacagcaactggacgaggagaacagtgaactccggtcctgcacgccctgtctgaaggccaacattgagcgtctggaggaggagaagcagaagctgttggatgagatagagtcgctgacgctgcggctcagtgaagagcaggagaacaagaggagaatgggggacaggctgagtcacgagaggcaccagttccagagggacaaggaggccacccaggagctgatcgaggacctccgaaagcagctggagcacctgcagctcctcaagctggaggccgagcagcggcggggccgcagcagcagcatgggcctgcaggagtaccacagccgcgcccgggagagcgagctggagcaggaggtccgcaggctgaagcaggacaaccgcaacctgaaggagcagaacgaggagctgaacgggcagatcattaccctcagcatccagggcgccaagagcctcttctccacagccttctctgagtccctggctgcagagatcagctccgtctcccgagatgagctcatggaggcgattcagaagcaggaggagatcaacttccgcctgcaggactacatcgacaggatcatcgtggccatcatggagaccaacccgtccatcctggaggtcaagtagaggcaggaaggtccagcctgagctggattcgggactccaacaccctggagtggttccgtcagaccatgaggagccaagaccagcaggtcccacagccgacagtgcccagagcatgcagggaaccctcgtgcagctgagctggggccgccaaagaccggggctgccaaaggggcagagggtggtggagaggagagggagaaagggaagtcccagggcccggggtccacagaggatgagggttgtggcagggccgtccatcagcgctgaccttccgggggcccagagcttcccagccctgagtcaagctggccatgaacgcgtacacttcagttcagcaggatgggctggagagcctctctgtgcagcggtgtggggtgagccctgctgtggcctccttgtggtggtccctcttcccacgtgcagccctgttgggaagaaaggaagaaaacaggtccctccaggggtgctgctgcctaagccacccacataagtacgctggtgccgtgtcacccatgttgagccgctcctgatggctgacgggctcccagaccctcacctcggacatggtggtgggggaaggacgggtgggcaaggctggtgcgttccccagctctccctacgctgctcgggccattgcccagccagatgtggtcacctcagtccagctctggggcctccaggccatgtggctgttcccacggcccagtcctcgctgcagtaacccctgggggctctgaccacctatgggggccgggcaggagcctctggggcctccactccgacatcaggacctgagatgaccgctgtgtggcgctctctccctgggcagggtggatgccacaggcccctctggctcccaggtgctgcttctccacaggtgcggcctggcccggcctcctaaaggccacaccctccccacgcacttcccaggccagaatccaaacatcgggaaccctgttttcttctgggtgtgtctcacttagaaatcgtggttcttccccgagggtgcatgttgcaggagggagagggcagggaagactcacagcagagcaggagggggcctgtgcttctcggggtctgcaccccaggcacagcggtgtcaccccgcaggaccgcgggcctgccccaacccccagcattcccgggtgggcccagaccccatcaccaagactggccacccgctgcgtgtgtgtgcgcgcgcgtgtacgtgtggccccacatccgccgccttccacgctaggatgtaagaggtcgcctcctattgtacatttggggaaagccttgggtgtaaatcagtgtaaacttggaggagagatttttctatcatgtagagtaggtattttttatagattgaaggttgatcaattttttaatactttcaagagaaaactgtgtatacacatgaaatatatatatatatatatatatatatatgtataatatataaagactggcaccctgcctctctgtgcccaggcccagccctggtgacatggcaccactcagcagtgctgtc

SEQ ID NO: 173026 - DNA, 580 bp, Homo sapiens
  Payload ID: 14002
  Gene Symbol: RAB11FIP3
  Gene Name: RAB11 family interacting protein 3 (class II)
  ENST ID: ENST00000449879
  CDS Start-End: 108-580
gcagaaaccccagcatgacaagcaagtaggaaggtgacattgttgtttgagaaaagccagtgacccggttgggacggagacacgatggggagccggtctccaacagcatgcccttcctgaaggccaacgaggtgacggacagcgcgtacatgggctccgagagcacctacagtgagtgtgagaccttcacggacgaggacaccagcaccctggtgcaccctgagctgcaacctgaaggggacgcagacagtgccggcggctcggccgtgccctctgagtgcctggacgccatggaggagcccgaccatggtgccctgctgctgctcccaggcaggcctcacccccatggccagtctgtcatcacggtgatcgggggcgaggagcactttgaggactacggtgaaggcagtgaggcggagctgtccccagagaccctatgcaacgggcagctgggctgcagtgaccccgctttcctcacgcccagtccgacaaagcggctctccagcaagaaggtggcaaggtacctgcaccagtcaggggccctgaccatggaggccctggaggacccttcccccgagct

SEQ ID NO: 173027 - DNA, 558 bp, Homo sapiens
  Payload ID: 14002
  Gene Symbol: RAB11FIP3
  Gene Name: RAB11 family interacting protein 3 (class II)
  ENST ID: ENST00000412256
  CDS Start-End: 1-411
ggcggctcggccgtgccctctgagtgcctggacgccatggaggagcccgaccatggtgccctgctgctgctcccaggcaggcctcacccccatggccagtctgtcatcacggtgatcgggggcgaggagcactttgaggactacggtgaaggcagtgaggcggagctgtccccagagaccctatgcaacgggcagctgggctgcagtgaccccgctttcctcacgcccagcactgaccctcttgccgcaaagctgcacagcatcctcactgatgaggcgtttgagttttactgtagccagtgccacaaacaaatcaaccgccttgaggatctttctgcccgcctgagtgatcttgaaatgaatagtccgacaaagcggctctccagcaagaaggtggcaagcttcgtatagatctgttggcttcctgctgtgaaagatggcaacatacacttttatcttcctcccctgccagttcttaccgaaataaacatgcagggttaaggcccttcccagggagccactcagtgtggctgccgggtggcctctgctgccgtcaga

SEQ ID NO: 173028 - DNA, 3203 bp, Homo sapiens
  Payload ID: 14002
  Gene Symbol: RAB11FIP3
  Gene Name: RAB11 family interacting protein 3 (class II)
  Uniprot ID: O75154
  ENST ID: ENST00000450428
  CDS Start-End: 182-1564
attagagcgtgtctgggagcaggttaaactttctcctaggtggtgatgtgcctccaggtgagcgcacaggctttgcagaaaccccagcatgacaagcaagtaggaaggtgacattgttgtttgagaaaagccagtgacccggttgggacggagacacgatggggagccggtctccaacagcatgcccttcctgaaggccaacgaggtgacggacagcgcgtacatgggctccgagagcacctacagtgagtgtgagaccttcacggacgaggacaccagcaccctggtgcaccctgagctgcaacctgaaggggacgcagacagtgccggcggctcggccgtgccctctgagtgcctggacgccatggaggagcccgaccatggtgccctgctgctgctcccaggcaggcctcacccccatggccagtctgtcatcacggtgatcgggggcgaggagcactttgaggactacggtgaaggcagtgaggcggagctgtccccagagaccctatgcaacgggcagctgggctgcagtgaccccgctttcctcacgcccagtccgacaaagcggctctccagcaagaaggtggcaaggtacctgcaccagtcaggggccctgaccatggaggccctggaggacccttcccccgagctcatggagggcccagaggaggacattgctgacaaggttgtcttcctggaaaggcgtgtgctggagctggaaaaggacacggcagccaccggtgagcaacacagccgcctgaggcaggagaacctgcagctggtgcacagagcaaacgccctggaggagcagctgaaggagcaggagctgagagcctgcgagatggtcctggaagagacccggcgtcagaaggagctcctgtgcaagatggagagggagaagagcattgagatcgagaacctgcagaccaggctacagcaactggacgaggagaacagtgaactccggtcctgcacgccctgtctgaaggccaacattgagcgtctggaggaggagaagcagaagctgttggatgagatagagtcgctgacgctgcggctcagtgaagagcaggagaacaagaggagaatgggggacaggctgagtcacgagaggcaccagttccagagggacaaggaggccacccaggagctgatcgaggacctccgaaagcagctggagcacctgcagctcctcaagctggaggccgagcagcggcggggccgcagcagcagcatgggcctgcaggagtaccacagccgcgcccgggagagcgagctggagcaggaggtccgcaggctgaagcaggacaaccgcaacctgaaggagcagaacgaggagctgaacgggcagatcattaccctcagcatccagggcgccaagagcctcttctccacagccttctctgagtccctggctgcagagatcagctccgtctcccgagatgagctcatggaggcgattcagaagcaggaggagatcaacttccgcctgcaggactacatcgacaggatcatcgtggccatcatggagaccaacccgtccatcctggaggtcaagtagaggcaggaaggtccagcctgagctggattcgggactccaacaccctggagtggttccgtcagaccatgaggagccaagaccagcaggtcccacagccgacagtgcccagagcatgcagggaaccctcgtgcagctgagctggggccgccaaagaccggggctgccaaaggggcagagggtggtggagaggagagggagaaagggaagtcccagggcccggggtccacagaggatgagggttgtggcagggccgtccatcagcgctgaccttccgggggcccagagcttcccagccctgagtcaagctggccatgaacgcgtacacttcagttcagcaggatgggctggagagcctctctgtgcagcggtgtggggtgagccctgctgtggcctccttgtggtggtccctcttcccacgtgcagccctgttgggaagaaaggaagaaaacaggtccctccaggggtgctgctgcctaagccacccacataagtacgctggtgccgtgtcacccatgttgagccgctcctgatggctgacgggctcccagaccctcacctcggacatggtggtgggggaaggacgggtgggcaaggctggtgcgttccccagctctccctacgctgctcgggccattgcccagccagatgtggtcacctcagtccagctctggggcctccaggccatgtggctgttcccacggcccagtcctcgctgcagtaacccctgggggctctgaccacctatgggggccgggcaggagcctctggggcctccactccgacatcaggacctgagatgaccgctgtgtggcgctctctccctgggcagggtggatgccacaggcccctctggctcccaggtgctgcttctccacaggtgcggcctggcccggcctcctaaaggccacaccctccccacgcacttcccaggccagaatccaaacatcgggaaccctgttttcttctgggtgtgtctcacttagaaatcgtggttcttccccgagggtgcatgttgcaggagggagagggcagggaagactcacagcagagcaggagggggcctgtgcttctcggggtctgcaccccaggcacagcggtgtcaccccgcaggaccgcgggcctgccccaacccccagcattcccgggtgggcccagaccccatcaccaagactggccacccgctgcgtgtgtgtgcgcgcgcgtgtacgtgtggccccacatccgccgccttccacgctaggatgtaagaggtcgcctcctattgtacatttggggaaagccttgggtgtaaatcagtgtaaacttggaggagagatttttctatcatgtagagtaggtattttttatagattgaaggttgatcaattttttaatactttcaagagaaaactgtgtatacacatgaaatatatatatatatatatatatatatatgtataatatataaagactggcaccctgcctctctgtgcccaggcccagccctggtgacatggcaccactcagcagtgctgtcactgtaagcatggactcccaggagacagtgtgggaaacgctcctgctttaattccccgagaaacggctcttcctgcctggatgcaggagggcaggggccaccacagattaaagctgttactgc

SEQ ID NO: 173029 - DNA, 4831 bp, Homo sapiens; identical to SEQ ID NO: 173023
  Payload ID: 14002
  Gene Symbol: RAB11FIP3
  Gene Name: RAB11 family interacting protein 3 (class II)
  Uniprot ID: O75154
  ENST ID: ENST00000611004
  CDS Start-End: 389-2659

SEQ ID NO: 173030 - DNA, 3203 bp, Homo sapiens; identical to SEQ ID NO: 173028
  Payload ID: 14002
  Gene Symbol: RAB11FIP3
  Gene Name: RAB11 family interacting protein 3 (class II)
  Uniprot ID: O75154
  ENST ID: ENST00000610934
  CDS Start-End: 182-1564

SEQ ID NO: 173031 - DNA, 580 bp, Homo sapiens; identical to SEQ ID NO: 173026
  Payload ID: 14002
  Gene Symbol: RAB11FIP3
  Gene Name: RAB11 family interacting protein 3 (class II)
  ENST ID: ENST00000632539
  CDS Start-End: 108-580

SEQ ID NO: 173032 - DNA, 3550 bp, Homo sapiens; identical to SEQ ID NO: 173025
  Payload ID: 14002
  Gene Symbol: RAB11FIP3
  Gene Name: RAB11 family interacting protein 3 (class II)
  ENST ID: ENST00000633920
  CDS Start-End: 1-2034

SEQ ID NO: 173033 - DNA, 558 bp, Homo sapiens; identical to SEQ ID NO: 173027
  Payload ID: 14002
  Gene Symbol: RAB11FIP3
  Gene Name: RAB11 family interacting protein 3 (class II)
  ENST ID: ENST00000633334
  CDS Start-End: 1-411

SEQ ID NO: 173034 - DNA, 804 bp, Homo sapiens; identical to SEQ ID NO: 173024
  Payload ID: 14002
  Gene Symbol: RAB11FIP3
  Gene Name: RAB11 family interacting protein 3 (class II)
  ENST ID: ENST00000631977
  CDS Start-End: 258-804

SEQ ID NO: 173035 - DNA, 1968 bp, Homo sapiens
  Payload ID: 14003
  Gene Symbol: RAB11FIP4
  Gene Name: RAB11 family interacting protein 4 (class II)
  Uniprot ID: Q86YS3
  ENST ID: ENST00000394744
  CDS Start-End: 244-1851
cgagtcccggggcccaggcgcctcgtgatgtcaccgcagcttgatacaaagagcccttcggcccacgcgggtctcccggcaacgggcgggggcggggccgcgccttccactggtgcccagaagtgcgagcggcagcggcgcggccgcgattgttcctgcgcttcggggctgcccgccgcgtccccgcgcgccgccgacccgcgcccgctggcttccgcgcctctgccggggagcggcccgcggatgcgcaccccgccagctctcgggagccagggcagcgaggtcacaggccccacctttgctgatggcgagctcatccccagggaacccggcttttttcccgaggacgaggaggaggctatgacgctggcgccacctgagggcccccaggagttgtacacagacagccccatggagagcactcagagcctggaggggtctgtcgggagtcctgccgagaaggacgggggacttgggggcctgtttctgccagaagacaagtccctggtccacactccatccatgacgacctcagacctttctacacactccaccacctcgctcatcagcaatgaggagcagtttgaagactatggggagggtgacgatgtggactgtgcccccagcagcccttgccccgatgatgagaccaggaccaacgtctactcggacctggggtcttcggtgtcttccagtgcggggcagacgcctaggaaaatgcggcacgtgtacaacagcgaattgctagatgtttactgctctcaatgctgcaagaaaatcaacctgctcaatgacttggaagcccgactgaaaaacctgaaggccaacagccccaaccgaaagatctccagcacggcctttggacggcagctcatgcacagcagcaacttcagcagcagcaatggcagcaccgaagacctgttccgggacagcattgactcttgcgacaatgacatcacagagaaggtaagcttcctggaaaagaaggtgacagagctggagaatgacagcctgaccaatggggacctgaagagcaagctgaagcaagagaacacacagctggtgcacagggtgcatgagctggaggagatggtgaaggatcaggagaccacggccgagcaggctctggaggaggaggcgcggcgccaccgcgaggcctacggcaagctggagagggagaaggctaccgaggtggagctgctcaatgccagggtgcagcagttggaggaagaaaatacagagcttagaacaacagtgactcggctcaagtctcaaacagagaaactggatgaggagcggcagcgcatgtctgaccgtctggaggacaccagcctgcggctcaaagatgagatggacctgtacaagcgcatgatggacaagctgcgacagaaccgccttgagttccagaaggagcgggaggcgacgcaggagctcatcgaggacttgcggaaggagctggagcacctgcagatgtacaagctggactgcgagcggccaggcaggggccgcagtgcctcctctggcctaggcgagttcaatgccagggcccgcgaggtggagctcgagcacgaggtcaagcggctcaagcaggagaattataagctgcgggatcagaacgacgacttgaatgggcagattttgagcctcagcctctacgaagcaaaaaacctctttgctgcccagactaaagcccagtctctggctgcggagatagacaccgcctcgcgcgatgagctaatggaagccctgaaggagcaggaggagatcaacttccggctgaggcagtacatggacaagattatcctcgccatcctggaccacaatccctccatcctcgagatcaaacactaaggcacggggctggctgcagagcagccttaggaccctgggaccaagggcagaccctgcccaaggatgcaggcctaagccgggcctcacactcacactgtaaatgtctctctggccacc

SEQ ID NO: 173036 - DNA, 596 bp, Homo sapiens
  Payload ID: 14003
  Gene Symbol: RAB11FIP4
  Gene Name: RAB11 family interacting protein 4 (class II)
  ENST ID: ENST00000582009
  CDS Start-End: 108-596
ccctgaagccgtgtgctcagggagggtgtgctcagggaggagccggtgttggctctgcttttctttgcccgagttgtctgtcaccatggggagaataaagtggccccatggctgatactgaccccagggtgagggtggaaaaacttgtgaaatatttggatcccaacgacctggggagaatcaacttcaaggacttttgccggggggtgttcgccatgaaagggtgcgaggagctgctgaaggatgtgctgtcggtggagagcgcggggacgctgccgtgcgcgccagagatcccagactgcgtggagcagggcagcgaggtcacaggccccacctttgctgatggcgagctcatccccagggaacccggcttttttcccgaggacgaggaggaggctatgacgctggcgccacctgagggcccccaggagttgtacacagacagccccatggagagcactcagagcctggaggggtctgtcgggagtcctgccgagaaggacgggggacttgggggcctgtttctgccagaagacaagtccctggtccacactccatccatgacgacctcagacctttctacacactccaccacc

SEQ ID NO: 173037 - DNA, 487 bp, Homo sapiens
  Payload ID: 14003
  Gene Symbol: RAB11FIP4
  Gene Name: RAB11 family interacting protein 4 (class II)
  ENST ID: ENST00000578694
  CDS Start-End: 52-204
gccgacccgcgcccgctggcttccgcgcctctgccggggagcggcccgcggatgcgcaccccgccagctctcgggagccaggtaagcggcggccccggggctggcgctcgcagggctccggcggcgcgcacctggctcggcccggcccgcggccccgggaagttggcggagagcggacttggcctgggaggtcgtgttacctgagccatctcgttcggccgcgagtagaagccgctgccagggcagcgaggtcacaggccccacctttgctgatggcgagctcatccccagggaacccggcttttttcccgaggacgaggaggaggctatgacgctggcgccacctgagggcccccaggagttgtacacagacagccccatggagagcactcagagcctggaggggtctgtcgggagtcctgccgagaaggacgggggacttgggggcctgtttctgccagaagacaagtccctggtccacactcca

SEQ ID NO: 173038 - DNA, 567 bp, Homo sapiens
  Payload ID: 14003
  Gene Symbol: RAB11FIP4
  Gene Name: RAB11 family interacting protein 4 (class II)
  ENST ID: ENST00000583755
  CDS Start-End: 188-567
actggtgcccagaagtgcgagcggcagcggcgcggccgcgattgttcctgcgcttcggggctgcccgccgcgtccccgcgcgccgccgacccgcgcccgctggcttccgcgcctctgccggggagcggcccgcggatgcgcaccccgccagctctcgggagccagtgcggggcagacgcctaggaaaatgcggcacgtgtacaacagcgaattgctagatgtttactgctctcaatgctgcaagaaaatcaacctgctcaatgacttggaagcccgactgaaaaacctgaaggccaacagccccaaccgaaagatctccagcacggcctttggacggcagctcatgcacagcagcaacttcagcagcagcaatggcagcaccgaagacctgttccgggacagcattgactcttgcgacaatgacatcacagagaaggtaagcttcctggaaaagaaggtgacagagctggagaatgacagcctgaccaatggggacctgaagagcaagctgaagcaagagaacacacagctggtgcacagggtgcatgagctggaggagatggtgaa

SEQ ID NO: 173039 - DNA, 618 bp, Homo sapiens
  Payload ID: 14003
  Gene Symbol: RAB11FIP4
  Gene Name: RAB11 family interacting protein 4 (class II)
  ENST ID: ENST00000579589
  CDS Start-End: 126-278
agaagtgcgagcggcagcggcgcggccgcgattgttcctgcgcttcggggctgcccgccgcgtccccgcgcgccgccgacccgcgcccgctggcttccgcgcctctgccggggagcggcccgcggatgcgcaccccgccagctctcgggagccagcaccaacctgaggttccacagccagtgtgtgccagatccagaactgaaccaaatctgcccaagagcctcagtctccacatcttcaagcccaggagtttgaaaccagcacaggaaacgtggtgaaaccctgtctctacaaaaaatctgtaaaatagggtgatttattacctccctctgggggtgatgcaagaagcctgcttgcttctcatgtgaaatgaatgagcacctggggaaccccagttgtcccggttgcccccgctcctggggtctgcaggcccaccttaggatggaagtggagcgcagcaaccaggtgtctacacaagatccactcctagaagctgcagggcgggagcagtgggccctgctgaggggtggtcttgagctcctggccacaccctttctgggggcagcgaggtcacaggccccacctttgctgatggcgagctcatccccagggaacccg

SEQ ID NO: 173040 - DNA, 8628 bp, Homo sapiens
  Payload ID: 14003
  Gene Symbol: RAB11FIP4
  Gene Name: RAB11 family interacting protein 4 (class II)
  Uniprot ID: Q86YS3
  ENST ID: ENST00000621161
  CDS Start-End: 230-2143
ccttcccctccccactcttctccttccctcccctcccctcccttcccctccggagcggctggggctgcggcgccgctgctgacacggatcggccgcggccgccaccgggcggaggctgcgcggcgcagacccagacgggcggccccggagggcgcgcggcgatggcggcggcgggcaggcggcgggcgcggcgggcgaggggtccgggctgagctgcgggccggcccggatggcgggcggcgcgggctggtcgggcgcccccgcggctctgctgcgctccgtgcgccgcctgcgcgaggtgttcgaggtgtgcggccgcgaccccgacggcttcctgcgcgtggagcgcgtcgcggcgctcggactgcgcttcggccagggcgaggaggtggaaaaacttgtgaaatatttggatcccaacgacctggggagaatcaacttcaaggacttttgccggggggtgttcgccatgaaagggtgcgaggagctgctgaaggatgtgctgtcggtggagagcgcggggacgctgccgtgcgcgccagagatcccagactgcgtggagcagggcagcgaggtcacaggccccacctttgctgatggcgagctcatccccagggaacccggcttttttcccgaggacgaggaggaggctatgacgctggcgccacctgagggcccccaggagttgtacacagacagccccatggagagcactcagagcctggaggggtctgtcgggagtcctgccgagaaggacgggggacttgggggcctgtttctgccagaagacaagtccctggtccacactccatccatgacgacctcagacctttctacacactccaccacctcgctcatcagcaatgaggagcagtttgaagactatggggagggtgacgatgtggactgtgcccccagcagcccttgccccgatgatgagaccaggaccaacgtctactcggacctggggtcttcggtgtcttccagtgcggggcagacgcctaggaaaatgcggcacgtgtacaacagcgaattgctagatgtttactgctctcaatgctgcaagaaaatcaacctgctcaatgacttggaagcccgactgaaaaacctgaaggccaacagccccaaccgaaagatctccagcacggcctttggacggcagctcatgcacagcagcaacttcagcagcagcaatggcagcaccgaagacctgttccgggacagcattgactcttgcgacaatgacatcacagagaaggtaagcttcctggaaaagaaggtgacagagctggagaatgacagcctgaccaatggggacctgaagagcaagctgaagcaagagaacacacagctggtgcacagggtgcatgagctggaggagatggtgaaggatcaggagaccacggccgagcaggctctggaggaggaggcgcggcgccaccgcgaggcctacggcaagctggagagggagaaggctaccgaggtggagctgctcaatgccagggtgcagcagttggaggaagaaaatacagagcttagaacaacagtgactcggctcaagtctcaaacagagaaactggatgaggagcggcagcgcatgtctgaccgtctggaggacaccagcctgcggctcaaagatgagatggacctgtacaagcgcatgatggacaagctgcgacagaaccgccttgagttccagaaggagcgggaggcgacgcaggagctcatcgaggacttgcggaaggagctggagcacctgcagatgtacaagctggactgcgagcggccaggcaggggccgcagtgcctcctctggcctaggcgagttcaatgccagggcccgcgaggtggagctcgagcacgaggtcaagcggctcaagcaggagaattataagctgcgggatcagaacgacgacttgaatgggcagattttgagcctcagcctctacgaagcaaaaaacctctttgctgcccagactaaagcccagtctctggctgcggagatagacaccgcctcgcgcgatgagctaatggaagccctgaaggagcaggaggagatcaacttccggctgaggcagtacatggacaagattatcctcgccatcctggaccacaatccctccatcctcgagatcaaacactaaggcacggggctggctgcagagcagccttaggaccctgggaccaagggcagaccctgcccaaggatgcaggcctaagccgggcctcacactcacactgtaaatgtctctctggccaccatgcgttacgtgtacccgtgtatatgtggggaggctgtgcacacgagcgaggggtgagtggccgtggctgtgggcagcatccacacggttagccgtgcatgcactttgtggcccctttgcaaggggcagagggtactggaagtgggaggaggcaaggtctgctatcaggagttactgtaaaaacaagaactggaagctcgtgtttccggtactgggtaaaatgattctacctctggggataaggattcacattcgctctagtacgatgggctctttcaccccactcctagtccccttgggagtgggagcaaaattgtgatctttcctaggagtttgaatgccccatatttgtgtcctcgccagctctttggccacctttcaagccccagtgttcaagctcagagaggatgaaggggcatctggagggtccatgagatggggccctcaccaaatgccttggccaccggccagcagccctctgtgatgtgtgtgcagagtgaacagaggactcaggtttcatagcagctagtgcggggcatcctcatcctgtacctatagagttcgtgcactcccccatccatgctacctacctccccgtttctgtttcagttttaagacaatgaagcagcattcactgcgtcattgtaacatgaagggataaaaatgaaggagaaggagggtttgggatgggtgtctaaggcaggagttgacatcgggcaaccaaagaaatgagttttggggaggaacacaactcccatcccagtcagtttccttcccatggctgcatcttaagatggatgcacggagaaaccgtctgcctggctccctgtcttcattctccacgcagcctggtgatggcaggcctgggtttggatttcagaatcctagctccgggctccactcgtgtggcagcaagactgcttcgttccagcgtttagaaacacacctgtatttgattctcagccaggggagcactcgctgcactggtgggaggcggttgggaaagttgcaggaaaaccttagtcttccatccttctgacccatggtggaaattcacaccatggatttttaatggatctttgttctaggcagctgggaatagacatggtacttaccttagagttttccaatttatctcaattttatatggcttgtgattcattttcttaatccaaatatatataaacgtgtgtggtcttattcttccccctgcagtttcttgctttcttcagcacatcttatagtatgagaaggaaggtttgggcatgttgggaagggcggtggagggggagttgcagaaagagagggcagtgagggtgaggagaggggatctggggacttgggtgtgacacctgcttgacagaggcagggctgtggccaggaccaaccttcaattccattccaatcagcctttgcatttgttggatctcgtggcttctttttaatcttttgttggggattagtttcatgctgcacataatggggttgcactggtctgacccaggactttggagccacccacactgggaagactaggctaggcagtcggtcttctaggagtttctcagccccttaggacgcgggtctccttgggctcccccaagggttctgcgaagaggcagtggaagaaggcatgaggagagggtctcttgagaatttgccaataggaaggagtggccacggctgaaaggaacaagacagatcctgacatagctttggcctgggtgttaggtcagaaggagtactggtgcgtgggggccttaccccagggttgagtattttatctgtaaaatgttatctgccctttggctgcattggaatttcagagaaggctgcagaggcctgggttacacagcctgagtcacaacgtgggaaggaatctctgccacgggaaaggtgggcggaagcagctggcagcctggggcgtgcttcaggctcctccctctaaggggcgccatgggaacaggctccggagggagccggcgtctgaaaggcccccgggacctgctgcagtgccagaggggcctctggagcaggcctggcttttaaatggggggctgaattccagctcacacacacctcaagtccaaccttactttcttcagccagaatacatttcttgtaaaacctggcttgttgcttggcttttaaagatggtgtatgtttgtaaaaatattcttctgggctcaaaagctagcttgagggggcagatgccccaggtgtcccagctccacagcccctggcagatcccagaccccttggtggcaggtcccagagcctaggtggtaggagcttgatctttgtttctgcccttacccctcagtagtggggctgcgaggtagtagacaggatgcccagttaagtttgaatttcagatagaaaataattttagaataaatatgttctatctaatacatgggacagatgttatttttagagataggatcttgctctgttgcccaggctggagtgtagtggtatgatcatagctcaccacaaccttgaactcccaggctcaagcgatcctcccgccttaactgcctgagtagctgggactacaggcatgcaccaccacgcccagctaatttttcttattttttgtagagacagggtctcactgtgttgcctcactcgagctgctgacctcaagtgatcctcccacctcagcctgccaaagcactgggattacaggcatgagccaccatgcctggccaggacatatttgaaatggggagattttaaaaattctgatgattagactgaatcctcagacgttctggtttgattgttgtgggtgtagcccaggcatgggattttttaaagagctgctcaggtaattccaatttaattgcgtgtcctacttgggttttttgtttgtttttattgtttttgctaaacctggcaaccctaccgagtagggattagcagtaacttatctgaaatttagaggtgttttgggggtggggcgagggtttctgtagtagactcagattttacatggccctgagctgcccttgcgttcagttggaagccacgcaaaatgaactgaaccaggagtgagcttcgtgtacattatctattagaaaatgaagtaccttctggttcagctagtccctgtgcgttgagaggctttaagaaacttctagtaaaaatgtttttttcttttagctttgaattggccagagtttatcctagattattttattttaaattggtagaattctttgcgaactgtcacagagaaattccttttcatgactttatttctgacctattaaaacatgaacaggccaggcatggtggctcacgcctgtaatcctagcacttgggaggcagtggcaggcggatcacttgagctcaggagtcctaaaccagcctgggcaacatagtgataccttgtctctaccaaaagttaaaaaaaaaaaaaaaaaagctcaagaacctgcacgagggcctaaaacagtgggctcagctttggctgtgcattggaatcacctggggagatttgtaagcttctgctgtctgggctgaacccccagaggttcggattgaattggtgtggggtgtggtccaggcatcgagatgtgtaaagacctccccaggtgatgatatgcagtccgaggttgagactgccctgtcctgcaaggtcgttggccagaggtagaggaaactggtcaaagtggctgttgggcttgtcaagcccgtggctgaatgacagtgagctctcttgctgggagggttccttttcctgttgttgaatggtcctggcctgcaggatgggaggccagatgccttcaggagctggtggatccagctgttctcaccagcctggaggttagcagaccagagtgggtgggcaggaccttggcctggtgcccctggaatcagtgggtggcatgtgttgggatatactggctacaggctcatctcaaagagcaggtagaacagagtcagcagggaactgacaggtggggctgtccccctgaaagcagccgcagaaacagctgccacctatttgcatagctgagcaggaggacatactgtctttgtgggttttgcttctggtctgtttcctgactgggttgataaagggagtcccagctcgttccctgttagccaaaccagcatcctactcacacaccggacactccaggtgctagtccactggtgctggtgttcaggggagttggggggggggggcgcggggacagaagcgcgggttcttggttccaatgagggacttagcagaagcctccaggggccagcagggccaggtgaaactgggagaaatgaagccctctgtgtcctgtgtgtgtggtggggtttaatgcattagcaaatttaaacttaaaaactaactctaggccgggcacggtggctcacacctgtaatcccagcactttgggaggccaaggcaggtggattgcctgagctcaggagttcgagaccagcctggacaacatggtgaaactcttgtctttatttttttaaaaaaacaaaaagtaactttcgatgtgatcataccaggaaagttttgcgtggtcaccatgccaagaaaatgactttggttgcccagcagatccacagcgactctttctcaagggctactgtggattctagattgaggaaaggggccacttaggactcagtgctggtatcctccacagtcctttctcccagactctggccctccctttgggacccaggaaatcccctctagggtgacgctgctggctaggaagactgaggtctgctgcgccaaggggcctcaagttagaagggccatgccgtcagtggatgactttgagcgctgatcctagggacctgccaggtcctcacttcctgccctgggtgcacacatgaatggggcagccagcaggaagcgggagaggctggaaccaggagcctgccctacctgcatggcaggacaactctgaggcccttctgccatattctctgctacccaccagagaaaataggctgccttctagaaagatttgtttctaaaagcgtagaccctggggaagtataatgtcaccatgctcaccaggcgaggtttcccatatgacctccctgccccgacctcgtaggttgctcctttccccatctgtaaggtagagatgtctgccccggagctaccagctggggatggcatccaggccatgtctcctgcaggatccaagtgctgttgtccccagggtgaccctgcctcctgctggggcccatccgctttgctgtgctgcacaggctgttttcatctgcatggtttggggtctttgtccttgtgccttttcttccccatcgccactgtacaggattttccacattgcccactgcctccttttctacatcgtctcatctccctggcctttcccgagccctgtaaatgtgtactttttcaacgtgcctcccccaggtgaggccagctctcccgggcacattcgtccacaaggatcaggccccacttacccttggctcgctcagcctgtagacttggtaactttgtacagaatctttcattattgtcttaagcatggggggctaggacccacttagtccctcctccagcctgcagctaatttaggagccttgcattccagaaaagggcaactttgtgtaaagcagcttctcccacagagctttccctgcattgttagtgatgtcgggcaaagcatcactctttaacctggggcattggccccagcagggatatcatgggaccgcagccgctccgtgcactgtctctgcccccagaggaagccctgtccatggttcctggtgcacggccacaggcctgccttgaggccaccacatctggtgtctagaacagctgcgggccccacttgggcagaaggaagaggtgctagctgctgcccctgcctgctgtgaacacctgcccagcccttccttgtctgctgaggtgctcagaccagagtgccattaaataccaactgatgtcacggagcggacggtgcattgccaaggactcacagctgtgggctcccttccagctcctcccactttcttggctgggtcttctgaggcctacgtggaatgaactacacatgtggcctcatgcccaagggtttgttagatggcctctgactctgtgggattcaacttgacttttttgccccaggaggctctgtctggaaacaggcttagctttagtgctggggtgggacctgccctgtgggccccagggaggggacagtgggggtgaggccctgaggctgtccagggtctgagctctttgcctccaacctgcttctgccccaaaaggaacaggctgttggtggcaggctcctcccggggagctgtactgtacagaccaaggtgtaaataaacagtttgctcttctcgcctga

SEQ ID NO: 173041 - DNA, 4342 bp, Homo sapiens
  Payload ID: 14004
  Gene Symbol: RAB11FIP5
  Gene Name: RAB11 family interacting protein 5 (class I)
  Uniprot ID: Q9BXF6
  ENST ID: ENST00000258098
  CDS Start-End: 242-2203
gccggttggggcggcgggcgcggggcggggcagggggcggggcgctgacgtcgcggcgcggcccgcggccagcggcccggtgaggcggggaggcggcggccggtcggcccggcccagcccagcccgcagctgcggcggcgctcagagttggttcctgaccgccttctgccgcggccgggtttgtcaccaggtcctggggtctgcaccggctcggccagacctcgccccccgcttctccgccatggccctggtgcggggcgcggagccggcggcggggccttcccgctggctgcccacgcacgtccaggtgacggtgctgcgggcccgcgggctgcggggcaagagctcgggagcgggcagcaccagcgacgcgtacacggtgatccaggtgggccgcgagaagtacagtacgtcggtggtggagaagacgcacggctgccccgagtggcgtgaggagtgctccttcgagctgccgccgggggccctggatggcctgctgcgggcgcaggaggccgacgcgggcccggcgccctgggccgcgagctccgccgccgcctgcgagctggtgctcaccaccatgcaccgctcgctcatcggcgtcgacaagttcctgggccaggccacggtggcgctggacgaggtcttcggcgcaggccgcgcccagcacacgcagtggtacaagctgcactccaagccaggcaagaaggagaaggaacgcggcgagattgaagtcaccatccagttcacgcgcaacaacctgagcgccagtatgtttgacctgtccatgaaggacaagccaaggtctcccttcagcaagatcagggacaagatgaagggcaagaagaagtatgatctggaatctgcctctgccatcctcccaagcagcgccatagaggatcctgacctgggcagcctgggcaagatgggcaaagccaaaggcttcttcctccgcaacaagctgcgcaagtcgtccctgacccagtccaacacctcgctgggctcggacagcaccctgtcctcagccagcgggagcttggcctaccagggacctggcgccgaactcctcacccgctcaccaagccgtagcagctggctgtccactgaagggggcagggactctgcacagtcccccaagctgttcacccataagaggacctacagcgatgaggccaaccagatgcgagtggctcctcctcgggcccttctggaccttcagggccacctggatgctgcctcccgctcttcgctctgtgtcaatgggagccacatttacaatgaggagccccagggccctgtgcggcaccgcagctccatctcgggctcgcttccatcctctggctccttgcaagctgtctcttcccggttctccgaggaggggcctcgttccacagatgacacctggcccagaggcagtcgtagcaacagcagctcagaggcagtgcttggacaggaggagctgagtgctcaggctaaagtcctggcccctggggccagccaccctggagaggaggagggggcccggctaccagagggcaagccagtccaggttgccacacccatagtggcctcctctgaggctgtggcagagaaggagggagcccggaaggaggaacgcaagccccggatgggtctcttccaccaccaccaccaaggcctaagtcggagcgagttgggtcgccgaagctctctgggggaaaaggggggtcccatcctgggggcctccccacatcactcatccagtggggaggaaaaggccaagagtagctggtttggcttgagagaagccaaggacccgactcagaaacccagtccccaccccgtgaagcccctcagtgccgcccctgtggagggcagccccgacaggaagcagtcccgctccagtctgagcatagccctgagcagtgggctggagaagctcaaaacagtcacatctgggagcattcagcctgtgacccaggccccccaggctggccagatggtggacaccaaaaggctgaaggactcagctgtgctggaccagtcggccaagtactaccacctgacccacgatgagctcatcagcctgctcctgcagcgggagcgggagctgagccagcgggacgagcatgtgcaggagctggagagctacatcgaccggctgctggtgcggatcatggagacctcacccacgctgctgcagatccccccgggcccccccaaatagccttcctcaccctacccccaggagggttggcatggacctattgctgcctgccctctctcctcctgaactctctcatctgcagtggggcatcgtctgtcttgccttgtcactccttgctcctctccctcctgcctcaactggggctgctggaagggggccctctggattccctttggaggcatcaggttctgtgcacaacttgtgtgtctttgggagccctgggtctttcccacctgcctgttttcatatccctcagctttgggggccccagggaattggaactcttcccccaagacagagcaggggtgaactgtagcttgatgcagtaatctgggacaagactggttgctagcacatactttattatcccccaaggatggtcagccatttcttcccacagccaaagccccatccccttcatttccctccagtccctggaggggcttctagtattactgggacaatgaccacgctgcctgtttgtctgtgagttacgggcaaccagcctcttcagcctcacacccattcccctgagagcaagaagcctgtgtggtctgggccagtctctgccatgtcctgagtctgcttcagtctggagctgtttgtggggcgagtgccatgtggacagtggtggatgatgtgtgtgcttcaggctgctccctgacccctctgacctttccacgagtgtcacatgggaatgtgtggggcgcaggggcgggtgcggagagagcacctttttgcttttcgagctcttgaccacctccaatgtgtaggtccctccaggctggggcttgggactgcttatgatttggggatcaagcctccatgtctattcttgttgcctgtccagatgccaaaactctgtgttgctgcagggtttgaacttttggaaaccaattaaaatgtgcctttggtgggcggggtcaagagcccctggatgtcgacctctcccgctgtgtggcgtccccctcccacctgttgaatacatagggatggctctctcagggccctgggaatgggaatggacagcactgctgtgggctgttcccctcccctaaagttaatctcttggtctggccaagttgctgctccctcaaccttcctgctgtcttcccctccctcaaccccaataggaggatcccaggataaacactgctgggcaggcgggcaggcaggcctggggctgccctgctcactctcattgtctggcctcaggacttagccatactagaccagtcagcttgcctggaagagggaggtcccactatgcctttgggagacacctatacttaggaaaaagcctttgttgtcctcccatccatccattaagctgctatctcagcctgtcccttctgccccaggggcttgcctggcttggctgcagtgcactttgaaatgaagtatctgtcctttggcccagcccctggtttgcttgtagaaaacatggtaggcttccccaaggcatctgcagggaactttggcagcttggggcaccctgaattagcaaaaatggggggtgatgaggtgctgaagaaggatacttaacagcttagtgaggaggcaagagctcctctgggaccaccacttcttcaggagagggcctgtgggcttgcttttggaaggcctcaggcagacacgtgccctctgggtgatgtctgtctgctgccaggatggagcagaggagcgccacacatggaggaaagcccctgtaacgttacctaccttaaactccactcatcaaatctgagaaaagtatccactggtccccagggtttcagtcatgcttttgggggtcattgggtattagagaagtaagtatcttttctgagagagggggagtcaccccccctactggggattcctctgggctttattcactcccagccctggccctgacctttgtgggcctccctaatgcccagggcatggatggcttcagaggagtttttgaatcgaagcccagggtccttgttgatgtttcttctcctagccacacttggaggaaagttgcaggtgggttgggcagggagcaggcatggttctgctttgctgtttgtcttcctagttaaggctctttataaagagcttgttcttcatgttttaagcactttatgaagaataaaacattcatgtactgca

SEQ ID NO: 173042 - DNA, 4930 bp, Homo sapiens
  Payload ID: 14005
  Gene Symbol: RAB11A
  Gene Name: RAB11A, member RAS oncogene family
  Uniprot ID: P62491
  ENST ID: ENST00000261890
  CDS Start-End: 129-779
agcggcagggaggggctcttcacccagtccggcagttgaagctcggcgctcgggttacccctgcagcgacgccccctggtcccacagataccactgctgctcccgccctttcgctcctcggccgcgcaatgggcacccgcgacgacgagtacgactacctctttaaagttgtccttattggagattctggtgttggaaagagtaatctcctgtctcgatttactcgaaatgagtttaatctggaaagcaagagcaccattggagtagagtttgcaacaagaagcatccaggttgatggaaaaacaataaaggcacagatatgggacacagcagggcaagagcgatatcgagctataacatcagcatattatcgtggagctgtaggtgccttattggtttatgacattgctaaacatctcacatatgaaaatgtagagcgatggctgaaagaactgagagatcatgctgatagtaacattgttatcatgcttgtgggcaataagagtgatctacgtcatctcagggcagttcctacagatgaagcaagagcttttgcagaaaagaatggtttgtcattcattgaaacttcggccctagactctacaaatgtagaagctgcttttcagacaattttaacagagatttaccgcattgtttctcagaagcaaatgtcagacagacgcgaaaatgacatgtctccaagcaacaatgtggttcctattcatgttccaccaaccactgaaaacaagccaaaggtgcagtgctgtcagaacatctaaggcatttctcttctcccctagaaggctgtgtatagtccatttcccaggtctgagatttaaatatatttgtaattcttgtgtcacttttgtgttttattacttcatacttatgaatttttccatgtcctaagtcttttgattttagctttataaaatcatccacttgtcccgaatgactgcagctttttttcatgctatggcttcactagccttagtttaataaactgaatgtttggattcctcagttattgtttacttttcatcatggaagcctgtcactgtatgtaggacataatagaacttgatcacttgaagctcagacctattggtcttgatcaaatcaaactaagaagaccttagaaataagctaccattttgccacagagcagcttataggtaatacactcttctctcagtgcagtgtacatttccacaaatctaagaattgccctataaacatagcaggattttgagagcttgaaaattttccattattctggacatgaatttctaaaatgccttaataggtttatgtagttgagtaaattttgttttttaatttttgtaagcatcaaagttgattagagaggggggcactttttctggagaattctcttagtaaacacaaaagattgttacggtttcattagtagtatggttgtggggccataagttaaacagtgctgcctggtaggctgggaactgaagagacttgtggtattccatctcgggtgcctctgttggcaatgatcaggcagcccaaaagatttaaatgatctataataatttccaagcggtagattatgtggcattttattgctcaggcaataattggtttaatgctggtagtgtcaaattttgaagtgttaattttgtcttagaaccttccagtaagtgaaatacaacctagttttatcaccatatccaccagcaggcatggataattattttaacaatgctaatatttgagttttgcagtatattatagaatatagtccagttaaatctttggtttcagtatgtctgaagagtacagtgagaggttaatttctgctcaagtggtaccacttaaaggcatgtattcttttagtatgtaaaatgaaatagtaccttgagtttaaatagaatgcatttaggcattgtagagatctgaaatagttttcttccactacattgttgaaatcaatgaagcaattagtttctcattcagaaatgtgcacactaatatttagttttgctttctcgtggataatattaagcacttactctgcagtttcctggaagttgtgtcaactgcagtgatactattcaggatggtgggaaatccccaaaaatatgtatgtgtgggcttgcttagattactatatttcatagttaatcttttgtctcttgcggtgctcatgatgtgtggggcacacggaaggcattgctgtagtcagtcattttggttttcttctatagccattttattattttagtgtattagttatgaagataatattatctatttgtaaattgctactttgtattttatgcatgctctgtaatttgatttttttttagttattgatttggattatattcacattctaataaacagttatagggggattatttcttatgctgtcagattacatttttcctttgagtgctttgggtgcagccgtggaatcctgatgtaaaagcataggttcttgcattactgagtaaacattgaattgggagcatcagtgtgtgaattcagctttgattttagaactgcagttcaattatgctttccttggaaaaagtatgtccaaaaacattaggaaagtagtgtgtattttcatatataacagtgtcaccagacccaggaaaagaaaccatctctattttattgaaagttggtggtagattttttacaaagtaaggagaaaagagaaaaactaaatagtgaattgaaaatgaataaagtaaacttagaatttttacccaagtgtagacttaaatgttgctttgagtatggctggatcttgggagaattccaggaaatattaggtattagaaaatgactttgattgcatttcagcaggtgtctttattctgagtagtatcttaggagacaaactgtctcaagcaagaaacaataaatttttaaatattatgacagttcagggcttaaggcagtttagaagtattttgctacttgaccttgattttcagttattttaactttgaatttttttttttttttttgagacggagtcttgctctgttgcccaggctggagtacaatggcaccatctcagctcactgcaagctccacctccagggttcatgccattctcctgcctcagcctcccgagtagctgggattataggcgccagccaccacgactggctaattttttgtatttttagtagagacggggtttcaccatgttagccagggtggtctcgatctcctgacctggtgatacacccacctcggcctcccaaagtgctgggattaaaggcgtgagccaccgtgcctggccttgaatttttttttaacctgttatatagtctcctgaatagttagccatggtgccttgatttaatcttatgtcattgttctcaaatgccatgatttctctttaatagtagttgtcattatgtaagggtaagttattgcccatttaattgtaattataagaagaggtgccagctagtgaccttacatcagtgatcttttaagttctgaagggttctgcagaaaagttacacttcttgagtttgggttgcccatcagagctggtcacatttctttgatcattgaaaaaatgaatatcttaatttttgtctttgctgactggtatttataaaatacaaatgcttttagtgggttgagctgttgtgataatctcttccatctaccttagagaagaagctgtactatttagacagttttggccaacactagaagcaaaagaattcaaaggctgggtggatatttaagaacttattctaacctgtcaggtttcaatttgtggggcttggtttaacagaggaaaaaaatataaattgattttctgatgtctcacaaatatcacatacctggaaaaaaattaaaacaaaaaatgaattttgtaaaaggttatgtatgacttccatttgctctgtaaaaaaatgaacaaagattgtgaaaggatcctcttccaccacatcatttaatgggttagcggaacagatagggagctatgacactagcaccaaagagagatttttcttctggttgggtggtgctggtgccacgcccctttctgggatttgacaagtctttcccactcacctatacaatatgccaaatcaactggagttgtcattctaatgttttaaagaatgattgggttcccccaaactgtaggaggtcgatggtaacaataaagtgatacaaaatgcttatgtcattataatttatgtaagggagaccattaggctgagaatcaatatgattgaggttatctattctcctgaaaagtgaattggagaataaagaaagaatatttgaaaggatgttgtgtactaggcaatatactagcatgtattagaaaatacggtaaactgtgggttagaagagtgaaagtagctggtatgatagagcactggactgagtaacgaagagattctagtcatggctcttgtggtcatttcatttttgagcctcacattcttccaattaatgagggtaccagattaaataaactctggggattcatcccaattcgaactctgtaattctctgaatgaactctctcttcaattaaagccaaattattaacattttaactcaagtttaaatttaatagagaagtcaaaatgaggtatgcactttgtggaatgtttttggtcttatcacaataacctgattaaaatggtgcctttatttccatgtttactcctttaaataagatgaaagctttcagaacatttatttgcaaaatgactgtcaatatcaacaatatgcatcaaagtaccatatatgctaagggagaggagcacttgatgggctgctatgttaactgtaaattgagaactgcttgttttatggcttttgctgttaaaaaaaaactgctggcttttaatatgtactttaaaatatactcatgtctgggagagaacttttaaaaaca

SEQ ID NO: 173043 - DNA, 588 bp, Homo sapiens
  Payload ID: 14005
  Gene Symbol: RAB11A
  Gene Name: RAB11A, member RAS oncogene family
  ENST ID: ENST00000566233
  CDS Start-End: 123-588
agggaggggctcttcacccagtccggcagttgaagctcggcgctcgggttacccctgcagcgacgccccctggtcccacagataccactgctgctcccgccctttcgctcctcggccgcgcaatgggcacccgcgacgacgagtacgactacctctttaaagttgtccttattggagattctggtgttggaaagagtaatctcctgtctcgatttactcgaaatgagtttaatctggaaagcaagagcaccattggagtagagtttgcaacaagaagcatccaggttgatggaaaaacaataaaggcacagatatgggacacagcagggcaagagcgatatcgagctataacatcagcatattatcgtggagctgtaggtgccttattggtttatgacattgctaaacatctcacatatgaaaatgtagagcgatggctgaaagaactgagagatcatgctgatagtaacattgttatcatgcttgtgggcaataagagtgatctacgtcatctcagggcagttcctacagatgaagcaagagcttttgcagagatttaccgcattgtttctcagaagcaaatgtcag

SEQ ID NO: 173044 - DNA, 635 bp, Homo sapiens
  Payload ID: 14005
  Gene Symbol: RAB11A
  Gene Name: RAB11A, member RAS oncogene family
  ENST ID: ENST00000567671
  CDS Start-End: 391-635
ctctcccgaagcccctctgacgggttcttcgcttccctcttggccttgccttcggtgcagactcccattacagttgtccttattggagattctggtgttggaaagagtaatctcctgtctcgatttactcgaaatgagtttaatctggaaagcaagagcaccattggagtagagtttgcaacaagaagcatccaggttgatggaaaaacaataaaggcacagatatgggacacagcagggcaagagcgatatcgagctataacatcagcatattatcgtggagctgtaggtgccttattggtttatgacattgctaaacatctcacatatgaaaatgtagagcgatggctgaaagaactgagagatcatgctgatagtaacattgttatcatgcttgtgggcaataagagtgatctacgtcatctcagggcagttcctacagatgaagcaagagcttttgcagaaaagaatggtttgtcattcattgaaacttcggccctagactctacaaatgtagaagctgcttttcagacaattttaacagagatttaccgcattgtttctcagaagcaaatgtcagacagacgcgaaaatgacatgtctccaagcaacaatgtggttcctattcatgttcc

SEQ ID NO: 173045 - DNA, 978 bp, Homo sapiens
  Payload ID: 14005
  Gene Symbol: RAB11A
  Gene Name: RAB11A, member RAS oncogene family
  ENST ID: ENST00000564910
  CDS Start-End: 131-571
gcagcggcagggaggggctcttcacccagtccggcagttgaagctcggcgctcgggttacccctgcagcgacgccccctggtcccacagataccactgctgctcccgccctttcgctcctcggccgcgcaatgggcacccgcgacgacgagtacgactacctctttaaagttgtccttattggagattctggtgttggaaagagtaatctcacatatgaaaatgtagagcgatggctgaaagaactgagagatcatgctgatagtaacattgttatcatgcttgtgggcaataagagtgatctacgtcatctcagggcagttcctacagatgaagcaagagcttttgcagaaaagaatggtttgtcattcattgaaacttcggccctagactctacaaatgtagaagctgcttttcagacaattttaacagagatttaccgcattgtttctcagaagcaaatgtcagacagacgcgaaaatgacatgtctccaagcaacaatgtggttcctattcatgttccaccaaccactgaaaacaagccaaaggtgcagtgctgtcagaacatctaaggcatttctcttctcccctagaaggctgtgtatagtccatttcccaggtctgagatttaaatatatttgtaattcttgtgtcacttttgtgttttattacttcatacttatgaatttttccatgtcctaagtcttttgattttagctttataaaatcatccacttgtcccgaatgactgcagctttttttcatgctatggcttcactagccttagtttaataaactgaatgtttggattcctcagttattgtttacttttcatcatggaagcctgtcactgtatgtaggacataatagaacttgatcacttgaagctcagacctattggtcttgatcaaatcaaactaagaagaccttagaaataagctaccattttgccacagagcagcttataggtaatacactc

SEQ ID NO: 173046 - DNA, 1396 bp, Homo sapiens
  Payload ID: 14005
  Gene Symbol: RAB11A
  Gene Name: RAB11A, member RAS oncogene family
  Uniprot ID: P62491
  ENST ID: ENST00000569896
  CDS Start-End: 46-513
acagataccactgctgctcccgccctttcgctcctcggccgcgcaatgggcacccgcgacgacgagtacgactacctctttaaagttgtccttattggagattctggtgttggaaagagtaatctcctgtctcgatttactcgaaatgagtttaatctggaaagcaagagcaccattggagtagagtttgcaacaagaagcatccaggttgatggaaaaacaataaaggcacagatatgggacacagcagggcaagagcgatatcgagctataacatcagcatattatcgtggagctgtaggtgccttattggtttatgacattgctaaacatctcacatatgaaaatgtagagcgatggctgaaagaactgagagatcatgctgatagtaacattgttatcatgcttgtgggcaataagagtgatctacgtcatctcagggcagttcctacagatgaagcaagagcttttgcagaaaagaatgaagcaaatgtcagacagacgcgaaaatgacatgtctccaagcaacaatgtggttcctattcatgttccaccaaccactgaaaacaagccaaaggtgcagtgctgtcagaacatctaaggcatttctcttctcccctagaaggctgtgtatagtccatttcccaggtctgagatttaaatatatttgtaattcttgtgtcacttttgtgttttattacttcatacttatgaatttttccatgtcctaagtcttttgattttagctttataaaatcatccacttgtcccgaatgactgcagctttttttcatgctatggcttcactagccttagtttaataaactgaatgtttggattcctcagttattgtttacttttcatcatggaagcctgtcactgtatgtaggacataatagaacttgatcacttgaagctcagacctattggtcttgatcaaatcaaactaagaagaccttagaaataagctaccattttgccacagagcagcttataggtaatacactcttctctcagtgcagtgtacatttccacaaatctaagaattgccctataaacatagcaggattttgagagcttgaaaattttccattattctggacatgaatttctaaaatgccttaataggtttatgtagttgagtaaattttgttttttaatttttgtaagcatcaaagttgattagagaggggggcactttttctggagaattctcttagtaaacacaaaagattgttacggtttcattagtagtatggttgtggggccataagttaaacagtgctgcctggtaggctgggaactgaagagacttgtggtattccatctcgggtgcctctgttggcaatgatcaggcagcccaaaagatttaaatgatctataataatttccaagc

SEQ ID NO: 173047 - DNA, 711 bp, Homo sapiens
  Payload ID: 14005
  Gene Symbol: RAB11A
  Gene Name: RAB11A, member RAS oncogene family
  ENST ID: ENST00000565075
  CDS Start-End: 96-692
agttgaagctcggcgctcgggttacccctgcagcgacgccccctggtcccacagataccactgctgctcccgccctttcgctcctcggccgcgcaatgggcacccgcgacgacgagtacgactacctctttaaagttgtccttattggagattctggtgttggaaagagtaatctcctgtctcgatttactcgaaatgagtttaatctggaaagcaagagcaccattggagtagagtttgcaacaagaagcatccaggttgatggaaaaacaataaaggcacagatatgggacacagcagggcaagagcgatatcgagctataacatcagcatattatcgtggagctgtaggtgccttattggtttatgacattgctaaacatctcacatatgaaaatgtagagcgatggctgaaagaactgagagatcatgctgatagtaacattgttatcatgcttgtgggcaataagagtgatctacgtcatctcagggcagttcctacagatgaagcaagagcttttgcagaagctgcttttcagacaattttaacagagatttaccgcattgtttctcagaagcaaatgtcagacagacgcgaaaatgacatgtctccaagcaacaatgtggttcctattcatgttccaccaaccactgaaaacaagccaaaggtgcagtgctgtcagaacatctaaggcatttctcttctcccct

SEQ ID NO: 173048 - DNA, 1751 bp, Homo sapiens
  Payload ID: 14006
  Gene Symbol: RAB11B
  Gene Name: RAB11B, member RAS oncogene family
  Uniprot ID: Q15907
  ENST ID: ENST00000328024
  CDS Start-End: 219-875
tttctccaggacaccgagggcgaggagggtggtaccaagcggcgcccaccctcagagcactacttccatctctgattggcttcgctgggtgcccgtcgctactccactcgccgctgataggccattcaaccgccgctctgcgcggcgccggctccgcccccgtcgggtgtttgtggtggggctgcggagtcgccgatcccgccggaagcgccaggacaatggggacccgggacgacgagtacgactacctattcaaagtggtgctcatcggggactcaggcgtgggcaagagcaacctgctgtcgcgcttcacccgcaacgagttcaacctggagagcaagagcaccatcggcgtggagttcgccacccgcagcatccaggtggacggcaagaccatcaaggcgcagatctgggacaccgctggccaggagcgctaccgcgccatcacctccgcgtactaccgtggtgcagtgggcgccctgctggtgtacgacatcgccaagcacctgacctatgagaacgtggagcgctggctgaaggagctgcgggaccacgcagacagcaacatcgtcatcatgctggtgggcaacaagagtgacctgcgccacctgcgggctgtgcccactgacgaggcccgcgccttcgcagaaaagaacaacttgtccttcatcgagacctcagccttggattccactaacgtagaggaagcattcaagaacatcctcacagagatctaccgcatcgtgtcacagaaacagatcgcagaccgcgctgcccacgacgagtccccggggaacaacgtggtggacatcagcgtgccgcccaccacggacggacagaagcccaacaagctgcagtgctgccagaacctgtgacccctgcgcctccacccagcgtgcgtgcacgtcctccgcccgcccccgccacggtatcctctggcccctccctgctgtccctctgtggccggctcgttccagccctcccagtgagctctgcacggccgggccggggcccaggaaggacaggagccagtgctaccccgtcctgcccggggaaaagctagaagccccggtttgctgcacccatgaaactcgggtccccacagcgtcttggcggggtggggagggcggcaggatggacggggctggccagaggcgaggaggacgggcggacggcgccgccttctccccttttccttggccgactctagggagcgattgcctccctccctccgtgaccgggtggcccagccagcccgtcgtccccacccagaaccgtgctctgggccaaagcccgaagaaccaggcagcgggggccggggcaggcggaccccccgggctctcagcgcccacccgctcctccgcacacagcagctcgcacaggcctcccacctctgcctgttgattgatgcagggagaagcccgtccccccctctcccctctcccctcccctctcctgcacgcaacgcgccctctcggccctccctgtccccctcctctgtctcgtctccccatctggtctggaacctgtttgcaagtgaagcaatatctccgtgttttgtatatacaaccgctcttgtagcctttggtttttgttaatgtagagaaacacagattctttatacactttgtaagatttacgccaaaccccagctctcgatctcttcttctccctgtggcccctgcgctgttgccccgtccccgtcaccccgcccgttactgaaatgtataatctgacttcctgtacagaaa

SEQ ID NO: 173049 - DNA, 894 bp, Homo sapiens
  Payload ID: 14006
  Gene Symbol: RAB11B
  Gene Name: RAB11B, member RAS oncogene family
  Uniprot ID: Q15907
  ENST ID: ENST00000594216
  CDS Start-End: 25-564
gatcccgccggaagcgccaggacaatggggacccgggacgacgagtacgactacctattcaaagtggtgctcatcggggactcaggcgtgggcaagagcaacctgctgtcgcgcttcacccgcaacgagttcaacctggagagcaagagcaccatcggcgtggagttcgccacccgcagcatccaggtggacggcaagaccatcaaggcgcagatctgggacaccgctggccaggagcgctaccgcgccatcacctccgcgtactaccgtggtgcagtgggcgccctgctggtgtacgacatcgccaagcacctgacctatgagaacgtggagcgctggctgaaggagctgcgggaccacgcagacagcaacatcgtcatcatgctggtgggcaacaagagtgacctgcgccacctgcgggctgtgcccactgacgaggcccgcgccttcgcagaaaagaacaacttgtccttcatcgagacctcagccttggattccactaacgtagaggaagcattcaagaacatcctcacaggtggccggggaccagatgggtgtgggtagggcaccagccaggcagggtggaacacggcctctgaaccttcgcttgttttgttcgtttgcttgtttttttcttttttttgtcggggcaggatggatttttgctctttgcccaggctggagtgtggtggctcgatctcagcttactgcaacctccgccttccaggttcaggcaattctcctgcctcagcctcccgagtagctgggattacaggtgcctgccaccacacccgctaatttttgtaatttttagtagagacaggatttcacaatgttgtccaggttgatctcgaactcctgggctcaagtgatcctcctgcctcagcctcccaa

SEQ ID NO: 173050 - DNA, 577 bp, Homo sapiens
  Payload ID: 14006
  Gene Symbol: RAB11B
  Gene Name: RAB11B, member RAS oncogene family
  ENST ID: ENST00000601897
  CDS Start-End: 190-372
cgccgatcccgccggaagcgccaggacaatggggacccgggacgacgagtacgactacctattcaaaggtactaccgtggtgcagtgggcgccctgctggtgtacgacatcgccaagcacctgacctatgagaacgtggagcgctggctgaaggagctgcgggaccacgcagacagcaacatcgtcatcatgctggtgggcaacaagagtgacctgcgccacctgcgggctgtgcccactgacgaggcccgcgccttcgcagaaaagaacaacttgtccttcatcgagacctcagccttggattccactaacgtagaggaagcattcaagaacatcctcacaggtggccggggaccagatgggtgtgggtagggcaccagccaggcagggtggaacacggcctctgaaccttcgcttgttttgttcgtttgcttgtttttttcttttttttgtcggggcaggatggatttttgctctttgcccaggctggagtgtggtggctcgatctcagcttactgcaacctccgccttccaggttcaggcaattctcctgcctcagcctcccgagtagctggga

SEQ ID NO: 173051 - DNA, 532 bp, Homo sapiens
  Payload ID: 14006
  Gene Symbol: RAB11B
  Gene Name: RAB11B, member RAS oncogene family
  ENST ID: ENST00000600719
  CDS Start-End: 394-532
atcgggacgttaagcatcgtagcattacctggacgtagccccatttctcttcccggacaggtcctctgatagtcggtggtgctcatcggggactcaggcgtgggcaagagcaacctgctgtcgcgcttcacccgcaacgagttcaacctggagagcaagagcaccatcggcgtggagttcgccacccgcagcatccaggtggacggcaagaccatcaaggcgcagatctgggacaccgctggccaggagcgctaccgcgccatcacctccgcgtactaccgtggtgcagtgggcgccctgctggtgtacgacatcgccaagcacctgacctatgagaacgtggagcgctggctgaaggagctgcgggaccacgcagacagcaacatcgtcatcatgctggtgggcaacaagagtgacctgcgccacctgcgggctgtgcccactgacgaggcccgcgccttcgcagaaaagaacaacttgtccttcatcgagacctcagccttggattccactaacgtagaggaagcattca

SEQ ID NO: 173052 - DNA, 2137 bp, Homo sapiens
  Payload ID: 14007
  Gene Symbol: RAB12
  Gene Name: RAB12, member RAS oncogene family
  Uniprot ID: Q6IQ22
  ENST ID: ENST00000329286
  CDS Start-End: 284-1018
gctgccgctactgcggagtagctgcttcccttcctcctctcccggcggcggcggcggcagcggcggaggaggaggaggaggggacccgggcgcagagagccggccggcggcgcagttgcagcgcggagcccacgggccgccggggccgctccagcgggcggaagccgagcccggggccgaccccccgcgcgcggcggaggccgagggggcgccggggcccggggcgcgcagccggggggcgggcggcggcgggcggcgggccgagcgggagccgcatgcgtgtatggatccgggcgccgcgctgcagaggcgggccgggggcggcggcggtctgggcgcgggctccccggcgctgtcgggcggccagggccgccggaggaagcagccccccaggccggccgacttcaagttgcaggtcatcattatcggctcccgcggcgtgggcaagaccagcctgatggagcgcttcaccgacgacaccttctgcgaggcctgcaagtccaccgtgggtgttgacttcaaaatcaaaactgtagagctaagaggaaagaaaattagattacagatctgggacacagcaggtcaggagagattcaacagcattacctcagcttattacagaagtgccaaggggatcatattagtatatgatatcactaagaaggagacatttgatgatttgccgaaatggatgaagatgattgataagtatgcttcagaagatgcagagcttctcttagttggaaataagttggactgtgaaacggacagagaaatcaccaggcagcagggggaaaagtttgcacagcagatcactgggatgcggttctgtgaagcaagtgccaaggataacttcaatgtggacgagatatttttgaaacttgtcgatgacattctgaaaaagatgcctctggatattttaaggaatgagttgtccaatagtatcctgtcgttacaaccagagcctgagataccgccagaactgcctccaccaagaccacatgtccgatgctgttgatttcctactttggagacaaagtggaaatgattcctggaaaggggaaaaaacgttctattctgcactacaatcattttgacaatttcctttcgcactttgtaatccaagtcagagctatacactaacttgtaaatatgcatatatgcaatcctgggtaagttttggttataagttacctatttccctccaaattattatatttcattcattaccccagtgtctagtgtacatacactgggaaacctagtacttctaatatgaagaatgggagaaatgaaaggtataatgtttcttgaaataaataatataattgtccttattaattatattatgaggacagaagatattctgataagagagaacgtggtgctttgcttaccgttttaaagaaaatttgtaaaactaaagactttttgaaaaaaagctatcttaagtgctttttctttatttacaagacatttcccccagtggtagcatctgaagtattggagtgtttctgccacgaagcaaagctccattcatggccgtcatggaaggttatttattaatgttacataatggtagaatattactagttagagggttggatttgacttggtcctaaggccacagaatctctctcatggcttcctaagggatgtacctttatgcttttaagaactacaaagattcaataaagaaagaaatgtttttgaaactatagaaaaagattttaaaacacgctgctgtcctaaacaaatcctgtttaaaggaattttaaagagatgcattttactatatcaaagaacatacgtgtatttgcctaaacactctgtacctttgtaatgataaaacttcccccttctttacggtgaagcttattctgattaagcctagactgtgttctttttttttttttttttttttttttttttttttttttttttttttggtctgatgatgaatttgtgaactctatctttggtatatcttttattaaactgcactgttttgtttagtcaaggtaattaagtaattatgtatttgaataacttggtgtgtcttgagtgttgtggtatgaaaagcattgtggtctttctacactaatgaagtgcaaataaaattttgtatttatgaatg

SEQ ID NO: 173053 - DNA, 1176 bp, Homo sapiens
  Payload ID: 14008
  Gene Symbol: RAB13
  Gene Name: RAB13, member RAS oncogene family
  Uniprot ID: P51153
  ENST ID: ENST00000368575
  CDS Start-End: 117-728
gggaggaaaacttcttcctggcctgggctccgtgccgctctgtttgccaaccgtccagtcccgcctaccagtgccgggcgctccccacccctcccccggctcccccggtgtccgccatggccaaagcctacgaccacctcttcaagttgctgctgatcggggactcgggggtgggcaagacttgtctgatcattcgctttgcagaggacaacttcaacaacacttacatctccaccatcggaattgatttcaagatccgcactgtggatatagaggggaagaagatcaaactacaagtctgggacacggctggccaagagcggttcaagacaataactactgcctactaccgtggagccatgggcattatcctagtatacgacatcacggatgagaaatctttcgagaatattcagaactggatgaaaagcatcaaggagaatgcctcggctggggtggagcgcctcttgctggggaacaaatgtgacatggaggccaagaggaaggtgcagaaggagcaggccgataagttggctcgagagcatggaatccgatttttcgaaactagtgctaaatccagtatgaatgtggatgaggcttttagttccctggcccgggacatcttgctcaagtcaggaggccggagatcaggaaacggcaacaagcctcccagtactgacctgaaaacttgtgacaagaagaacaccaacaagtgctccctgggctgaggaccctttcttgcctccccaccccggaagctgaacctgagggagacaacggcagagggagtgagcaggggagaaatagcagaggggcttggagggtcacataggtagatggtaaagagaatgaggagaaaaaggagaaaagggaaaagcagaaaggaaaaaaaggaagagagaggaagggagaagggagaggaatgaattgaggaagtgaaagaaggcaaggaggtaggaagagagggaggaggaaaggaaggagagatgcctcaggcttcagaccttacctgggttttcagggcaaacataaatgtaaatacactgatttattctgttactagatcaggttttagggtcctgcaaaaggctagctcggcactacactagggaatttgctcctgttctgtcacttgtcatggtctttcttggtattaaaggccaccatttgcacaaa

SEQ ID NO: 173054 - DNA, 1353 bp, Homo sapiens
  Payload ID: 14008
  Gene Symbol: RAB13
  Gene Name: RAB13, member RAS oncogene family
  ENST ID: ENST00000614713
  CDS Start-End: 503-871
gggaaatagacaggaagagtctcacgacaattctggttacaaaggaaaaggaaaaatgcccctctttcctaattgtctcaaaagtaatcctgtttagcctcagactttcctagtgccaagtttggcccactagttaattcacatagactggcttcagctacttttttccttactctctactaggagggtaggtgggataccaagagtagagggctctaagaaaacagagaagaggaatgtgaaagtaatatctggggggagacagagactgaattcagagagttgtcagctggtataactgaatggacccaagaggcagcctaaggattttaagcctccatgcagaattttcgtcaccttttccctcccaaaatccataaaatgaattgatttcaagatccgcactgtggatatagaggggaagaagatcaaactacaagtctgggacacggctggccaagagcggttcaagacaataactactgcctactaccgtggagccatgggcattatcctagtatacgacatcacggatgagaaatctttcgagaatattcagaactggatgaaaagcatcaaggagaatgcctcggctggggtggagcgcctcttgctggggaacaaatgtgacatggaggccaagaggaaggtgcagaaggagcaggccgataagttggctcgagagcatggaatccgatttttcgaaactagtgctaaatccagtatgaatgtggatgaggcttttagttccctggcccgggacatcttgctcaagtcaggaggccggagatcaggaaacggcaacaagcctcccagtactgacctgaaaacttgtgacaagaagaacaccaacaagtgctccctgggctgaggaccctttcttgcctccccaccccggaagctgaacctgagggagacaacggcagagggagtgagcaggggagaaatagcagaggggcttggagggtcacataggtagatggtaaagagaatgaggagaaaaaggagaaaagggaaaagcagaaaggaaaaaaaggaagagagaggaagggagaagggagaggaatgaattgaggaagtgaaagaaggcaaggaggtaggaagagagggaggaggaaaggaaggagagatgcctcaggcttcagaccttacctgggttttcagggcaaacataaatgtaaatacactgatttattctgttactagatcaggttttagggtcctgcaaaaggctagctcggcactacactagggaatttgctcctgttctgtcacttgtcatggtctttcttggtattaaaggccaccatttgcacaaatgttcctgttttgggtaacttggattattgtcag

SEQ ID NO: 173055 - DNA, 4145 bp, Homo sapiens
  Payload ID: 14009
  Gene Symbol: RAB14
  Gene Name: RAB14, member RAS oncogene family
  Uniprot ID: P61106
  ENST ID: ENST00000373840
  CDS Start-End: 239-886
atcttggaccagcccgaggaagatactgagggagcacaggagcagtcaccgctgccactgctactgccgctactgctgccggcgcgtctgcacctctcggcctgccagtgtacctgccggcgcctcggtcgaccgcccccgccccctctcccgctgcgtccgcactcctgttcctggtcctgacgcccccctcccgcccggaaagctgcccagccaccagcaaccccccagtgccaccatggcaactgcaccatacaactactcttacatctttaaatatattattattggggacatgggagtaggaaaatcttgcttgcttcatcaatttacagaaaaaaaatttatggctgattgtcctcacacaattggtgttgaatttggtacaagaataatcgaagttagtggccaaaaaataaaactgcagatttgggatacggcaggacaggagcgatttagggctgttacacggagctactacagaggagctgcgggagctcttatggtctatgatatcactagaagaagtacatataaccacttaagcagctggttgacagatgcaaggaatctcaccaatccaaatactgtaataattctcataggaaataaagcagatttggaggcacagagagatgttacatatgaagaagccaaacagtttgctgaagaaaatggcttattgttcctcgaagcgagtgcaaaaacgggagagaatgtagaagatgccttccttgaggctgccaagaaaatctatcagaacattcaggatggaagcttggatctgaatgctgctgagtctggtgtacaacacaaaccttcagccccgcagggaggccggctaaccagtgaaccccaaccccagagagaaggctgtggctgctagtgacctctttgctgtggcccctcatttgacctttcacctctgtctgttggaagcagtactttttactgcctcattgtcttctgtacatcttactgggtttaattaaaaaaaaagaaaaaactctgttgtaaaaacagtttaacacaatactaaactgctaaacaactagatgtaatcaggttatcaaaggcaagtagagtaataaatctctcctgcatggtaaatctagactttttttcccccttgtcctcgtgataagtatgtcaccaatatatgatttaaaccgagcactgatgctggacttcatgatttttaccctccctttggcaaggctttgtctcactgtacggtttaatttggtgatatcttaagcctttcttcccatccttaactgttcaagtatgtctgttgtaaccaataagtttattgctgtgaaattacttctgatggtagagaaggggttctataactgcttttgttttgttttggataaatttcctgttgtgtgggtggcatttttcttaacgagatttgcttctgtcttagcctcacacagggaaaatatccatttatcttctctctcgtgcttaattaatagctttatctttttttataccattttatccttttctctttaacagaaagtaaatatgtataaaatttgaaggaatcgaactaacaatacattctgtgtatattattttaatgaagaaaataaattgattactggcattggaacagtataaaataccagtttgtacagtatgacctatatgtgaccatgttactcccttccatttcacacaaagaaatagacacaactgcagttcacaagtagtactggctccaccccttggtgctggcagtgtttggggacattatgctggaaagagctcctagcatcagaggattaacactagcagattctgttccatctttgcactgttgcttacctgctgattttcttaactgttcttgtgcaatcgacaatgtgctaacctgcttttctctttttgtaaacgtttttgcattacaggctgcattcttgccttactgtatagaaaaagaaaaaaggctgggtttactattgcacattttaagcttttatacctttatcttcttggaatggtcagattctgaactggacagtcagaaccacaggtctgctgttaagggattttaaattgtgcatttttaaccctacagtgaaataacttaagatatccctgtgttcacagtgtgaggggctgttttatgtcatgttggcataaattgttttgtaaaagggaaagtgtttctaaaggtgtttcagcgcttgtgctgatacaaagtaagttattactttgcaccaggtggtttggccactgaattaatactgtatagcaagagaaacaatcttatttttttggacaacatgttttattaagttcttcatttctgttgattttttttattgcatttatgattcagtggctgggaattgagaatttatttgaaatagaataggtaacacctcagcgtactatagaaaatgcactcagctcaactgctgtgtttaaaatacacattttaaatccctctttacagacactaacataaaagtacatctttctgggttgtaaacatgtggtagtaccagagtattgtatagtcaatgttaaataaaagccaaaactggaatgtgcagaaagtaggctttggttaatttgtggattcatttttatttttgtctttgtttaactttttaaaaaataagatttctggagtagattggtatattctgttaaagacttacagtgatccattttgcttacactgttgcatcacaagggactcacccagggaccatgacctgctggtgtgtgtgtatatttacaaaaacaaaacaaacaaaccacccattgggatataaggtagcaatcacaaactaaagactgcggcttgttgaggtgcaataccctgactcccaaagttagttacagtgggttttattgtttttgtgactgaaggatttattcagactgctgtactcttcatttgatgtaacaaaatgctattaatctaaatatttgtaaataaagtacctgtatctagattaaattaaaattggttgcattattttctgaactataatagggtttttcttcaggtgaacaatttgacgtgtcatcagtttttattgcagcactgtccatattcattgtataaagagaggtctacgtatgtagcatataaaaccacatcactaagtaatagacccacagctttattcttgtgtttacattacccttgaaatgttttcagtcaacccttttcagtgtaagatcagcacatttggtggctgatgctgttctcctttgactgtaccgggagccagattctatcatatgcatgtgtaatcccctgtaatacactcaggtgctcacaaatagagcagattgtcatattgtaacatgcgtgtgccagacaccgggcagtacactttggaaagaatgtgaaatccttttaatttttaatccatagcttactgcttgtgcagtcacctgcctcttgaggttgctcattgcccttggacctgtgaggaggccttcagattagtaattggtgcttagtactatttatgcttaaatagatcttccagtacaatgttgaagtcttttttatggataataacgtgtttgatggagtaacttattatttttttttggttggtggtttacacgttaatagaggtagtacaatttctttggaaaggtgtcttttgaagccagctgttaagcttcatacattacctcccttctcaaattcggtaagacagtagttttggggaacttttttgcccatgtgtcttttaagtgtgattttaaaaaaatgagtggttcagttcattcccctaaacagaagaaaagaccaaataattaccttccattcctcttcatgtgggaatatagagagggttcatgtggcattttagagaaaagataatttatcctcattcaacacaggcccagaaaattgtgtcccagaaggatgtcagtaattgtgactaggccaggccttttagcattttgctaagacttgaaacaaaaaatgtaaatacaaaagaaatcaagttttgttttgaaagatgccttctagaacttactgtgtattaataaattgtcactttcattgtctttattgtaactccattgatcccgtatcttaacggttcacgtctagccaaataactgttttggaataaaaaccttggtggtga

SEQ ID NO: 173056 - DNA, 711 bp, Homo sapiens
  Payload ID: 14009
  Gene Symbol: RAB14
  Gene Name: RAB14, member RAS oncogene family
  ENST ID: ENST00000451303
  CDS Start-End: 167-711
acatgcgcccctctcaagtgctggcagaccactgtgcatgcagacaacgcacccaaagggaagaatcaggggaacagtaacgcaaccctgccagcatgccaatgtagaaaacttgaaagaatgaacacaaaaatgtttacaaaggatatcatggcagagtgccaccatggcaactgcaccatacaactactcttacatctttaaatatattattattggggacatgggagtaggaaaatcttgcttgcttcatcaatttacagaaaaaaaatttatggctgattgtcctcacacaattggtgttgaatttggtacaagaataatcgaagttagtggccaaaaaataaaactgcagatttgggatacggcaggacaggagcgatttagggctgttacacggagctactacagaggagctgcgggagctcttatggtctatgatatcactagaagaagtacatataaccacttaagcagctggttgacagatgcaaggaatctcaccaatccaaatactgtaataattctcataggaaataaagcagatttggaggcacagagagatgttacatatgaagaagccaaacagtttgctgaagaaaatggcttattgttcctcgaagcgagtgcaaaaacgggagagaatgtagaagatgccttccttgaggctgccaagaaaatctatcagaacattcaggatggaagcttgga

SEQ ID NO: 173057 - DNA, 1078 bp, Homo sapiens
  Payload ID: 14010
  Gene Symbol: REP15
  Gene Name: RAB15 effector protein
  Uniprot ID: Q6BDI9
  ENST ID: ENST00000310791
  CDS Start-End: 45-755
cgtctgaaccagattcacatgtttgatatttggatgcagagaaaatggggcagaaagcatcgcaacagttggctctgaaggacagcaaagaggtgcccgtcgtctgtgaggtggtcagtgaagctatagtccatgcagctcagaaactgaaggagtaccttggatttgaatatcctccaagtaaactctgcccagctgcaaatactctgaatgagatcttcttaatccatttcatcactttctgccaagaaaagggagttgatgagtggctgaccaccaccaagatgaccaagcaccaagccttcctgtttggtgcagactggatttggaccttttggggatccaacaagcaaataaagcttcagctcgcagtacagactctgcagatgtcttcacctcctcctgtggaatctaagccttgtgacctttccaatccagaatcaagggtagaggagtcttcctggaagaaaagtagatttgataagctggaagaattctgtaacttaataggagaggattgcctgggtctgtttatcatctttggtatgccaggaaagcctaaagacatcaggggagttgtcctggacagtgtcaaaagtcagatggtgaggagccatctgccaggagggaaggctgtggctcagtttgtcctggaaactgaagattgtgtgttcatcaaagagctgctcagaaattgtctgagtaagaaagacgggctgagagaggtgggcaaggtttatatcagcattctctgacttggatatgtattatgtgagtggcctgtaagaggaaaagaaaaaaagattctaataagcaagctcacctatttgcatcattccagcatgggattttttttcatttgttttcccattgattgaaaatgattactgggatcaaagtacattcatgtcgcaattacagagagagagagaaaaaaagaaaaccctggctctgcctatgatttaaaaacagttcaggaaaagttataatttagtttaatatttcattcacttattcaataataaaaatggaagagagataataaagtcacatttaaagtttgatttgcaaaaaaaaa

SEQ ID NO: 173058 - DNA, 3391 bp, Homo sapiens
  Payload ID: 14011
  Gene Symbol: RAB15
  Gene Name: RAB15, member RAS oncogene family
  Uniprot ID: P59190
  ENST ID: ENST00000267512
  CDS Start-End: 82-708
gggcgcgggccgcgatggcagcggcggagcagggctgagcccgctgcccgcccgcagttcccggccccgctggccccagtcatggcgaagcagtacgatgtgctgttccggctgctgctgatcggggactccggggtgggcaagacctgcctgctgtgccgcttcaccgacaacgagttccactcctcgcacatctccaccatcggtgttgactttaagatgaagaccatagaggtagacggcatcaaagtgcggatacagatctgggacactgcagggcaggagagataccagaccatcacaaagcagtactatcggcgggcccaggggatatttttggtctatgacattagcagcgagcgctcttaccagcacatcatgaagtgggtcagtgacgtggatgaggtaggagatgccacctcactgccggggtgtggagagggtgcctcaccggggaaggcaaggcgagggccagatgggaaggcaaatgcttccaggaagctttgccttccacagccctggatgaagacctctggtacgcaccagaaggcgtccagaagatccttattgggaataaggctgatgaggagcagaaacggcaggtgggaagagagcaagggcagcagctggcgaaggagtatggcatggacttctatgaaacaagtgcctgcaccaacctcaacattaaagagtcattcacgcgtctgacagagctggtgctgcaggcccataggaaggagctggaaggcctccggatgcgtgccagcaatgagttggcactggcagagctggaggaggaggagggcaaacccgagggcccagcgaactcttcgaaaacctgctggtgctgagtcctgtgtggggcaccccacacgacacccctcttccctcaggaggcccgtgggcagacaggggagccggggctttgccctgctgctgtcctctcgtgtgatgaccctattgagtatcagtagccactactccccctgcctggccctgagagcggctctgctgtcatctcaagcagcccctgtccccagcccgtccaccctggagtggtcttcttcagcctgtttccccagccacaggcctgctacgacccccacgatgtgccgcaagcactgtctcaccatcccgcacccaccagacaacagccagggctggagtccaggccactttcagctgctcctttctccgtgcatcgtgtctcttctctgctttttctctcttcccccacttctctttctctgacccctcccctccggtgcgtttcgtatcaaagctcctcaaaccccgtcccccgtgtgtcctgctgtgtgcagctcgctctttccttccttcctaagctatccaaggggatggacccaggctcgtggggaggttccacccttggatccaggaagaaccctccaccctgcctcgtgggtgggccaaaggctacagggtgcttcttcctcttcccccacccccactgtccctcatgtgccatgggcctgcctccccagtgacctgcgaaagtggagcatcgaggtaggagggaaacggcaaccagggagtcctcgagcctggggctgccctacctctacccattccccgaccagagctttgcccttgcttggctgcccgcctgcctctttggggaactgagctcagaggcaggtgcttcagagaaggaaacaaaatgaggggtggcagggataaaaagtcacctccattctctacctcccatgcagcatgaacacaatttctctccacctggctcccaaatttaaagatgtggaccaaggcctgtgggtactccaggggcaaggagagccctggggtcagtgacactgtcaggccaaccatgcactccacaaaggggagcatttggaaatgaaggactagctcctatgtatcaggttaagagcaagggagagctggccagggacagcagtttgcacagcagaggggaatgtagcaacagcagggcctcctaggccccatcttccatttcttaggtaagaagagcatttcctcagactcccaggcggaggactgagcctagccttcagcaaccaaggttctcctgggacccaaagtttatgggagaagggcaaagacttcatgggaagagagaaggaaggccctgggtagaaacgcttggtgctgttctctttggcctttaagacaaagcgctcatcttgccctctacctcctgataggcttgagggtttgccaaccacactgtggctacaggtggagggaagaggactccttcctccagagtgctatgttcaggaagtttctttaaccccatatggcccaagagtagctcgtaggaggccctttaaagacggaacaagtaatttaccagttctactggggttcctgcccaccgtcccaaggtgggcgaggcctaggaagagggtcattcttaagccacacattagctgcactgcgtggctgcagccaaaacaaagaactgggtgttgagtattcatcaactaagaaccaaaatccagggcactcatatgtgaaggataagaacctcacttccttactcctccaaaaagaagtggggaaagaaccatcaaacctttcctcctgacttaccaaaccaggaaaacagcaggagagggtggctcaggacttagggacagggtatagcttagatggtggaaagcaaaggagagcaggaagttgtaaatcactggctaatgagaaaaggagacagctaactctaggatgaagctgtgactaggctggagttgcttccttgaagatgggactccttgggtatcaagacctatgccacatcacactggggctagggaagtaggtgatgccagccctcaagtctgtcttcagccagggacttgagaagttatattgggcagtggctccaatctgtggaccagtatttcagctttccctgaagatcaggcagggtgccattcattgtctttctctcctagccccctcaggaaagaaggactatatttgtactgtaccctaggggttctggaagggaaaacatggaatcaggattctatagactgataggccctatccacaagggccatgactgggaaaaggtatgggagcagaaggagaattgggattttagggtgcagctacgctcaccctaaacttttggtggcctggggcatgtcttgaggcccagactgttaaccaggctctgctggcctgtttactcgtcaccacctctgcacctgctgtcttgagactccatccagccccaggcacgccacctgctcctgagcctccactatctccctgtgacgggtgaacttcgtgtactgtgtctcgggtccatatatgaattgtgagcagggttcatctattttaaacacagatgtttacaaaataaagattatttcaaaccacc

SEQ ID NO: 173059 - DNA, 683 bp, Homo sapiens
  Payload ID: 14011
  Gene Symbol: RAB15
  Gene Name: RAB15, member RAS oncogene family
  ENST ID: ENST00000426039
  CDS Start-End: 64-564
ctgggcgacagaggaagactccgtcaagaaaaaagagaaaaggcatcaggtgttgactttaagatgaagaccatagaggtagacggcatcaaagtgcggatacagatctgggacactgcagggcaggagagataccagaccatcacaaagcagtactatcggcgggcccaggggatatttttggtctatgacattagcagcgagcgctcttaccagcacatcatgaagtgggtcagtgacgtggatgagtacgcaccagaaggcgtccagaagatccttattgggaataaggctgatgaggagcagaaacggcaggtgggaagagagcaagggcagcagctggcgaaggagtatggcatggacttctatgaaacaagtgcctgcaccaacctcaacattaaagagtcattcacgcgtctgacagagctggtgctgcaggcccataggaaggagctggaaggcctccggatgcgtgccagcaatgagttggcactggcagagctggaggaggaggagggcaaacccgagggcccagcgaactcttcgaaaacctgctggtgctgagtcctgtgtggggcaccccacacgacacccctcttccctcaggaggcccgtgggcagacaggggagccggggctttgccctgctgctgtcctctcgtgtgatgaccctattgagtatca

SEQ ID NO: 173060 - DNA, 3515 bp, Homo sapiens
  Payload ID: 14011
  Gene Symbol: RAB15
  Gene Name: RAB15, member RAS oncogene family
  Uniprot ID: P59190
  ENST ID: ENST00000533601
  CDS Start-End: 339-977
cgcgcgctccccgccccctctctccggggcggcggcggcggcgcaggggaaggggcgggcaggggccgccgccggtttctcctcccaccgcctcgcgccagcccagccgagccgagccgagccgagcgggcgccgcgccgggctcccgccgcagccgcgcttcccggcacccagcgagcgagtgggcaggcgggcgggcgaggcagccgcgggggccgggcccggcgtcctcctcgccgcccgcagcgtccccgggcgggcgcgggccgcgatggcagcggcggagcagggctgagcccgctgcccgcccgcagttcccggccccgctggccccagtcatggcgaagcagtacgatgtgctgttccggctgctgctgatcggggactccggggtgggcaagacctgcctgctgtgccgcttcaccgacaacgagttccactcctcgcacatctccaccatcggtgttgactttaagatgaagaccatagaggtagacggcatcaaagtgcggatacagatctgggacactgcagggcaggagagataccagaccatcacaaagcagtactatcggcgggcccaggggatatttttggtctatgacattagcagcgagcgctcttaccagcacatcatgaagtgggtcagtgacgtggatgagtacgcaccagaaggcgtccagaagatccttattgggaataaggctgatgaggagcagaaacggcaggtgggaagagagcaagggcagcagctggcgaaggagtatggcatggacttctatgaaacaagtgcctgcaccaacctcaacattaaagagtcattcacgcgtctgacagagctggtgctgcaggcccataggaaggagctggaaggcctccggatgcgtgccagcaatgagttggcactggcagagctggaggaggaggagggcaaacccgagggcccagcgaactcttcgaaaacctgctggtgctgagtcctgtgtggggcaccccacacgacacccctcttccctcaggaggcccgtgggcagacaggggagccggggctttgccctgctgctgtcctctcgtgtgatgaccctattgagtatcagtagccactactccccctgcctggccctgagagcggctctgctgtcatctcaagcagcccctgtccccagcccgtccaccctggagtggtcttcttcagcctgtttccccagccacaggcctgctacgacccccacgatgtgccgcaagcactgtctcaccatcccgcacccaccagacaacagccagggctggagtccaggccactttcagctgctcctttctccgtgcatcgtgtctcttctctgctttttctctcttcccccacttctctttctctgacccctcccctccggtgcgtttcgtatcaaagctcctcaaaccccgtcccccgtgtgtcctgctgtgtgcagctcgctctttccttccttcctaagctatccaaggggatggacccaggctcgtggggaggttccacccttggatccaggaagaaccctccaccctgcctcgtgggtgggccaaaggctacagggtgcttcttcctcttcccccacccccactgtccctcatgtgccatgggcctgcctccccagtgacctgcgaaagtggagcatcgaggtaggagggaaacggcaaccagggagtcctcgagcctggggctgccctacctctacccattccccgaccagagctttgcccttgcttggctgcccgcctgcctctttggggaactgagctcagaggcaggtgcttcagagaaggaaacaaaatgaggggtggcagggataaaaagtcacctccattctctacctcccatgcagcatgaacacaatttctctccacctggctcccaaatttaaagatgtggaccaaggcctgtgggtactccaggggcaaggagagccctggggtcagtgacactgtcaggccaaccatgcactccacaaaggggagcatttggaaatgaaggactagctcctatgtatcaggttaagagcaagggagagctggccagggacagcagtttgcacagcagaggggaatgtagcaacagcagggcctcctaggccccatcttccatttcttaggtaagaagagcatttcctcagactcccaggcggaggactgagcctagccttcagcaaccaaggttctcctgggacccaaagtttatgggagaagggcaaagacttcatgggaagagagaaggaaggccctgggtagaaacgcttggtgctgttctctttggcctttaagacaaagcgctcatcttgccctctacctcctgataggcttgagggtttgccaaccacactgtggctacaggtggagggaagaggactccttcctccagagtgctatgttcaggaagtttctttaaccccatatggcccaagagtagctcgtaggaggccctttaaagacggaacaagtaatttaccagttctactggggttcctgcccaccgtcccaaggtgggcgaggcctaggaagagggtcattcttaagccacacattagctgcactgcgtggctgcagccaaaacaaagaactgggtgttgagtattcatcaactaagaaccaaaatccagggcactcatatgtgaaggataagaacctcacttccttactcctccaaaaagaagtggggaaagaaccatcaaacctttcctcctgacttaccaaaccaggaaaacagcaggagagggtggctcaggacttagggacagggtatagcttagatggtggaaagcaaaggagagcaggaagttgtaaatcactggctaatgagaaaaggagacagctaactctaggatgaagctgtgactaggctggagttgcttccttgaagatgggactccttgggtatcaagacctatgccacatcacactggggctagggaagtaggtgatgccagccctcaagtctgtcttcagccagggacttgagaagttatattgggcagtggctccaatctgtggaccagtatttcagctttccctgaagatcaggcagggtgccattcattgtctttctctcctagccccctcaggaaagaaggactatatttgtactgtaccctaggggttctggaagggaaaacatggaatcaggattctatagactgataggccctatccacaagggccatgactgggaaaaggtatgggagcagaaggagaattgggattttagggtgcagctacgctcaccctaaacttttggtggcctggggcatgtcttgaggcccagactgttaaccaggctctgctggcctgtttactcgtcaccacctctgcacctgctgtcttgagactccatccagccccaggcacgccacctgctcctgagcctccactatctccctgtgacgggtgaacttcgtgtactgtgtctcgggtccatatatgaattgtgagcagggttcatctattttaaacacagatgtttacaaaataaagattatttcaaacca

SEQ ID NO: 173061 - DNA, 533 bp, Homo sapiens
  Payload ID: 14011
  Gene Symbol: RAB15
  Gene Name: RAB15, member RAS oncogene family
  ENST ID: ENST00000554593
  CDS Start-End: 82-533
acactctcggggactcatggagacgggtgttcgaatccagatcctgctcaaggccttcctacctcgggtgttgactttaagatgaagaccatagaggtagacggcatcaaagtgcggatacagatctgggacactgcagggcaggagagataccagaccatcacaaagcagtactatcggcgggcccaggggatatttttggtctatgacattagcagcgagcgctcttaccagcacatcatgaagtgggtcagtgacgtggatgagtacgcaccagaaggcgtccagaagatccttattgggaataaggctgatgaggagcagaaacggcaggtgggaagagagcaagggcagcagctggcgaaggagtatggcatggacttctatgaaacaagtgcctgcaccaacctcaacattaaagagtcattcacgcgtctgacagagctggtgctgcaggcccataggaaggagctggaaggcctccggatgcgtgccagcaatgagttggcactggcagagctggaggaggagga

SEQ ID NO: 173062 - DNA, 2209 bp, Homo sapiens
  Payload ID: 14011
  Gene Symbol: RAB15
  Gene Name: RAB15, member RAS oncogene family
  ENST ID: ENST00000585059
  CDS Start-End: 1-422
gcccccgtccccagctggggaggaattgccagcccctccggctggaggcggtggcgccggaggccggagtccgggataaatctcggggtgttgactttaagatgaagaccatagaggtagacggcatcaaagtgcggatacagatctgggacactgcagggcaggagagataccagaccatcacaaagcagtactatcggcgggcccaggggatatttttggtctatgacattagcagcgagcgctcttaccagcacatcatgaagtgggtcagtgacgtggatgaggtaggagatgccacctcactgccggggtgtggagagggtgcctcaccggggaaggcaaggcgagggccagatgggaaggcaaatgcttccaggaagctttgccttccacagccctggatgaagacctctgggtgagtaagacatggggaagaaaccgaagctgccatgccctcactctctataccctgccaggcctccacggctgtgtctttcccggaaatgaattagttccaagtcttccctgtgagcagcttctttcctgaaatcttgggaccaggtggagttgcaagattgggatctagtcctggctctgcacaatagctgtggagccttgggaagccatttgaatcctctgggtccccagttcctgtagaatgagggctggacttacatccaatgtcctttccagctctgataccagtggtctaacccaaggaagcaccagtcttagccagagtgtcttctaccctaagctctccccgtgatacccttgagtacgcaccagaaggcgtccagaagatccttattgggaataaggctgatgaggagcagaaacggcaggtgggaagagagcaagggcagcagctggcgaaggagtatggcatggacttctatgaaacaagtgcctgcaccaacctcaacattaaagagtcattcacgcgtctgacagagctggtgctgcaggcccataggaaggagctggaaggcctccggatgcgtgccagcaatgagttggcactggcagagctggaggaggaggagggcaaacccgagggcccagcgaactcttcgaaaacctgctggtgctgagtcctgtgtggggcaccccacacgacacccctcttccctcaggaggcccgtgggcagacaggggagccggggctttgccctgctgctgtcctctcgtgtgatgaccctattgagtatcagtagccactactccccctgcctggccctgagagcggctctgctgtcatctcaagcagcccctgtccccagcccgtccaccctggagtggtcttcttcagcctgtttccccagccacaggcctgctacgacccccacgatgtgccgcaagcactgtctcaccatcccgcacccaccagacaacagccagggctggagtccaggccactttcagctgctcctttctccgtgcatcgtgtctcttctctgctttttctctcttcccccacttctctttctctgacccctcccctccggtgcgtttcgtatcaaagctcctcaaaccccgtcccccgtgtgtcctgctgtgtgcagctcgctctttccttccttcctaagctatccaaggggatggacccaggctcgtggggaggttccacccttggatccaggaagaaccctccaccctgcctcgtgggtgggccaaaggctacagggtgcttcttcctcttcccccacccccactgtccctcatgtgccatgggcctgcctccccagtgacctgcgaaagtggagcatcgaggtaggagggaaacggcaaccagggagtcctcgagcctggggctgccctacctctacccattccccgaccagagctttgcccttgcttggctgcccgcctgcctctttggggaactgagctcagaggcaggtgcttcagagaaggaaacaaaatgaggggtggcagggataaaaagtcacctccattctctacctcccatgcagcatgaacacaatttctctccacctggctcccaaatttaaagatgtggaccaaggcctgtgggtactccaggggcaaggagagccctggggtcagtgacactgtcaggccaaccatgcactccacaaaggggagcatttggaaatgaaggactagctcctatgtatcaggttaagagcaagggagagctggccagggacagcagtttgcacagcagaggggaatgtagcaa

SEQ ID NO: 173063 - DNA, 1966 bp, Homo sapiens
  Payload ID: 14012
  Gene Symbol: RAB17
  Gene Name: RAB17, member RAS oncogene family
  Uniprot ID: Q9H0T7
  ENST ID: ENST00000264601
  CDS Start-End: 631-1269
actcagttgcctctggccagtgcagggctcagccagggatggcttctagctgacagtgggaggaattaattcatctgaccggaatattcttttctcttctgggctgttggtttttcaagtgcaacaaagattccatacagctccaaggaaggagccaagaaaaacattctgtgccaaagtgagatcctggaagtgaaaccccggaataaagctgaaaaacgggctccagttgggtgccaggaaatgcaggactggaatgtgacttgacttccggcagcgcgcaggtgctcccgggtcacctgctttgaggtccagcctcctgccctgcctcaggtgaccacatgaccactgtggactttgccctgaaaccttctgggaggagaagaggcctgaccttggcgctggggtccagtgggcattgctctggtccgaggctgctgctcttgacctctgctctgcggctgttttccattggagtagaggctcctcctgtcctgtcctgcctgtggagggaagcaaaccttcccctggaccagagagaggagaaagcggagacaggtagcaacgctgtggactggtgatgacaggctcttcagctccctgcaagtgaccgggcctggggaacagggcatggcacaggcacacaggaccccccagcccagggctgcccccagccagccccgtgtgttcaagctggttctcctgggaagtggctccgtgggtaagtccagcttggctcttcggtacgtgaagaacgacttcaagagtatcctgcctacggtgggctgtgcgttcttcacaaaggtggtggatgtgggtgccacctctctgaagcttgagatctgggacacagctggccaggagaagtaccacagcgtctgccacctctacttcaggggtgccaacgctgcgcttctggtgtacgacatcaccaggaaggattccttcctcaaggctcagcagtggctgaaggacctggaggaggagctgcacccaggagaagtcctggtgatgctggtgggcaacaagacggacctcagccaggagcgggaggtgaccttccaggaagggaaggagtttgccgacagccagaagttgctgttcatggaaacttcggccaaactgaaccaccaggtgtcggaggtgttcaatacagtggcccaagagctactgcagagaagcgacgaggagggccaggctctacggggggatgcagctgtggctctgaacaaggggcccgcgaggcaggccaaatgctgcgcccactaggtgcagccactcctgggggctgtggggaagacaccccctgcctgggccatggccagctctaggtggattctgattcactgtcaatgctgggttgctcccgagccctagatgttcctggaagttggccccctttatgaaaaccacttcccacagccagtgggaactgccagaggaagatctggcgtcacatggctcccaggaaagtgctgtgccctatccccactgataccatctgattccccgatgcctgtgcctgttccacctggacggtggccccctcagcctggcagcctctggacagagaggaaggaaggattggaaaagtccccgcagcacagcgacggtgggaagatgccttacgtctgatcttgatgggggcactggcctggagcctgggcccacctgcttctggggggttggggagcaggccagatggaggtggtggtgccaggaagaaatggagcgatgactgactgtggggtgggcccaggatttccacatcttggtgaagttgcccctgggaagggcagctgggggcagtggcgccagttcccttccatggtctcccggctggcaatgtggtgaagctgagtttctgtccaatgagcaggaagattctgagacatttcgcctgagatataagttgtactgcgtatgcagtttttcctccaaaaattaaattgcttttgacaatctg

SEQ ID NO: 173064 - DNA, 1792 bp, Homo sapiens
  Payload ID: 14012
  Gene Symbol: RAB17
  Gene Name: RAB17, member RAS oncogene family
  ENST ID: ENST00000392001
  CDS Start-End: 609-767
cagggctcagccagggatggcttctagctgacagtgggaggaattaattcatctgaccggaatattcttttctcttctgggctgttggtttttcaagtgcaacaaagattccatacagctccaaggaaggagccaagaaaaacattctgtgccaaagtgagatcctggaagtgaaaccccggaataaagctgaaaaacgggctccagttgggtgccaggaaatgcaggactggaatgtgacttgacttccggcagcgcgcaggtgctcccgggtcacctgctttgaggtccagcctcctgccctgcctcaggtgaccacatgaccactgtggactttgccctgaaaccttctgggaggagaagaggcctgaccttggcgctggggtccagtgggcattgctctggtccgaggctgctgctcttgacctctgctctgcggctgttttccattggagtagaggctcctcctgtcctgtcctgcctgtggagggaagcaaaccttcccctggaccagagagaggagaaagcggagacaggtagcaacgctgtggactggtgatgacaggctcttcagctccctgcaagtgaccgggcctggggaacagggcatggcacaggcacacaggaccccccagcccagggctgcccccagccagccccgtgtgttcaagctggttctcctgggaagtggctccgtgggtaagtccagcttggctcttcggtacgtgaagaacgacttcaagagtatcctgcctacggtgggctgattccttcctcaaggctcagcagtggctgaaggacctggaggaggagctgcacccaggagaagtcctggtgatgctggtgggcaacaagacggacctcagccaggagcgggaggtgaccttccaggaagggaaggagtttgccgacagccagaagttgctgttcatggaaacttcggccaaactgaaccaccaggtgtcggaggtgttcaatacagtggcccaagagctactgcagagaagcgacgaggagggccaggctctacggggggatgcagctgtggctctgaacaaggggcccgcgaggcaggccaaatgctgcgcccactaggtgcagccactcctgggggctgtggggaagacaccccctgcctgggccatggccagctctaggtggattctgattcactgtcaatgctgggttgctcccgagccctagatgttcctggaagttggccccctttatgaaaaccacttcccacagccagtgggaactgccagaggaagatctggcgtcacatggctcccaggaaagtgctgtgccctatccccactgataccatctgattccccgatgcctgtgcctgttccacctggacggtggccccctcagcctggcagcctctggacagagaggaaggaaggattggaaaagtccccgcagcacagcgacggtgggaagatgccttacgtctgatcttgatgggggcactggcctggagcctgggcccacctgcttctggggggttggggagcaggccagatggaggtggtggtgccaggaagaaatggagcgatgactgactgtggggtgggcccaggatttccacatcttggtgaagttgcccctgggaagggcagctgggggcagtggcgccagttcccttccatggtctcccggctggcaatgtggtgaagctgagtttctgtccaatgagcaggaagattctgagacatttcgcctgagatataagttgtactgcgtatgcagtttttcctccaaaaattaaattgcttttgacaatctg

SEQ ID NO: 173065 - DNA, 1077 bp, Homo sapiens
  Payload ID: 14012
  Gene Symbol: RAB17
  Gene Name: RAB17, member RAS oncogene family
  Uniprot ID: Q9H0T7
  ENST ID: ENST00000409822
  CDS Start-End: 539-796
agcctcctgccctgcctcaggtgaccacatgaccactgtggactttgccctgaaaccttctgggaggagaagaggcctgaccttggcgctggggtccagtgggcattgctctggtccgaggctgctgctcttgacctctgctctgcggctgttttccattggagtagaggctcctcctgtcctgtcctgcctgtggagggaagcaaaccttcccctggaccagagagaggagaaagcggagacaggtagcaacgctgtggactggtgatgacaggctcttcagctccctgcaagtgaccgggcctggggaacaggtgcgttcttcacaaaggtggtggatgtgggtgccacctctctgaagcttgagatctgggacacagctggccaggagaagtaccacagcgtctgccacctctacttcaggggtgccaacgctgcgcttctggtgtacgacatcaccaggaaggattccttcctcaaggctcagcagtggctgaaggacctggaggaggagctgcacccaggagaagtcctggtgatgctggtgggcaacaagacggacctcagccaggagcgggaggtgaccttccaggaagggaaggagtttgccgacagccagaagttgctgttcatggaaacttcggccaaactgaaccaccaggtgtcggaggtgttcaatacagtggcccaagagctactgcagagaagcgacgaggagggccaggctctacggggggatgcagctgtggctctgaacaaggggcccgcgaggcaggccaaatgctgcgcccactaggtgcagccactcctgggggctgtggggaagacaccccctgcctgggccatggccagctctaggtggattctgattcactgtcaatgctgggttgctcccgagccctagatgttcctggaagttggccccctttatgaaaaccacttcccacagccagtgggaactgccagaggaagatctggcgtcacatggctcccaggaaagtgctgtgccctatccccactgataccatctgattccccgatgcctgtgcctgttccacctggacggtggccccctca

SEQ ID NO: 173066 - DNA, 466 bp, Homo sapiens
  Payload ID: 14012
  Gene Symbol: RAB17
  Gene Name: RAB17, member RAS oncogene family
  ENST ID: ENST00000409576
  CDS Start-End: 198-359
gctgctgctcttgacctctgctctgcggctgttttccattggagtagaggctcctcctgtcctgtcctgcctgtggagggaagcaaaccttcccctggaccagagagaggagaaagcggagacaggtagcaacgctgtggactggtgatgacaggctcttcagctccctgcaagtgaccgggcctggggaacagggcatggcacagatggaggtggtggtgccaggaagaaatggagcgatgactgactgtggggtgggcccaggatttccacatcttggtgaagttgcccctgggaagggcagctgggggcagtggcgccagttcccttccatggtctcccggctggcaatgtggtgaagctgagtttctgtccaatgagcaggaagattctgagacatttcgcctgagatataagttgtactgcgtatgcagtttttcctccaaaaattaaattgcttttgaca

SEQ ID NO: 173067 - DNA, 1511 bp, Homo sapiens
  Payload ID: 14012
  Gene Symbol: RAB17
  Gene Name: RAB17, member RAS oncogene family
  ENST ID: ENST00000414278
  CDS Start-End: 253-417
ggagaagaggcctgaccttggcgctggggtccagtgggcattgctctggtccgaggctgctgctcttgacctctgctctgcggctgttttccattggagtagaggctcctcctgtcctgtcctgcctgtggagggaagcaaaccttcccctggaccagagagaggagaaagcggagacaggtagcaacgctgtggactggtgatgacaggctcttcagctccctgcaagtgaccgggcctggggaacagggcatggcacaggcacacaggaccccccagcccagggctgcccccagccagccccgtgtgttcaagctggttctcctgggaagtggctccgtgggtaagtccagcttggctcttcggtgcgttcttcacaaaggtggtggatgtgggtgccacctctctgaagcttgagatctgggacacagctggccaggagaagtaccacagcgtctgccacctctacttcaggggtgccaacgctgcgcttctggtgtacgacatcaccaggaaggattccttcctcaaggctcagcagtggctgaaggacctggaggaggagctgcacccaggagaagtcctggtgatgctggtgggcaacaagacggacctcagccaggagcgggaggtgaccttccaggaagggaaggagtttgccgacagccagaagttgctgttcatggaaacttcggccaaactgaaccaccaggtgtcggaggtgttcaatacagtggcccaagagctactgcagagaagcgacgaggagggccaggctctacggggggatgcagctgtggctctgaacaaggggcccgcgaggcaggccaaatgctgcgcccactaggtgcagccactcctgggggctgtggggaagacaccccctgcctgggccatggccagctctaggtggattctgattcactgtcaatgctgggttgctcccgagccctagatgttcctggaagttggccccctttatgaaaaccacttcccacagccagtgggaactgccagaggaagatctggcgtcacatggctcccaggaaagtgctgtgccctatccccactgataccatctgattccccgatgcctgtgcctgttccacctggacggtggccccctcagcctggcagcctctggacagagaggaaggaaggattggaaaagtccccgcagcacagcgacggtgggaagatgccttacgtctgatcttgatgggggcactggcctggagcctgggcccacctgcttctggggggttggggagcaggccagatggaggtggtggtgccaggaagaaatggagcgatgactgactgtggggtgggcccaggatttccacatcttggtgaagttgcccctgggaagggcagctgggggcagtggcgccagttcccttccatggtctcccggctggcaatgtggtgaagctgagtttctgtccaatgagcaggaagattctgagacatttcgcctgagatataagttgtactgcgtatgcagtttt

SEQ ID NO: 173068 - DNA, 663 bp, Homo sapiens
  Payload ID: 14012
  Gene Symbol: RAB17
  Gene Name: RAB17, member RAS oncogene family
  ENST ID: ENST00000411462
  CDS Start-End: 272-663
gccctgaaaccttctgggaggagaagaggcctgaccttggcgctggggtccagtgggcattgctctggtccgaggctgctgctcttgacctctgctctgcggctgttttccattggagtagaggctcctcctgtcctgtcctgcctgtggagggaagcaaaccttcccctggaccagagagaggagaaagcggagacaggtagcaacgctgtggactggtgatgacaggctcttcagctccctgcaagtgaccgggcctggggaacagggcatggcacaggcacacaggaccccccagcccagggctgcccccagccagccccgtgtgttcaagctggttctcctgggaagtggctccgtgggtgcgttcttcacaaaggtggtggatgtgggtgccacctctctgaagcttgagatctgggacacagctggccaggagaagtaccacagcgtctgccacctctacttcaggggtgccaacgctgcgcttctggtgtacgacatcaccaggaaggattccttcctcaaggctcagcagtggctgaaggacctggaggaggagctgcacccaggagaagtcctggtgatgctggtgggcaacaagacggacctcagccaggagcgggaggtgaccttccaggaagggaaggagtttgccgacag

SEQ ID NO: 173069 - DNA, 421 bp, Homo sapiens
  Payload ID: 14012
  Gene Symbol: RAB17
  Gene Name: RAB17, member RAS oncogene family
  ENST ID: ENST00000430445
  CDS Start-End: 1-421
tgttcaagctggttctcctgggaagtggctccgtgggtgcgttcttcacaaaggtggtggatgtgggtgccacctctctgaagcttgagatctgggacacagctggccaggagaagtaccacagcgtctgccacctctacttcaggggtgccaacgctgcgcttctggtgtacgacatcaccaggaaggattccttcctcaaggctcagcagtggctgaaggacctggaggaggagctgcacccaggagaagtcctggtgatgctggtgggcaacaagacggacctcagccaggagcgggaggtgaccttccaggacgaagaccgtgtaaacagctgcagacaagtggctgatggggagaccccacacacactagaggctggcgcaggggaagacccaactcagggcttagaccgacgggc

SEQ ID NO: 173070 - DNA, 4886 bp, Homo sapiens
  Payload ID: 14013
  Gene Symbol: RAB18
  Gene Name: RAB18, member RAS oncogene family
  Uniprot ID: Q9NP72
  ENST ID: ENST00000356940
  CDS Start-End: 103-723
tggcagacgtggagcggcgcgcatgcgcagcagctcactctgctgaagggctgagaggcgcacccgggcggccagctgggctcggagcggaacggggtcaggatggacgaggacgtgctaaccaccctgaagatcctcatcatcggcgagagtggggtgggcaagtccagcctgctcttgaggttcacagatgatacgtttgatccagaacttgcagcaacaataggtgttgactttaaggtgaaaacaatttcagtggatggaaataaggctaaacttgcaatatgggatactgctggtcaagagaggtttagaacattaactcccagctattatagaggtgcacagggtgttatattagtttatgatgtcacaagaagagatacatttgttaaactggataattggttaaatgaattggaaacatactgtacaagaaatgacatagtaaacatgctagttggaaataaaatcgataaggaaaatcgtgaagtcgatagaaatgaaggcctgaaatttgcacgaaagcattccatgttatttatagaggcaagtgcaaaaacctgtgatggtgtacaatgtgcctttgaagaacttgttgaaaagatcattcagacccctggactgtgggaaagtgagaaccagaataaaggagtcaaactgtcacacagggaagaaggccaaggaggaggagcctgtggtggttattgctctgtgttataaactctgggaaattccatctcttgcatatttgatcagatagtgacatctttctgtatataaactctttaactgctattttagggaccttgcagtttgcacataattgttttatatcatagcagtaaatatttgcaagaaatcccactcatcgaccccgggtaaaatgttatggtaagcatgcacagtttgcagtctacagtttttttatgtagcacaaaataggtgtacctttataagtacattcaattttatgatttacatttatcatgtaatttttaaaaaaatccatctatctaggatatgttgatacaaagtctgcttttgctattctttttgcttaaatactcctatcattttctgaattacttggtatttagaactcctagcaccacggggaagaatagaggtatcatcaaacgtggcaaattttctttcaggaataataaagagcatgattccacagcttttctgggatgtttgagattcttttttagtactaagcaaaattctcatcacagaatgtagcccaggccaatttataactaaatctctatttgttcggatgatgcttctaaaacagcattgataggttaaagaagcttggtatttttaatttacttcaatgattagctcagttgcttaactggagttttaatcctgtgatatgtacattggattcatgactgtgcagcatttttagttatgtggtgtttggcagaatgacaataaggttttcccccattttggtttcaggaggacatgaatagtgtgtttattgtaactcctcatacacttttaaaaccaacatcttttttcataaatgttggtagtgtttgtccaggtaccttaactgtagcttgtgtaatgttgatgaatatctgtatcttacggcttccataatggctagttgatattcaaaaacctatttctgtgttttgaggggtggggaaaaaaaacactaagtgataatttgaaaaaggcatattgcttccagattctgatgtgtgagggaaaatactgtcacaatgaaaatcttgacaatttacttaacaagtaaccagtagttcatcaaaaccaacttgtacagactaataaatctttttcacagtattcagttttctcacctcttgctattgtatattgtagatttttttcattcatgtgttatttaatttacactgatctctgctattttaaccccccaaataagttatttgtcctttaaggttggttactataatacccctcagtaagattccagtattaatttctgggcagtttgttctctgtatacaattgcaaatgataagcatttttgtgagtgaccacctttgcaatatgtttgttaatttacttcatgttgggttctttctgaaatgtacatctttacatataaaaacctcacattctacttgatttacacttcctagtctacattacatgtggttgaaggttttatacattctatatgcttttactaaatatacaagatttactactagaaatttggagaaagaacactaacacatgtacttgtgatttgttcatgttatattaaaacttgagatttgtgtatttatgtagagtctgtattgacaagactgttgttttttgctccttgagctatataataatctgtgtattggattgttgtcttgatttggtctaaatttgaatatatatgagttacttgaatataacaaaaatgaattttgtttgatagatttatattgtaacctttttctagttcttgaataaatatagcctgctttccctagatgcatttgtgtaggaagtatatacatttccctattactctcatcagctgaagaatatgtactattgtgttactcaaattatgtggctttcattttgttgttttgttgcaagcttagtgttttgtagtggaggttttgtaaatgaaacagttgtaatatctaaggtcaggcacctagtaacagggttttgttaattcttttcagaatcattgaagcagtcttaaagggtcttttgcagatggtacaaattagaacaattagaatatagtattttgagttctagtagtactgagattgacccaaacaaataaaaaactattcaatttctgagtaatagttaatatttattgaaagcttccttggtgccagatgcctttctaagtgctgaattatctcattaaacctcacagcaaccttaagagattagtactcctattatgcccattttaaaggtgaggacaacacaatgtaggtatgttaggtaacccccaaagatcacatagctactcagtcactgagctggattccagtcatggcatttttacttctgagcccatactcttcaccatcgctcattttacaatgggtagttagttaccagctttttgtaacacaaccaagttaaggcagttccactatttctttatcactcttttgttatatgtaatagaagtatttcacacttttgggttatagagtaaatcccatgatgtaaacctacctcataagtcatgtgacataaaagttaaggtagtggagtaggtggtcttatttctttcacctgctcagagtggactgaaaatcctgacttagaaaaggtacaaagttaggggacttatggtaccttcactttttatgtgagaatagaaattatggaaacagtaatttgctcaaaactgaaatctggggtgatgttttcatttcatgtatttgattgccatccataaactcatacttggtgttgacattctagctgagtgttgtggaaatagacttgattttgattcatcgtagcttgcatggtcaagagacatgattctctactaagggtggggctagcaccatagctcataaaagaatccttcttacaccagtacttgttctgcctgtgagttggcacagacttacctaataaccatagtgtctttaagtacaacttaatacatattttttctgtgtatttttttcaaatgaactcaacaattcttcaggtattatagatcagagatcctctccatattcaagcattatgcttctctttcttgggggtacatttcactagtaatacttaggaagttattttgtctttcctgtatttccctagttaagtataggggtaaaaacgttattcagctttcagaagacattgttctgactccgaccctgccgtgtatactcaactatatagacttcaccctgggttttgcctaaactgttgaaagacgagaataaatagacatagacaggctagctaagtcaagactaggggctaaggaatatagaatcacccaggtctttttttttttttttaatttttctctcctcagttgggaacatctatcatgctggaggactactgtgatggggctttacattttactgttttgttgctagcttattgtttcatacttgggaatcagtcatgtttctgattgtggtataaagtttgcttaagtgccccttagttaaagctgttcaatgaatgtaagcacacacacacctacacacatattttgaatagtcgtgtgttcatgcctgttctcagtcttgtcccctttaccgtttctcatgcaggttatttcttgctttttttttttttcctcttttttaaccggagaagcaacaaattacgtagttttttttgtgtttctttgattactagtgagcttgagtacttttaatattttattggatatgtttgtgactgactttaatttcttgtttgtgtgtgctgtggctgcccgatccagcacctacttccttctcccaccataccacccccacccccacccctgcaaacaattggcatgtggtttgggtggcattgtcacaccctcggctttctagattaacccagttaccttttagcagtgccccacttccccagtagcaatggttcaggggtaggcacctgacccagaccagactactgagataaagatgtttgcctaggctttttcaggagcaattgaagacatcttgttggagatagtgtgctgggaggagtcacattctgaacttgctgcagctcgtttttctaatataaaggaaccagcctgaggcagtaccagggtgagagggagtctattggagcccttgggaacttctggatcaaattggacctgaattgagatctatttctcagctttcacttatgtgagccaa

SEQ ID NO: 173071 - DNA, 617 bp, Homo sapiens
  Payload ID: 14013
  Gene Symbol: RAB18
  Gene Name: RAB18, member RAS oncogene family
  ENST ID: ENST00000375802
  CDS Start-End: 43-528
cacccgggcggccagctgggctcggagcggaacggggtcaggatggacgaggacgtgctaaccaccctgaagatcctcatcatcggcgagagtggggtgggcaagtccagcctgctcttgaggttcacagatgatacgtttgatccagaacttgcagcaacaatagtttatgatgtcacaagaagagatacatttgttaaactggataattggttaaatgaattggaaacatactgtacaagaaatgacatagtaaacatgctagttggaaataaaatcgataaggaaaatcgtgaagtcgatagaaatgaaggcctgaaatttgcacgaaagcattccatgttatttatagaggcaagtgcaaaaacctgtgatggtgtacaatgtgcctttgaagaacttgttgaaaagatcattcagacccctggactgtgggaaagtgagaaccagaataaaggagtcaaactgtcacacagggaagaaggccaaggaggaggagcctgtggtggttattgctctgtgttataaactctgggaaattccatctcttgcatatttgatcagatagtgacatctttctgtatataaactctttaactgctattttagggaccttg

SEQ ID NO: 173072 - DNA, 873 bp, Homo sapiens
  Payload ID: 14013
  Gene Symbol: RAB18
  Gene Name: RAB18, member RAS oncogene family
  ENST ID: ENST00000423465
  CDS Start-End: 1-873
gcgcctgcctggttcccggcctttgccaggcccaagttctctgggtcgctctccctcctgtagcgccgagaaaacaccattccgagggccgccgctcggccggcagtcggctgtgaaagaactggatcttgtgactgctggaaaatttcgctttagtgtaaggtccgagtgcttcagccgtgggccacctttgaaaataaaatgtaattgttatttctcattttgccacatcctgtggagacagaagattagtgttgtgctttcattttttactttttccttggggaaaataatattgacagtggagttgagtataagcctgctcttgaggttcacagatgatacgtttgatccagaacttgcagcaacaataggtgttgactttaaggtgaaaacaatttcagtggatggaaataaggctaaacttgcaatatgggttactttgcatcagcagactgcaaactttttcttaaagagccagataggaaatagtccaatcctgaagtgggccatgtggcaatacgatactgctggtcaagagaggtttagaacattaactcccagctattatagaggtgcacagggtgttatattagtttatgatgtcacaagaagagatacatttgttaaactggataattggttaaatgaattggaaacatactgtacaagaaatgacatagtaaacatgctagttggaaataaaatcgataaggaaaatcgtgaagtcgatagaaatgaaggcctgaaatttgcacgaaagcattccatgttatttatagaggcaagtgcaaaaacctgtgatggtgtacaatgtgcctttgaagaacttgttgaaaagatcattcagacccctggactgtgggaaagtga

SEQ ID NO: 173073 - DNA, 4811 bp, Homo sapiens
  Payload ID: 14013
  Gene Symbol: RAB18
  Gene Name: RAB18, member RAS oncogene family
  Uniprot ID: Q9NP72
  ENST ID: ENST00000535776
  CDS Start-End: 197-625
ggggattctgggtcgcgcagccgtggagctacctcaaggcggaactggggagtccagggcttcggcagcctgaacacccggtgtgaaaggaaggtggcagacgtggagcggcgcgcatgcgcagcagctcactctgctgaagggctgagaggcgcacccgggcggccagctgggctcggagcggaacggggtcaggatggacgaggacgtgctaaccaccctgaagatcctcatcatcggcgagagtggggtgggcaagtccagcctgctcttgaggttcacagatgatacgtttgatccagaacttgcagcaacaataggtgttgactttaaggtgaaaacaatttcagtggatggaaataaggctaaacttgcaatatgggaaaatcgtgaagtcgatagaaatgaaggcctgaaatttgcacgaaagcattccatgttatttatagaggcaagtgcaaaaacctgtgatggtgtacaatgtgcctttgaagaacttgttgaaaagatcattcagacccctggactgtgggaaagtgagaaccagaataaaggagtcaaactgtcacacagggaagaaggccaaggaggaggagcctgtggtggttattgctctgtgttataaactctgggaaattccatctcttgcatatttgatcagatagtgacatctttctgtatataaactctttaactgctattttagggaccttgcagtttgcacataattgttttatatcatagcagtaaatatttgcaagaaatcccactcatcgaccccgggtaaaatgttatggtaagcatgcacagtttgcagtctacagtttttttatgtagcacaaaataggtgtacctttataagtacattcaattttatgatttacatttatcatgtaatttttaaaaaaatccatctatctaggatatgttgatacaaagtctgcttttgctattctttttgcttaaatactcctatcattttctgaattacttggtatttagaactcctagcaccacggggaagaatagaggtatcatcaaacgtggcaaattttctttcaggaataataaagagcatgattccacagcttttctgggatgtttgagattcttttttagtactaagcaaaattctcatcacagaatgtagcccaggccaatttataactaaatctctatttgttcggatgatgcttctaaaacagcattgataggttaaagaagcttggtatttttaatttacttcaatgattagctcagttgcttaactggagttttaatcctgtgatatgtacattggattcatgactgtgcagcatttttagttatgtggtgtttggcagaatgacaataaggttttcccccattttggtttcaggaggacatgaatagtgtgtttattgtaactcctcatacacttttaaaaccaacatcttttttcataaatgttggtagtgtttgtccaggtaccttaactgtagcttgtgtaatgttgatgaatatctgtatcttacggcttccataatggctagttgatattcaaaaacctatttctgtgttttgaggggtggggaaaaaaaacactaagtgataatttgaaaaaggcatattgcttccagattctgatgtgtgagggaaaatactgtcacaatgaaaatcttgacaatttacttaacaagtaaccagtagttcatcaaaaccaacttgtacagactaataaatctttttcacagtattcagttttctcacctcttgctattgtatattgtagatttttttcattcatgtgttatttaatttacactgatctctgctattttaaccccccaaataagttatttgtcctttaaggttggttactataatacccctcagtaagattccagtattaatttctgggcagtttgttctctgtatacaattgcaaatgataagcatttttgtgagtgaccacctttgcaatatgtttgttaatttacttcatgttgggttctttctgaaatgtacatctttacatataaaaacctcacattctacttgatttacacttcctagtctacattacatgtggttgaaggttttatacattctatatgcttttactaaatatacaagatttactactagaaatttggagaaagaacactaacacatgtacttgtgatttgttcatgttatattaaaacttgagatttgtgtatttatgtagagtctgtattgacaagactgttgttttttgctccttgagctatataataatctgtgtattggattgttgtcttgatttggtctaaatttgaatatatatgagttacttgaatataacaaaaatgaattttgtttgatagatttatattgtaacctttttctagttcttgaataaatatagcctgctttccctagatgcatttgtgtaggaagtatatacatttccctattactctcatcagctgaagaatatgtactattgtgttactcaaattatgtggctttcattttgttgttttgttgcaagcttagtgttttgtagtggaggttttgtaaatgaaacagttgtaatatctaaggtcaggcacctagtaacagggttttgttaattcttttcagaatcattgaagcagtcttaaagggtcttttgcagatggtacaaattagaacaattagaatatagtattttgagttctagtagtactgagattgacccaaacaaataaaaaactattcaatttctgagtaatagttaatatttattgaaagcttccttggtgccagatgcctttctaagtgctgaattatctcattaaacctcacagcaaccttaagagattagtactcctattatgcccattttaaaggtgaggacaacacaatgtaggtatgttaggtaacccccaaagatcacatagctactcagtcactgagctggattccagtcatggcatttttacttctgagcccatactcttcaccatcgctcattttacaatgggtagttagttaccagctttttgtaacacaaccaagttaaggcagttccactatttctttatcactcttttgttatatgtaatagaagtatttcacacttttgggttatagagtaaatcccatgatgtaaacctacctcataagtcatgtgacataaaagttaaggtagtggagtaggtggtcttatttctttcacctgctcagagtggactgaaaatcctgacttagaaaaggtacaaagttaggggacttatggtaccttcactttttatgtgagaatagaaattatggaaacagtaatttgctcaaaactgaaatctggggtgatgttttcatttcatgtatttgattgccatccataaactcatacttggtgttgacattctagctgagtgttgtggaaatagacttgattttgattcatcgtagcttgcatggtcaagagacatgattctctactaagggtggggctagcaccatagctcataaaagaatccttcttacaccagtacttgttctgcctgtgagttggcacagacttacctaataaccatagtgtctttaagtacaacttaatacatattttttctgtgtatttttttcaaatgaactcaacaattcttcaggtattatagatcagagatcctctccatattcaagcattatgcttctctttcttgggggtacatttcactagtaatacttaggaagttattttgtctttcctgtatttccctagttaagtataggggtaaaaacgttattcagctttcagaagacattgttctgactccgaccctgccgtgtatactcaactatatagacttcaccctgggttttgcctaaactgttgaaagacgagaataaatagacatagacaggctagctaagtcaagactaggggctaaggaatatagaatcacccaggtctttttttttttttttaatttttctctcctcagttgggaacatctatcatgctggaggactactgtgatggggctttacattttactgttttgttgctagcttattgtttcatacttgggaatcagtcatgtttctgattgtggtataaagtttgcttaagtgccccttagttaaagctgttcaatgaatgtaagcacacacacacctacacacatattttgaatagtcgtgtgttcatgcctgttctcagtcttgtcccctttaccgtttctcatgcaggttatttcttgctttttttttttttcctcttttttaaccggagaagcaacaaattacgtagttttttttgtgtttctttgattactagtgagcttgagtacttttaatattttattggatatgtttgtgactgactttaatttcttgtttgtgtgtgctgtggctgcccgatccagcacctacttccttctcccaccataccacccccacccccacccctgcaaacaattggcatgtggtttgggtggcattgtcacaccctcggctttctagattaacccagttaccttttagcagtgccccacttccccagtagcaatggttcaggggtaggcacctgacccagaccagactactgagataaagatgtttgcctaggctttttcaggagcaattgaagacatcttgttggagatagtgtgctgggaggagtcacattctgaacttgctgcagctcgtttttctaatataaaggaaccagcctgaggcagtaccagggtgagagggagtctattggagcccttgggaacttctggatcaaattggacctgaattgagatctatttctcagctttcacttatgtgagccaataaattccttttttgttgaaggc

SEQ ID NO: 173074 - DNA, 4894 bp, Homo sapiens
  Payload ID: 14013
  Gene Symbol: RAB18
  Gene Name: RAB18, member RAS oncogene family
  Uniprot ID: Q9NP72
  ENST ID: ENST00000621805
  CDS Start-End: 1-708
atggacgaggacgtgctaaccaccctgaagatcctcatcatcggcgagagtggggtgggcaagtccagcctgctcttgaggttcacagatgatacgtttgatccagaacttgcagcaacaataggtgttgactttaaggtgaaaacaatttcagtggatggaaataaggctaaacttgcaatatgggttactttgcatcagcagactgcaaactttttcttaaagagccagataggaaatagtccaatcctgaagtgggccatgtggcaatacgatactgctggtcaagagaggtttagaacattaactcccagctattatagaggtgcacagggtgttatattagtttatgatgtcacaagaagagatacatttgttaaactggataattggttaaatgaattggaaacatactgtacaagaaatgacatagtaaacatgctagttggaaataaaatcgataaggaaaatcgtgaagtcgatagaaatgaaggcctgaaatttgcacgaaagcattccatgttatttatagaggcaagtgcaaaaacctgtgatggtgtacaatgtgcctttgaagaacttgttgaaaagatcattcagacccctggactgtgggaaagtgagaaccagaataaaggagtcaaactgtcacacagggaagaaggccaaggaggaggagcctgtggtggttattgctctgtgttataaactctgggaaattccatctcttgcatatttgatcagatagtgacatctttctgtatataaactctttaactgctattttagggaccttgcagtttgcacataattgttttatatcatagcagtaaatatttgcaagaaatcccactcatcgaccccgggtaaaatgttatggtaagcatgcacagtttgcagtctacagtttttttatgtagcacaaaataggtgtacctttataagtacattcaattttatgatttacatttatcatgtaatttttaaaaaaatccatctatctaggatatgttgatacaaagtctgcttttgctattctttttgcttaaatactcctatcattttctgaattacttggtatttagaactcctagcaccacggggaagaatagaggtatcatcaaacgtggcaaattttctttcaggaataataaagagcatgattccacagcttttctgggatgtttgagattcttttttagtactaagcaaaattctcatcacagaatgtagcccaggccaatttataactaaatctctatttgttcggatgatgcttctaaaacagcattgataggttaaagaagcttggtatttttaatttacttcaatgattagctcagttgcttaactggagttttaatcctgtgatatgtacattggattcatgactgtgcagcatttttagttatgtggtgtttggcagaatgacaataaggttttcccccattttggtttcaggaggacatgaatagtgtgtttattgtaactcctcatacacttttaaaaccaacatcttttttcataaatgttggtagtgtttgtccaggtaccttaactgtagcttgtgtaatgttgatgaatatctgtatcttacggcttccataatggctagttgatattcaaaaacctatttctgtgttttgaggggtggggaaaaaaaacactaagtgataatttgaaaaaggcatattgcttccagattctgatgtgtgagggaaaatactgtcacaatgaaaatcttgacaatttacttaacaagtaaccagtagttcatcaaaaccaacttgtacagactaataaatctttttcacagtattcagttttctcacctcttgctattgtatattgtagatttttttcattcatgtgttatttaatttacactgatctctgctattttaaccccccaaataagttatttgtcctttaaggttggttactataatacccctcagtaagattccagtattaatttctgggcagtttgttctctgtatacaattgcaaatgataagcatttttgtgagtgaccacctttgcaatatgtttgttaatttacttcatgttgggttctttctgaaatgtacatctttacatataaaaacctcacattctacttgatttacacttcctagtctacattacatgtggttgaaggttttatacattctatatgcttttactaaatatacaagatttactactagaaatttggagaaagaacactaacacatgtacttgtgatttgttcatgttatattaaaacttgagatttgtgtatttatgtagagtctgtattgacaagactgttgttttttgctccttgagctatataataatctgtgtattggattgttgtcttgatttggtctaaatttgaatatatatgagttacttgaatataacaaaaatgaattttgtttgatagatttatattgtaacctttttctagttcttgaataaatatagcctgctttccctagatgcatttgtgtaggaagtatatacatttccctattactctcatcagctgaagaatatgtactattgtgttactcaaattatgtggctttcattttgttgttttgttgcaagcttagtgttttgtagtggaggttttgtaaatgaaacagttgtaatatctaaggtcaggcacctagtaacagggttttgttaattcttttcagaatcattgaagcagtcttaaagggtcttttgcagatggtacaaattagaacaattagaatatagtattttgagttctagtagtactgagattgacccaaacaaataaaaaactattcaatttctgagtaatagttaatatttattgaaagcttccttggtgccagatgcctttctaagtgctgaattatctcattaaacctcacagcaaccttaagagattagtactcctattatgcccattttaaaggtgaggacaacacaatgtaggtatgttaggtaacccccaaagatcacatagctactcagtcactgagctggattccagtcatggcatttttacttctgagcccatactcttcaccatcgctcattttacaatgggtagttagttaccagctttttgtaacacaaccaagttaaggcagttccactatttctttatcactcttttgttatatgtaatagaagtatttcacacttttgggttatagagtaaatcccatgatgtaaacctacctcataagtcatgtgacataaaagttaaggtagtggagtaggtggtcttatttctttcacctgctcagagtggactgaaaatcctgacttagaaaaggtacaaagttaggggacttatggtaccttcactttttatgtgagaatagaaattatggaaacagtaatttgctcaaaactgaaatctggggtgatgttttcatttcatgtatttgattgccatccataaactcatacttggtgttgacattctagctgagtgttgtggaaatagacttgattttgattcatcgtagcttgcatggtcaagagacatgattctctactaagggtggggctagcaccatagctcataaaagaatccttcttacaccagtacttgttctgcctgtgagttggcacagacttacctaataaccatagtgtctttaagtacaacttaatacatattttttctgtgtatttttttcaaatgaactcaacaattcttcaggtattatagatcagagatcctctccatattcaagcattatgcttctctttcttgggggtacatttcactagtaatacttaggaagttattttgtctttcctgtatttccctagttaagtataggggtaaaaacgttattcagctttcagaagacattgttctgactccgaccctgccgtgtatactcaactatatagacttcaccctgggttttgcctaaactgttgaaagacgagaataaatagacatagacaggctagctaagtcaagactaggggctaaggaatatagaatcacccaggtctttttttttttttttaatttttctctcctcagttgggaacatctatcatgctggaggactactgtgatggggctttacattttactgttttgttgctagcttattgtttcatacttgggaatcagtcatgtttctgattgtggtataaagtttgcttaagtgccccttagttaaagctgttcaatgaatgtaagcacacacacacctacacacatattttgaatagtcgtgtgttcatgcctgttctcagtcttgtcccctttaccgtttctcatgcaggttatttcttgctttttttttttttcctcttttttaaccggagaagcaacaaattacgtagttttttttgtgtttctttgattactagtgagcttgagtacttttaatattttattggatatgtttgtgactgactttaatttcttgtttgtgtgtgctgtggctgcccgatccagcacctacttccttctcccaccataccacccccacccccacccctgcaaacaattggcatgtggtttgggtggcattgtcacaccctcggctttctagattaacccagttaccttttagcagtgccccacttccccagtagcaatggttcaggggtaggcacctgacccagaccagactactgagataaagatgtttgcctaggctttttcaggagcaattgaagacatcttgttggagatagtgtgctgggaggagtcacattctgaacttgctgcagctcgtttttctaatataaaggaaccagcctgaggcagtaccagggtgagagggagtctattggagcccttgggaacttctggatcaaattggacctgaattgagatctatttctcagctttcacttatgtgagccaataaattccttttttgttgaaggc

SEQ ID NO: 173075 - DNA, 4931 bp, Homo sapiens
  Payload ID: 14013
  Gene Symbol: RAB18
  Gene Name: RAB18, member RAS oncogene family
  ENST ID: ENST00000611151
  CDS Start-End: 197-745
ggggattctgggtcgcgcagccgtggagctacctcaaggcggaactggggagtccagggcttcggcagcctgaacacccggtgtgaaaggaaggtggcagacgtggagcggcgcgcatgcgcagcagctcactctgctgaagggctgagaggcgcacccgggcggccagctgggctcggagcggaacggggtcaggatggacgaggacgtgctaaccaccctgaagatcctcatcatcggcgagagtggggtgggcaagtccagcctgctcttgaggttcacagatgatacgtttgatccagaacttgcagatactgctggtcaagagaggtttagaacattaactcccagctattatagaggtgcacagggtgttatattagtttatgatgtcacaagaagagatacatttgttaaactggataattggttaaatgaattggaaacatactgtacaagaaatgacatagtaaacatgctagttggaaataaaatcgataaggaaaatcgtgaagtcgatagaaatgaaggcctgaaatttgcacgaaagcattccatgttatttatagaggcaagtgcaaaaacctgtgatggtgtacaatgtgcctttgaagaacttgttgaaaagatcattcagacccctggactgtgggaaagtgagaaccagaataaaggagtcaaactgtcacacagggaagaaggccaaggaggaggagcctgtggtggttattgctctgtgttataaactctgggaaattccatctcttgcatatttgatcagatagtgacatctttctgtatataaactctttaactgctattttagggaccttgcagtttgcacataattgttttatatcatagcagtaaatatttgcaagaaatcccactcatcgaccccgggtaaaatgttatggtaagcatgcacagtttgcagtctacagtttttttatgtagcacaaaataggtgtacctttataagtacattcaattttatgatttacatttatcatgtaatttttaaaaaaatccatctatctaggatatgttgatacaaagtctgcttttgctattctttttgcttaaatactcctatcattttctgaattacttggtatttagaactcctagcaccacggggaagaatagaggtatcatcaaacgtggcaaattttctttcaggaataataaagagcatgattccacagcttttctgggatgtttgagattcttttttagtactaagcaaaattctcatcacagaatgtagcccaggccaatttataactaaatctctatttgttcggatgatgcttctaaaacagcattgataggttaaagaagcttggtatttttaatttacttcaatgattagctcagttgcttaactggagttttaatcctgtgatatgtacattggattcatgactgtgcagcatttttagttatgtggtgtttggcagaatgacaataaggttttcccccattttggtttcaggaggacatgaatagtgtgtttattgtaactcctcatacacttttaaaaccaacatcttttttcataaatgttggtagtgtttgtccaggtaccttaactgtagcttgtgtaatgttgatgaatatctgtatcttacggcttccataatggctagttgatattcaaaaacctatttctgtgttttgaggggtggggaaaaaaaacactaagtgataatttgaaaaaggcatattgcttccagattctgatgtgtgagggaaaatactgtcacaatgaaaatcttgacaatttacttaacaagtaaccagtagttcatcaaaaccaacttgtacagactaataaatctttttcacagtattcagttttctcacctcttgctattgtatattgtagatttttttcattcatgtgttatttaatttacactgatctctgctattttaaccccccaaataagttatttgtcctttaaggttggttactataatacccctcagtaagattccagtattaatttctgggcagtttgttctctgtatacaattgcaaatgataagcatttttgtgagtgaccacctttgcaatatgtttgttaatttacttcatgttgggttctttctgaaatgtacatctttacatataaaaacctcacattctacttgatttacacttcctagtctacattacatgtggttgaaggttttatacattctatatgcttttactaaatatacaagatttactactagaaatttggagaaagaacactaacacatgtacttgtgatttgttcatgttatattaaaacttgagatttgtgtatttatgtagagtctgtattgacaagactgttgttttttgctccttgagctatataataatctgtgtattggattgttgtcttgatttggtctaaatttgaatatatatgagttacttgaatataacaaaaatgaattttgtttgatagatttatattgtaacctttttctagttcttgaataaatatagcctgctttccctagatgcatttgtgtaggaagtatatacatttccctattactctcatcagctgaagaatatgtactattgtgttactcaaattatgtggctttcattttgttgttttgttgcaagcttagtgttttgtagtggaggttttgtaaatgaaacagttgtaatatctaaggtcaggcacctagtaacagggttttgttaattcttttcagaatcattgaagcagtcttaaagggtcttttgcagatggtacaaattagaacaattagaatatagtattttgagttctagtagtactgagattgacccaaacaaataaaaaactattcaatttctgagtaatagttaatatttattgaaagcttccttggtgccagatgcctttctaagtgctgaattatctcattaaacctcacagcaaccttaagagattagtactcctattatgcccattttaaaggtgaggacaacacaatgtaggtatgttaggtaacccccaaagatcacatagctactcagtcactgagctggattccagtcatggcatttttacttctgagcccatactcttcaccatcgctcattttacaatgggtagttagttaccagctttttgtaacacaaccaagttaaggcagttccactatttctttatcactcttttgttatatgtaatagaagtatttcacacttttgggttatagagtaaatcccatgatgtaaacctacctcataagtcatgtgacataaaagttaaggtagtggagtaggtggtcttatttctttcacctgctcagagtggactgaaaatcctgacttagaaaaggtacaaagttaggggacttatggtaccttcactttttatgtgagaatagaaattatggaaacagtaatttgctcaaaactgaaatctggggtgatgttttcatttcatgtatttgattgccatccataaactcatacttggtgttgacattctagctgagtgttgtggaaatagacttgattttgattcatcgtagcttgcatggtcaagagacatgattctctactaagggtggggctagcaccatagctcataaaagaatccttcttacaccagtacttgttctgcctgtgagttggcacagacttacctaataaccatagtgtctttaagtacaacttaatacatattttttctgtgtatttttttcaaatgaactcaacaattcttcaggtattatagatcagagatcctctccatattcaagcattatgcttctctttcttgggggtacatttcactagtaatacttaggaagttattttgtctttcctgtatttccctagttaagtataggggtaaaaacgttattcagctttcagaagacattgttctgactccgaccctgccgtgtatactcaactatatagacttcaccctgggttttgcctaaactgttgaaagacgagaataaatagacatagacaggctagctaagtcaagactaggggctaaggaatatagaatcacccaggtctttttttttttttttaatttttctctcctcagttgggaacatctatcatgctggaggactactgtgatggggctttacattttactgttttgttgctagcttattgtttcatacttgggaatcagtcatgtttctgattgtggtataaagtttgcttaagtgccccttagttaaagctgttcaatgaatgtaagcacacacacacctacacacatattttgaatagtcgtgtgttcatgcctgttctcagtcttgtcccctttaccgtttctcatgcaggttatttcttgctttttttttttttcctcttttttaaccggagaagcaacaaattacgtagttttttttgtgtttctttgattactagtgagcttgagtacttttaatattttattggatatgtttgtgactgactttaatttcttgtttgtgtgtgctgtggctgcccgatccagcacctacttccttctcccaccataccacccccacccccacccctgcaaacaattggcatgtggtttgggtggcattgtcacaccctcggctttctagattaacccagttaccttttagcagtgccccacttccccagtagcaatggttcaggggtaggcacctgacccagaccagactactgagataaagatgtttgcctaggctttttcaggagcaattgaagacatcttgttggagatagtgtgctgggaggagtcacattctgaacttgctgcagctcgtttttctaatataaaggaaccagcctgaggcagtaccagggtgagagggagtctattggagcccttgggaacttctggatcaaattggacctgaattgagatctatttctcagctttcacttatgtgagccaataaattccttttttgttgaaggc

SEQ ID NO: 173076 - DNA, 822 bp, Homo sapiens
  Payload ID: 14014
  Gene Symbol: RAB19
  Gene Name: RAB19, member RAS oncogene family
  Uniprot ID: A4D1S5
  ENST ID: ENST00000356407
  CDS Start-End: 69-722
ctggatccccagttcctggtgctgaattccatcctttcttcctagttctgttctaggtggcaagaaccatgcacttctccagctcagccagggcagcagatgagaactttgactatttgttcaagattatcctcattggggattccaatgtggggaagacgtgtgtggtgcagcatttcaagtctggagtctacactgagacacagcagaacacgattggagtggactttaccgtgcgttcccttgatattgacggcaaaaaagtgaagatgcaggtgtgggacacagctggccaggagcgcttccgcaccatcacccaaagctactaccgcagtgcccacgcagccatcatcgcctatgacctcacccggcggtccacgttcgagtccatccctcactggattcatgagatagagaaatatggagctgcaaatgtggtcattatgctgattggaaataaatgtgacctctgggaaaagcggcacgtcctgttcgaggatgcctgcacactggctgagaagtacggcctcctggccgttttggagacatctgccaaggagtcaaagaacatagaagaagtcttcgtgctcatggccaaggagctgatcgcgcgcaacagcctgcacctatatggggagagtgccctgaacggcctccccctggactccagccccgttcttatggcccagggtccaagtgaaaagacccactgcacttgctaagatgtttgcaaagccagttgcacccaccaaagaggccgcctctgaaaccaaaggtagccaggataccgtagtgttgccccagtggcgctttagaccccag

SEQ ID NO: 173077 - DNA, 645 bp, Homo sapiens
  Payload ID: 14014
  Gene Symbol: RAB19
  Gene Name: RAB19, member RAS oncogene family
  ENST ID: ENST00000495590
  CDS Start-End: 199-645
ttgcactttcctttcactttctcaggacgccaaacccgacacctggggccagaactacacttcccaccaagcagcgaggcaggaggaagaagggggcactggggggctgaaaagcaaacccagaagaaagcgaaaacattacctgctgaccagcagaggtgagagagcgagacagttctgttctaggtggcaagaaccatgcacttctccagctcagccagggcagcagatgagaactttgactatttgttcaagattatcctcattggggattccaatgtggggaagacgtgtgtggtgcagcatttcaagtctggagtctacactgagacacagcagaacacgattggagtggactttaccgtgcgttcccttgatattgacggcaaaaaagtgaagatgcaggtgtgggacacagctggccaggagcgcttccgcaccatcacccaaagctactaccgcagtgcccacgcagccatcatcgcctatgacctcacccggcggtccacgttcgagtccatccctcactggattcatgagatagagaaatatggagctgcaaatgtggtcattatgctgattggaaataaatgtgacctctgggaaaagcggcacgtcctgttcgaggatgcctgcacactggct

SEQ ID NO: 173078 - DNA, 952 bp, Homo sapiens
  Payload ID: 14014
  Gene Symbol: RAB19
  Gene Name: RAB19, member RAS oncogene family
  Uniprot ID: A4D1S5
  ENST ID: ENST00000537763
  CDS Start-End: 199-852
ttgcactttcctttcactttctcaggacgccaaacccgacacctggggccagaactacacttcccaccaagcagcgaggcaggaggaagaagggggcactggggggctgaaaagcaaacccagaagaaagcgaaaacattacctgctgaccagcagaggtgagagagcgagacagttctgttctaggtggcaagaaccatgcacttctccagctcagccagggcagcagatgagaactttgactatttgttcaagattatcctcattggggattccaatgtggggaagacgtgtgtggtgcagcatttcaagtctggagtctacactgagacacagcagaacacgattggagtggactttaccgtgcgttcccttgatattgacggcaaaaaagtgaagatgcaggtgtgggacacagctggccaggagcgcttccgcaccatcacccaaagctactaccgcagtgcccacgcagccatcatcgcctatgacctcacccggcggtccacgttcgagtccatccctcactggattcatgagatagagaaatatggagctgcaaatgtggtcattatgctgattggaaataaatgtgacctctgggaaaagcggcacgtcctgttcgaggatgcctgcacactggctgagaagtacggcctcctggccgttttggagacatctgccaaggagtcaaagaacatagaagaagtcttcgtgctcatggccaaggagctgatcgcgcgcaacagcctgcacctatatggggagagtgccctgaacggcctccccctggactccagccccgttcttatggcccagggtccaagtgaaaagacccactgcacttgctaagatgtttgcaaagccagttgcacccaccaaagaggccgcctctgaaaccaaaggtagccaggataccgtagtgttgccccagtggcgctttagaccccag

SEQ ID NO: 173079 - DNA, 1198 bp, Homo sapiens
  Payload ID: 14015
  Gene Symbol: RAB1A
  Gene Name: RAB1A, member RAS oncogene family
  Uniprot ID: P62820
  ENST ID: ENST00000398529
  CDS Start-End: 187-576
gggtggaagcgatagctgagtggcggcggctgctgattgtgttctaggggacggagtaggggaagacgtttgctctcccggaacagcctatctcattcctttctttcgattacccgtggcgcggagagtcagggcggcggctgcggcagcaagggcggcggtggcggcggcggcagctgcagtgacatgtccagcatgaatcccgaatatgattatttattcaagttacttctgattggcgactcaggggttggaaagtcttgccttcttcttaggtttgcagatgatacatatacagaaagctacatcagcacaattggtgtggatttcaaaataagaactatagagttagacgggaaaacaatcaagcttcaaatagaatttgctgattcccttggaattccgtttttggaaaccagtgctaagaatgcaacgaatgtagaacagtctttcatgacgatggcagctgagattaaaaagcgaatgggtcccggagcaacagctggtggtgctgagaagtccaatgttaaaattcagagcactccagtcaagcagtcaggtggaggttgctgctaaaatttgcctccatccttttctcacagcaatgaatttgcaatctgaacccaagtgaaaaaacaaaattgcctgaattgtactgtatgtagctgcactacaacagattcttaccgtctccacaaaggtcagagattgtaaatggtcaatactgactttttttttattcccttgactcaagacagctaacttcattttcagaactgttttaaacctttgtgtgctggtttataaaataatgtgtgtaatccttgttgctttcctgataccagactgtttcccgtggttggttagaatatattttgttttgatgtttatattggcatgtttagatgtcaggtttagtcttctgaagatgaagttcagccattttgtatcaaacagcacaagcagtgtctgtcactttccatgcataaagtttagtgagatgttatatgtaagatctgatttgctagttcttccttgtagagttataaatggaaagattacactatctgattaatagtttcttcatactctgcatataatttgtggctgcagaatattgtaatttgttgcacactatgtaacaaaacaactgaagatatgtttaataaatattgtacttattggaagtaatatcaaa

SEQ ID NO: 173080 - DNA, 2254 bp, Homo sapiens
  Payload ID: 14015
  Gene Symbol: RAB1A
  Gene Name: RAB1A, member RAS oncogene family
  Uniprot ID: P62820
  ENST ID: ENST00000409892
  CDS Start-End: 191-616
ttttgggtggaagcgatagctgagtggcggcggctgctgattgtgttctaggggacggagtaggggaagacgtttgctctcccggaacagcctatctcattcctttctttcgattacccgtggcgcggagagtcagggcggcggctgcggcagcaagggcggcggtggcggcggcggcagctgcagtgacatgtccagcatgaatcccgaatatgattatttattcaagttacttctgattggcgactcaggggttggaaagtcttgccttcttcttaggtttgcagagtccttcaataatgttaaacagtggctgcaggaaatagatcgttatgccagtgaaaatgtcaacaaattgttggtagggaacaaatgtgatctgaccacaaagaaagtagtagactacacaacagcgaaggaatttgctgattcccttggaattccgtttttggaaaccagtgctaagaatgcaacgaatgtagaacagtctttcatgacgatggcagctgagattaaaaagcgaatgggtcccggagcaacagctggtggtgctgagaagtccaatgttaaaattcagagcactccagtcaagcagtcaggtggaggttgctgctaaaatttgcctccatccttttctcacagcaatgaatttgcaatctgaacccaagtgaaaaaacaaaattgcctgaattgtactgtatgtagctgcactacaacagattcttaccgtctccacaaaggtcagagattgtaaatggtcaatactgactttttttttattcccttgactcaagacagctaacttcattttcagaactgttttaaacctttgtgtgctggtttataaaataatgtgtgtaatccttgttgctttcctgataccagactgtttcccgtggttggttagaatatattttgttttgatgtttatattggcatgtttagatgtcaggtttagtcttctgaagatgaagttcagccattttgtatcaaacagcacaagcagtgtctgtcactttccatgcataaagtttagtgagatgttatatgtaagatctgatttgctagttcttccttgtagagttataaatggaaagattacactatctgattaatagtttcttcatactctgcatataatttgtggctgcagaatattgtaatttgttgcacactatgtaacaaaacaactgaagatatgtttaataaatattgtacttattggaagtaatatcaaactgtatggtgataagtattgttttgattcttatggttaaagggaaatagagccttgcattatattcaacacagccatttgtgtgtgcacaatgcaaactaaggtattctagacctatcttagagcagcatccagtatttgctttctagataatatgcccaataacatgacctagaggggcttctgtgctgtgtagggatttaaccaacttcagtggttcagggagctcaaactatatgtaaaacaagtttagaatgtatgctatctagcccgttatctctgatccttctctaaaaccatttgaaatagcttcattgatcaacatttcataaatgcatctgtggtagaggtagaaagcagcacctttcctaattggcaaatgatcagactaatgtgtgctaatgtttttcttccatgctttcagtcagattcaactattttatcctccacagttgcttaacttggtgttggaggagggtttaagcattaagataggaagcaggaaatttgattgctctaaatttagaaattatatccctaaaaattaaaacatgaatactgggtggtaatgataattgaggcaaatgtatttattttggtgacattttgcatatatgaagattttctgaaataggaccttcaagatcctagggggttttgtttggtttttaattgtgaggaataaaaaatcttctgcccacactggcattttaaggtgactgaggtcaaacgttgtttccttaggttgaaatagcagccaaaacattcttcacgcaggggcttgggatatggctgctggcaacacattttgttgtgggctccttaatttaatgataaaatttaagctaaacacaagccaaaaatgaataggtttttttaatttttatttttcactaaacaggcaattgaaatacatggtacaaaaataagtggtaagataattgtaaaatgaaatggacagaatattcaattttccatctatgaaaatttcacaataaaaatcatagtttactttgt

SEQ ID NO: 173081 - DNA, 1333 bp, Homo sapiens
  Payload ID: 14015
  Gene Symbol: RAB1A
  Gene Name: RAB1A, member RAS oncogene family
  ENST ID: ENST00000409751
  CDS Start-End: 190-711
tttgggtggaagcgatagctgagtggcggcggctgctgattgtgttctaggggacggagtaggggaagacgtttgctctcccggaacagcctatctcattcctttctttcgattacccgtggcgcggagagtcagggcggcggctgcggcagcaagggcggcggtggcggcggcggcagctgcagtgacatgtccagcatgaatcccgaatatgattatttattcaagttacttctgattggcgactcaggggttggaaagtcttgccttcttcttaggtttgcatgggacacagcaggccaggaaagatttcgaacaatcacctccagttattacagaggagcccatggcatcatagttgtgtatgatgtgacagatcaggagtccttcaataatgttaaacagtggctgcaggaaatagatcgttatgccagtgaaaatgtcaacaaattgttggtagggaacaaatgtgatctgaccacaaagaaagtagtagactacacaacagcgaaggaatttgctgattcccttggaattccgtttttggaaaccagtgctaagaatgcaacgaatgtagaacagtctttcatgacgatggcagctgagattaaaaagcgaatgggtcccggagcaacagctggtggtgctgagaagtccaatgttaaaattcagagcactccagtcaagcagtcaggtggaggttgctgctaaaatttgcctccatccttttctcacagcaatgaatttgcaatctgaacccaagtgaaaaaacaaaattgcctgaattgtactgtatgtagctgcactacaacagattcttaccgtctccacaaaggtcagagattgtaaatggtcaatactgactttttttttattcccttgactcaagacagctaacttcattttcagaactgttttaaacctttgtgtgctggtttataaaataatgtgtgtaatccttgttgctttcctgataccagactgtttcccgtggttggttagaatatattttgttttgatgtttatattggcatgtttagatgtcaggtttagtcttctgaagatgaagttcagccattttgtatcaaacagcacaagcagtgtctgtcactttccatgcataaagtttagtgagatgttatatgtaagatctgatttgctagttcttccttgtagagttataaatggaaagattacactatctgattaatagtttcttcatactctgcatataatttgtggctgcagaatattgtaatttgttgcacactatgtaacaaaacaactgaagatatgtttaataaatattgtacttattggaagtaatatcaaa

SEQ ID NO: 173082 - DNA, 2447 bp, Homo sapiens
  Payload ID: 14015
  Gene Symbol: RAB1A
  Gene Name: RAB1A, member RAS oncogene family
  Uniprot ID: P62820
  ENST ID: ENST00000409784
  CDS Start-End: 192-809
attttgggtggaagcgatagctgagtggcggcggctgctgattgtgttctaggggacggagtaggggaagacgtttgctctcccggaacagcctatctcattcctttctttcgattacccgtggcgcggagagtcagggcggcggctgcggcagcaagggcggcggtggcggcggcggcagctgcagtgacatgtccagcatgaatcccgaatatgattatttattcaagttacttctgattggcgactcaggggttggaaagtcttgccttcttcttaggtttgcagatgatacatatacagaaagctacatcagcacaattggtgtggatttcaaaataagaactatagagttagacgggaaaacaatcaagcttcaaatatgggacacagcaggccaggaaagatttcgaacaatcacctccagttattacagaggagcccatggcatcatagttgtgtatgatgtgacagatcaggagtccttcaataatgttaaacagtggctgcaggaaatagatcgttatgccagtgaaaatgtcaacaaattgttggtagggaacaaatgtgatctgaccacaaagaaagtagtagactacacaacagcgaaggaatttgctgattcccttggaattccgtttttggaaaccagtgctaagaatgcaacgaatgtagaacagtctttcatgacgatggcagctgagattaaaaagcgaatgggtcccggagcaacagctggtggtgctgagaagtccaatgttaaaattcagagcactccagtcaagcagtcaggtggaggttgctgctaaaatttgcctccatccttttctcacagcaatgaatttgcaatctgaacccaagtgaaaaaacaaaattgcctgaattgtactgtatgtagctgcactacaacagattcttaccgtctccacaaaggtcagagattgtaaatggtcaatactgactttttttttattcccttgactcaagacagctaacttcattttcagaactgttttaaacctttgtgtgctggtttataaaataatgtgtgtaatccttgttgctttcctgataccagactgtttcccgtggttggttagaatatattttgttttgatgtttatattggcatgtttagatgtcaggtttagtcttctgaagatgaagttcagccattttgtatcaaacagcacaagcagtgtctgtcactttccatgcataaagtttagtgagatgttatatgtaagatctgatttgctagttcttccttgtagagttataaatggaaagattacactatctgattaatagtttcttcatactctgcatataatttgtggctgcagaatattgtaatttgttgcacactatgtaacaaaacaactgaagatatgtttaataaatattgtacttattggaagtaatatcaaactgtatggtgataagtattgttttgattcttatggttaaagggaaatagagccttgcattatattcaacacagccatttgtgtgtgcacaatgcaaactaaggtattctagacctatcttagagcagcatccagtatttgctttctagataatatgcccaataacatgacctagaggggcttctgtgctgtgtagggatttaaccaacttcagtggttcagggagctcaaactatatgtaaaacaagtttagaatgtatgctatctagcccgttatctctgatccttctctaaaaccatttgaaatagcttcattgatcaacatttcataaatgcatctgtggtagaggtagaaagcagcacctttcctaattggcaaatgatcagactaatgtgtgctaatgtttttcttccatgctttcagtcagattcaactattttatcctccacagttgcttaacttggtgttggaggagggtttaagcattaagataggaagcaggaaatttgattgctctaaatttagaaattatatccctaaaaattaaaacatgaatactgggtggtaatgataattgaggcaaatgtatttattttggtgacattttgcatatatgaagattttctgaaataggaccttcaagatcctagggggttttgtttggtttttaattgtgaggaataaaaaatcttctgcccacactggcattttaaggtgactgaggtcaaacgttgtttccttaggttgaaatagcagccaaaacattcttcacgcaggggcttgggatatggctgctggcaacacattttgttgtgggctccttaatttaatgataaaatttaagctaaacacaagccaaaaatgaataggtttttttaatttttatttttcactaaacaggcaattgaaatacatggtacaaaaataagtggtaagataattgtaaaatgaaatggacagaatattcaattttccatctatgaaaatttcacaataaaaatcatagtttactttgt

SEQ ID NO: 173083 - DNA, 2007 bp, Homo sapiens
  Payload ID: 14016
  Gene Symbol: RAB1B
  Gene Name: RAB1B, member RAS oncogene family
  Uniprot ID: Q9H0U4
  ENST ID: ENST00000311481
  CDS Start-End: 148-753
ccgggaatcagcgcggcgaggcctgagaagaagacgtttgcgcctgcgcgtcgcgggcggggcctctggggcggagcggccaccatcttggaacgggaggcggagcagagtcgactgggagcgaccgagcgggccgccgccgccgccatgaaccccgaatatgactacctgtttaagctgcttttgattggcgactcaggcgtgggcaagtcatgcctgctcctgcggtttgctgatgacacgtacacagagagctacatcagcaccatcggggtggacttcaagatccgaaccatcgagctggatggcaaaactatcaaacttcagatctgggacacagcgggccaggaacggttccggaccatcacttccagctactaccggggggctcatggcatcatcgtggtgtatgacgtcactgaccaggaatcctacgccaacgtgaagcagtggctgcaggagattgaccgctatgccagcgagaacgtcaataagctcctggtgggcaacaagagcgacctcaccaccaagaaggtggtggacaacaccacagccaaggagtttgcagactctctgggcatccccttcttggagacgagcgccaagaatgccaccaatgtcgagcaggcgttcatgaccatggctgctgaaatcaaaaagcggatggggcctggagcagcctctgggggcgagcggcccaatctcaagatcgacagcacccctgtaaagccggctggcggtggctgttgctaggaggggcacatggagtgggacaggagggggcaccttctccagatgatgtccctggagggggcaggaggtacctccctctccctctcctggggcatttgagtctgtggctttggggtgtcctgggctccccatctccttctggcccatctgcctgctgccctgagccccggttctgtcagggtccctaagggaggacactcagggcctgtggccaggcagggcggaggcctgctgtgctgttgcctctaggtgactttccaagatgcccccctacacacctttctttggaacgagggctcttctgtcggtgtccctcccacccccatgtatgctgcactgggttctctccttcttcttcctgctgtcctgcccaagaactgagggtctccccggcctctactgccctggctgcagtcagtgcccagggcgaggaatgtggccaggggatccaggacctgggatccagggccctgggctggacctcaggacaggcatggaggccacaggggcccagcagcccaccctttcctctccccactgcctcctctcccttcctacactcccagctcgagccgtccagctgcggtgggatctgagtatatctagggcgggtgggcgggtagcagtgctgggcctgtgtcttgagcctggagggagtctgctcctgccgccctctgccctgccagagacagacccatgcgctgcctgcccaccgtgcccctttgtccccatgtcaggcggaggcggaaggcccaccgtgccagaggctgggcaccagccttaaccctcactctgctagcacctcctccctttccccaaggtagcacatctggctcactccccactccgtctctggagcccaccagggaaggccctcatcccctgccgctacttctctggggaatgtgggttccatccaggattgggggcctctctgctcacccactctgcacccaggatcctagtcccctgccctctggcacagctgcttcctgcaagaaagcaagtctttggtctccctgagaagccatgtccctcgtgctgtctcttgcctgtcccacctgtgccctgccctccagcttgtatttaagtccctgggctgcccccttggggtgccccccgctcccaggttcccctctggtgtcatgtcaggcattttgcaaggaaaagccacttggggaaagatggaaaaggacaaaaaaaattaataaatttccattggccctcgggtgagctgagggtttttgcaaggaa

SEQ ID NO: 173084 - DNA, 991 bp, Homo sapiens
  Payload ID: 14016
  Gene Symbol: RAB1B
  Gene Name: RAB1B, member RAS oncogene family
  ENST ID: ENST00000527397
  CDS Start-End: 91-600
cggggcctctggggcggagcggccaccatcttggaacgggaggcggagcagagtcgactgggagcgaccgagcgggccgccgccgccgccatgaaccccgaatatgactacctgtttaagctgcttttgattggcgactcaggcgtgggcaagtcatgcctgctcctgcggtttgctgatgacacgtacacagagagctacatcagcaccatcggggtggacttcaagatccgaaccatcgagctggatggcaaaactatcaaacttcagatcgaatcctacgccaacgtgaagcagtggctgcaggagattgaccgctatgccagcgagaacgtcaataagctcctggtgggcaacaagagcgacctcaccaccaagaaggtggtggacaacaccacagccaaggagtttgcagactctctgggcatccccttcttggagacgagcgccaagaatgccaccaatgtcgagcaggcgttcatgaccatggctgctgaaatcaaaaagcggatggggcctggagcagcctctgggggcgagcggcccaatctcaagatcgacagcacccctgtaaagccggctggcggtggctgttgctaggaggggcacatggagtgggacaggagggggcaccttctccagatgatgtccctggagggggcaggaggtacctccctctccctctcctggggcatttgagtctgtggctttggggtgtcctgggctccccatctccttctggcccatctgcctgctgccctgagccccggttctgtcagggtccctaagggaggacactcagggcctgtggccaggcagggcggaggcctgctgtgctgttgcctctaggtgactttccaagatgcccccctacacacctttctttggaacgagggctcttctgtcggtgtccctcccacccccatgtatgctgcactgggttctctccttcttcttcctgctgtcctgcccaagaactgagggtctcccc

SEQ ID NO: 173085 - DNA, 1954 bp, Homo sapiens
  Payload ID: 14016
  Gene Symbol: RAB1B
  Gene Name: RAB1B, member RAS oncogene family
  ENST ID: ENST00000615245
  CDS Start-End: 96-584
gcgggcggggcctctggggcggagcggccaccatcttggaacgggaggcggagcagagtcgactgggagcgaccgagcgggccgccgccgccgccatgaaccccgaatatgactacctgtttaagctgcttttgattggcgactcaggcgtgggcaagtcatgcctgctcctgcggtttgctgatgacacgtacacagagagctacatcagcaccatcggggtggacttcaagatccgaaccatcgagctggatggcaaaactatcaaacttcagatctgggacacagcgggccaggaacggttccggaccatcacttccagctactaccggggggctcatggcatcatcgtggtgtatgacgtcactgaccaggaatcctacgccaacgtgaagcagggctgcaggagattgaccgctatgccagcgagaacgtcaataagctcctggtgggcaacaagagcgacctcaccaccaagaaggtggtggacaacaccacagccaaggagtttgcagactctctgggcatccccttcttggagacgagcgccaagaatgccaccaatgtcgagcaggcgttcatgaccatggctgctgaaatcaaaaagcggatggggcctggagcagcctctgggggcgagcggcccaatctcaagatcgacagcacccctgtaaagccggctggcggtggctgttgctaggaggggcacatggagtgggacaggagggggcaccttctccagatgatgtccctggagggggcaggaggtacctccctctccctctcctggggcatttgagtctgtggctttggggtgtcctgggctccccatctccttctggcccatctgcctgctgccctgagccccggttctgtcagggtccctaagggaggacactcagggcctgtggccaggcagggcggaggcctgctgtgctgttgcctctaggtgactttccaagatgcccccctacacacctttctttggaacgagggctcttctgtcggtgtccctcccacccccatgtatgctgcactgggttctctccttcttcttcctgctgtcctgcccaagaactgagggtctccccggcctctactgccctggctgcagtcagtgcccagggcgaggaatgtggccaggggatccaggacctgggatccagggccctgggctggacctcaggacaggcatggaggccacaggggcccagcagcccaccctttcctctccccactgcctcctctcccttcctacactcccagctcgagccgtccagctgcggtgggatctgagtatatctagggcgggtgggcgggtagcagtgctgggcctgtgtcttgagcctggagggagtctgctcctgccgccctctgccctgccagagacagacccatgcgctgcctgcccaccgtgcccctttgtccccatgtcaggcggaggcggaaggcccaccgtgccagaggctgggcaccagccttaaccctcactctgctagcacctcctccctttccccaaggtagcacatctggctcactccccactccgtctctggagcccaccagggaaggccctcatcccctgccgctacttctctggggaatgtgggttccatccaggattgggggcctctctgctcacccactctgcacccaggatcctagtcccctgccctctggcacagctgcttcctgcaagaaagcaagtctttggtctccctgagaagccatgtccctcgtgctgtctcttgcctgtcccacctgtgccctgccctccagcttgtatttaagtccctgggctgcccccttggggtgccccccgctcccaggttcccctctggtgtcatgtcaggcattttgcaaggaaaagccacttggggaaagatggaaaaggacaaaaaaaattaataaatttccattggccctcgggtgagctgagggtttttgcaaggaa

SEQ ID NO: 173086 - DNA, 1518 bp, Homo sapiens
  Payload ID: 14017
  Gene Symbol: RAB20
  Gene Name: RAB20, member RAS oncogene family
  Uniprot ID: Q9NX57
  ENST ID: ENST00000267328
  CDS Start-End: 215-919
gtgggctccgtgctctgcacccagctccttcccgggcgcgcacacgcgcttcctctcttgagctcccgggcgtccggaggcgaaggtcccggagcgttcacgagaatccgggtcccggcgagtccggggtccgctcctccagctgcgcccagggcgcacgagccggccagcctcggggagagggcgcgggggcgctgggggttcttacgggaagatgaggaagcccgacagcaagatcgtgctcctgggggacatgaacgtggggaagacgtcgctgctgcagcggtatatggagcggcgcttcccggacacggtcagcacggtgggcggcgccttctacctgaagcagtggcgctcctacaacatctccatctgggacaccgcagggcgggagcagttccacggcctgggctccatgtactgccggggggcggccgccatcatcctcacctatgatgtgaatcaccggcagagcctggtggagctggaggaccggttcctgggcctgacagacacagccagcaaagactgcctctttgccatcgtggggaacaaagtggacctcactgaggagggggccttggcgggccaggagaaggaagagtgcagtcccaatatggacgctggggaccgtgtctccccaagggcacctaagcaggtgcagctggaggatgcggtggccctttataaaaagatcctcaagtacaagatgctggatgagcaggatgtgccggccgctgagcaaatgtgctttgagaccagcgccaagaccggctacaatgtggacctcctgtttgagaccctctttgacctggtggtgccaatgatcttacagcagagagctgagaggccgtcacacacagtggatatatccagtcataagccacccaagaggaccagatctgggtgttgtgcctgactttcgagggcctcctggactcagactgtgcatgttgggaaggggtctgaccaggcaagctgtgatctgaaaggagcaaggaacagcaaggaattattttccagaatgacacccgcagcagaatgttggagtggaaatgatggctggctatgaagaggaggtcaacgtgtgtggtctcctcagtctctgtcagaggggtggggaggtgggaaacaggaatcctctgcaaagcccaatctgcagagtcgagacccctggtgctctctgccccgctgcctggcactggtcctttgcagccagccaccaacggcccccttgcccttgcagaggcagaagcctgcgtctgcacctgcacctctgaccgtttcagcaccctgggttgttaccacgtcctacaactctgacatttcttgttctcaagcgtttctcttcactgtgagttgtctttggtcctcccacttggtacttgtatcttgatgctttataatcctgactctcgacgtgttcatttatacaaaatcaggaataactttgtttttatactgattgcagcaatgttggctacatgtattattaaagaggatttttggaacaactta

SEQ ID NO: 173087 - DNA, 15546 bp, Homo sapiens
  Payload ID: 14018
  Gene Symbol: RAB21
  Gene Name: RAB21, member RAS oncogene family
  Uniprot ID: Q9UL25
  ENST ID: ENST00000261263
  CDS Start-End: 257-934
gagacgccattagagggaggcagagagggatcgttcttcgcttttcctccggtgcctgacgtggtgggctggggcccttcattctcggactttccctcagcccttccaggcctcgcccgaggagggcgtggggacagcgcccgggtcggcggggccggggcggtgggggctgagccggccgtggctgtgaaggcgctgccgcggctgtcgggagggcggcgcgacactcgggctcgggcggccgggaagcgacgggatggctgcggccggcggcggcggcggcggggcggcggcggcgggccgagcctactcgttcaaggtggtgctgctgggggaaggctgcgtggggaagacgtcgctggtgctgcgctactgcgagaacaagtttaacgacaagcacatcaccactctgcaggcatcattcttaacaaagaagttaaatattggtgggaaaagagtaaaccttgccatatgggatacggcaggtcaagagagattccatgcattgggtccaatttactacagagattcaaatggagcgattttagtttatgacataacagatgaagattcttttcagaaggtaaaaaactgggtcaaagaattacggaaaatgttgggaaatgaaatctgtttatgtatagttggtaataaaatagacttggaaaaggagagacatgtttccattcaagaagcagagtcgtatgcagaatctgtgggagcaaaacattatcatacttcagccaaacagaacaaaggaattgaggaactctttcttgacctttgtaaaaggatgatagaaacagcacaagtggatgagagagcaaaaggcaatggctctagtcagccgggaactgcaaggcgaggtgtacagattattgatgatgaacctcaagcccagaccagtggtggagggtgctgttcttctggataactgttcacgcctaagaaattaaaagacagaacaaaactgtggatcattgccctcaacatgaagactgccatattccaagtcacattattttaccaatggaattatagaattaacagtattttaaattacgtttataacactgcagagaccttaagtgctaaacttagtggagtttgtgaccagagaattggcattttctacaaatgtttttttttgttttttttttgtttttttttgtttttttttgagacggagtctcgctctgtcacccaggctggagtgcactggcttgatctcggctcactgcaagctccacctcccaggttcacgccattctcctgcctcagcctcccgagtagctgggactataggcgcccaccacgacgcccggctaattttttgtatttttagtagagacggggtttcaccaggttagccaggatggtctcgatctcctgaccttgtgatccgcccgcctcggcctcccaaagtgctgggattacaggcgtgagccaccgtgcccggcctacaaatgttaacaaagcaattaccaatggcctttttacatattttttctttaatgaggaataatatgcatgtagaaaagacctacttaaagtcttcatttatattctttcaaatcaaatctttatttaataacttatatatgttgttggaatggttacatttttgcagccctttgtattttgtggtagttgaaattgtatcacttctaaacagcaaactgtttttgtttttaattagcagatatctgaagtactatttttgcagggtttgcacaggcccgtaactgtctactactttgatataatctgtatacatcctgtatgctgagctggtaaaatacattgtaaattacatattaaatattttatctgcttttacaagcgcaaggtgcaaaaatatatacaatagtctcattgatgactgtaaagtgaattaacatttggtgattatgcctagcttttttgactaatataaagatcatagctccccttcacttctgtcttaacttgaacatggcgtgtttaaattttcatacatactttacttgaattattgctgttgtcacatatttttgcctctgtgagttcatctgatgattgagcagtagcatttgccttttgggttttttgtttgttattatagaagagatgacttctgctgattttgctttagaatggttaccttagaagaatttgggtggctcatgttgaatttcacttctgcaatagctttcattttctcataggctttataagagatgggttcagtggtatgagcagaggaagagatcccagatagtagccagttaaccaagactcattcatatagcacgtagtttatgttcctgaggcagcacttttagatcctttgtgagcaagttctatttgttcattgcttgccagagatgaacacagaatgttctgtttcattttacaagaactatcctgagtttctgtggatggaaacattacatgtaatgcagatatagtgaacactggaaagatttattaaagaattatatttgtgtatactttataaattagtccctcattagatttttttttcttaagcataagactgaacttaaatgtgttaattttagtagaatcaggcactgctcgcagaaggaacacagattgtagagattaacataaattgttcttgttctaatatatatattttttcatttctgtcgtgcttggaaaactagtaaatattatgtctaagataaaatggaatggcccctggatttacttcttataagaagcagtagtatgtaataaagctattagcatgagcaattaagaggctataaagagattatagttacaaaagaaatactgccatatttttaagttaataacttaaaccttctcaaatgggttaaaagttgaatgaattgacaccctgatgttatgatgttggaattttaacttaaactgggaggcattctgtgagccttcactttaccttctttaattattgtccttgctaaactcaacacagacttttctgttatgtgtttttgaggaagttggggtgggaagagtcagggagataagctaaaattgtcttcttttatggggtaattgtactctgtagtctcttggtttcctgtgaagttagtatttatgtgggggtgggggaaggtagcaagaatcatgggtatcacggtactttgtttttgacctcctggctctttcagacagagtgaagaaagcttttccattcttactgttgtagaagtagataggaaataagcttttctcattacagtgaaatatgttttaaaaactagagtagctgggcacagaggcatgcatttgtagggccagctacttgggagagtgaggcaggaggatcacttgaggccaggatttcaaatccagcctaggtaacactgagacctccatctcgtaaaaggcacaaaaactagttagagatgaaattgagctttattttaaaaaaacgttctaaagcctgataattggagagctatacttcagcttttcatcctactttaatgaaacagctagataggaacctctgctccagaattgccagataattattggtgggtcataactattcttcatattttttttttcttttttctcctttggtttctgtgttatctttcttaacctcacgtatttctttatcctttttagtgggggcctgtaattgaggctaattcaatagcaacaatagacaacatgatatggctgctgtcactttgaaacccaaaaggtctttgggtaggaatagagtaatgaaagaggaccagtcaacttcagtatatatacaaaggaaagacaaagagatgataaaccaaggctgaggaaatttttctgatgctttcttcatttctctaatataccttttgcattctttttctgataattgtgctattaggcagaagacacaagttaccacgttgtgtattaaaagcagtaggtaggttgtgccagtattttttcagccagtaagcatatacagttaacttatataattaaaaattggtttaagatagtgattaaaaatacctgaatattatgttaaaagtatacaatcattgtttctgtaatgatgatgggtattctgcttcttgtttttcattgtaattacaggggaagattgtttttgaaaatgtatattgccatgcttttggggtaagcagtaatgtgaaaagaaaaaagcattatgttattgtatgaaatataagtgttcagatttgttttgtctggggtgttgcctaagaataccctaaagctatggctgttactgcattgaaatcttttttttttttaatagtagccatatgttattagtggagtactttatatttgacattaaagtgaagaagaagagtagtacttcacttttaggtttttagtagtgaaagataaaattggaaaaatagggaaagagcatagggaggaatagaatggaagtcaagtaaataaaaaactacaacctgacagttttttaaatcactttgaaaagtacattacttttatcaaagagtttctaattaaggcaaactatgcattatgccaaatattaagaacattttaaaaatggattgtgatactgtttatttctttaattatataatttgcaattttctgtattataagtgctaccaggattctagatagttgatcttacatattcagatagtatagtttactcttataattacccgttacgttatctctaaaagtagtttgatctgtgcctttaacttttagaattcatcttttgacttgtttgccactgtagagttttcagttttctctgtagattcagtgtgacaaagagggaatacataatttgtgaccatttaagatgctgatattttctggaaaaggatatagatagtagtagtgacccgcaggagcctcacaataatgtctaaagatataaactgagtagatccctaagtactcttctctaaattataaaatgcattacctaggctttaatagttaaaagctggaatttattgaaccgcatctacttgatttcataatatgcattgattttagtatgttgctgttctgttatctgtaatcaactataacagagtaatatatttggtgttctggaccaaaattcgtgctacacatatgtctgatggcctttaccttttcaagaaaacagttgcaattttgagcaaaattttcctagttgtaatattttaatagtgttatgtattggaaaaaatttagaaatactcctaagagttttcaatttcaagcagaaatgcttctcttctaaataaataccacttaattgatagacctttagcagttcttgtgctatctaggatttatacatttttgcttttctggaaaactgctttggcgcattaacctttctactgcaacattttctcttcagtagatatatgagtaaacatgatgagttaatgttacacagcatacccagttaggtctcttattcttaaagcatctttctttagaagtctgcacatattttcaaatgcatcatattaaaggcacaagtcaagaggaggtggagttgcctacttcagtggcctttattcccactataccagttctcagtcttgattttgatactttctggcaactgtatcatctcttcactatcacgtattttaagaaaaagctaaggtgatttctttacatttgaacatgtgtagatcaatgagagaatggtgagggatagcaaggataaagtataatgttgaaaagtagaaagaagtggtatctgctaaactctagctttagtagcaagctattttaaggaaatcattgtatgtggtacttcctagaaatatgaaagttcctcattttgtatttaattatgtaagaaaatgttctaggaaaagaataaaaaacatatattgtcaaagtgccctttggtagtgctcccaaatggtagtaactattggtctctagtatatactcctcaaatatctttttgctatgtattaatatatctatatgtttacatatagaaatacatagtgttgtgggttttaaattttcacataaattgtgtcttacccatgtgttttgccatttgccttttctcttgccaacgtgtctaggagctctttggtaaatacagactttttcattttatttcctcccacatttctatggatgtgtcttgcctttttcttttttttttctttctttttttcttttttaaaatagcctctgactccatgaaacctgaaaaggaatctggtctgttaggtggatttcattagtatccaaatttatttatttttttatttcatttttttgagacagtctcgctgtgtcacccaggctggagtgtggtggctcagtgatagttcactgcatccttgaactcatggactcaagcaatcctcttgcctcagccttctgagtagctgggactacatgtgtaagccaccatgcctggctaatttttgtatttttcatttttagtagagatgggaagtcttgctgtgttgcccaggctggtcttgaactcctggcctcaaccattcctcccacttcagcctcccaaagtactgagattacagatgtgagccactaggcccagtcagtatcatagaatttaaatgcaagccaatgcttagacagaatcagggtctgctttaagcatgtgaatcaggaaactagaaggcctcttgtaatgtatttgaagttcattacttttggctgacggttgactgcttagtgtataaaatctaggagttaactttagcagattcttttatcagaatacgttttttattggagggaagaaggaaaaagaggaaaggtataactgatggggaaaagtacaagataaactaaaacaagtctttatacaactctgacagcaactcccataacaggacatgatgctaccaaaaattcaaacttgtatttgatctgtgcctttaatatagagtaaaaacaaaagttcctttttagatctcccttccctcatcatcccacatccctttttagaggtaaccattgttaacagtttggtttgtgtctttattatgcagttttatatttatatttggcctttgtaaattttccattccctgaatggaacttctaccctatatcaaattccaccctcaactgaccaatttaccaaggccaactagaatcatacttctttttctggaagttttttttgagacagggtcttgctttgccgcacagactagaatgcagtagcatgatcatagctcattgcagcctcaaactcctgggcttaagcaatcctcccacctcagacttcgaagtagctggtattacaggtgcataacaccaccacccacgcctggctaattgttttgttttttttgtggagatggctctcactttgttgcccaggctggtttttgaactagtttcaaagtgatcctcctgccttggcctctcaaagtactaggataacagtcatgagccaccatgcccaccctagaatcatactcttttaaagcaagttaaatcagcagtaatagttctggaactagaagttaactacttactggacttttgagatgtaagtttaccatacatcaagcttaaaaacttgtagcgttctgggaaagtcaagtcaaactcttgaatgctatcctctgtggaaatagggttgggaaagagcaatgtacaagtccaagctccttaatacacataaaactctgggttgggctcatcctcttggtgtattttcctacttggagagcattacagtgtccaacaatttataggagcttctctgcactgtcaagactatagcttagcatatgtgtgctatgacacaaggttaaacgtgtgccccagaacaaatgcatttattcatgtttgactttaaatgaaaattcagaaagcaggttaagcatatatgtgagtttaataattgtttctgtattttaaaaaattttaaaacattcagctttttatgactttggttagtttcactcatttgttgagtgccttctgtatgcccagtgcacaaactgctatgtgcccagtgtacatacatgggagaaccagatagccaaagtgccttcctttatcgttggaacctagagatgagctgatacctgttgcacatagtccaagatataagtaatttatctggggatataaggtcacctgtgcacacatgttcacattctgtgtttgatcagatatgtacctgccaaacttttggagtgagataattagaatgacagtagttgaagctgacagtgaatttgaggtaaagctggaaagaatgtttttgaattttgcaaataatacattttcaagccagattaaaattgaataacttactttctagcttcaagggggtaattaagtgatcctctaacccaaattgcttttccaaattttgtggtagcagtgaataaactgatgcctcctgcttatttagacagcagccatttttgtttggtttggtttggttttgcggtgattttttttaacctagaaaaaatacaatttaaaaagcaatcatgttgttttctttgcctttgacagatgtggccttgtcaccacacagtaagccagaacacaatccattcctgagtcatagtaggatagtttgtgtaattctaaatgcactctccagtttaagagtgtgggtccctttttttctatctgaaattgaagatacaggtcagaaagatggtttaatgaatatgaattttctaaacatcttttcagtgtcttttaaggatatttttgatattacaatataataaagttaaatcatctagtcctcctggcccttctggttagaaaatagagcgaaatcatccgtttaaacacacacacacaaactatcccattagttggttatacacaagttactttcattcttactagttcacaaaaggttagtaaatttagtgatttaatgagttcttcaaaacataaaagtcctgtaaaggaaaagctagaggatgtgagaggagtaattcatccccatcaaaagattttagccaaaagtagtggcataagaaatttatttatgcgaaagacataattttgggtgaactttcttgaagatggtcagaaagggcattgttaaaggaaggagatggtagattttgggttctgggttctaggttctaggctaataatttactactttggtatgttgccttgaggctgacatttgctgctctgctaagactaaagctggccctttccaatcaaaagtgttaaaagctggctgggagccatggctcatgcctgtaatccagcactttgggaggctgaggtgggtggatggatcccttaaacccaggaattcaagaccagtgtagacaacatggcgaaaccccatctctatccaaaaatatacaaaaattagccaggtgtggtggtgtgtgcctgtagtctcagctactcaggaggctgagatgggaggattgcttgagcctgggagttagaggatgcaatgagctgaggtcgcaccactgcactccagcctggacgacagagtgaggccctgtctcaaaaaaagaaaaaagaaaaaaaaaagttaaaagttgtggcatggtggctcacgcctgtaatcccagcacttttggaggctaaggcaggtggaccacctgaggtcaggagttcgagaccagcctggccaacatggtgaaaccctgtctctactaaaaacaaaacaaaacaaaaccatatatatattatatatatatatatatatatatttttttttttttttttttttttttttttgagacggagtctcgctctgtcccaggccagagtgcagtggcgctatctcggctcactgcaagctccggctcccgagttcacaccattctcctgcctcagcctcccgagtagctgggactacaggcgcccgccaccacgcctggctaattttttgtatttttttggtagagatggggtttcaccgtgttagccaggatggtctctatctcctgaccttgttatccgcccgcctcggcctcccaaagtgctgggattacaagcgtgagccaccgagcccagctatatttataaatttatatatatttcatatatatattatatatatataaaattaaccgggcatggtagtgagcccctgtaatcccagctacttgggaggctgaggcaggagaattgcttgaacccaggagacggaggttgcagtgagcagacctggtgccactggactccagcctcggtgacagagtgagactctgtctcaaaaaaaaagttaaaagttgttaactagatgtcgaattattttcatagtaatcaccatgtgtaagcaattctcatctgtggaatgtttgacagggataagattattgaaaattggggggaattttcttaaatatggaactaagagctaaagagttcaatgatgattaagaccactagtctggcaagtgacttttatttgtccttttctattgataatgaattctaggaatatggatggatttcattagagaaataaaaatgagcaagatttgtgattcagaatattaaaagttaagaatccatgaatagccccttaaaaatattgtcaaagcatcatggtatttgtagtggtgcttaaaaaagaagcagcagcagctgttctaagccaagcactgcttgaaaacaaaacaaaacagaacaaaaccttatatttaataaaatggagaaatttgggaatgtccctagcgtaataatgccttctactgacatttaaagtcagcttaaacatcattagggaagactatgactgtttctatgacctctagtcacaaatttaactaatttaaggttaactaatacctctttcagagttgggcaaaagaagaaaaaaaaagcctttatttgtgatcagtaaattataaattacacagaagcttccagctacctggtatttgcatgaagaattctaaattttttatatgccataatttttagtaatgctgtccttgaattcacttacatctctgctctggttttttgaagctcattaggatgatacctgtcatctcttggaaacactggaactagagaactggaggtgttcacccccattttttgctacattgttgaaaactgagtagaattttgtgtccaaaaatccttagtctgtgatggaattttttaaagtatatgtgaagttttttacttcttcagtttttcaagataattttgctgtttttgctttttatttatttgcaactagaaattgcatgtgccagttacttaatttaatacatctaatgggagattcaaagcaaaccattaaaactaccatataaactcaaatgaaattttatgacattctaatgtacatactcgccaagaaatgctacaaggagcctctctgcaaatgcctgatggggcactctgagaattaaacaggaaatggacaggaaaagaggcaaagcatagaatagcctctgtggtatacacacagacaatgtaaaatccaagaaatataaggtccaaggaggaattggttattgaagtagagaacctcatcatgagatttgagaatagctttagagttactcttgggatagtgtctcatggccctgtgagggaactctacaaattttatccattttgctgggcagttttaagagctactttttgtctgtactttccttaattttcatattatttctagcttttacttcatcttatgaaagattaacttagaggttagaatgcttacatttgcaaatagcctgaggaataaatatgtgctttatcaaagtggaacttctgattttctgtaatattaggatggacatgtgtctggcttatccttcctatctaggaaactggtgtcattaggaaatacgttaacataagatccctgactataaagtaagacttattatcttgtatagtttgtagcatttaatcttctatttcagtgattggtttggatctacttaattttaagctttactggtcatttgtccccctcatgttgtacctaataagtgtgtagtttttaagtgaaatcatacataatttcaaggaaactgctagagacaatgttgagtatcatcaagaacatttaatcaaacctgttgactaagagctttagtttggcttacaatttcatatgtaaatccaagaaaaagacttgtaagctaaaaagcctgtttcgttcggaaaaaaaagtacataacattttaaagatttgtgagaggaaaaaagcattagatgcgatagaatggaataatctctttttagaagtaaattagtttttatttcatttgtgggtggtattgagaaaagtggtggaaataaatacattgagcagattcagaatttaatagacacttcgtgtttccattttcataatgggggttagtcataaaccattctatgtggagcattttacaggggctctgaaaggtatacaaaatgtactactataattaatgtcctcaaggaacttaaaaacctattggaagatttatttaacagaggtaagagaatttggacccattaaaaatggaggaaaaggtaaagttagtatttgtagatgatagtgcaaagcttaaaagggtcaactgaaagtctcttaaaacgaatacagtcactgggtataaaattcatcacagaaataaaaagctttcatttataaaaacaacagccagttagaagatataatagaagaaaaggccccatttaaagtaagaccaaaggagagaagatacctaggaataaacaagttatatgcgtgaccacaaaaccaaaactttgtatttcacatgaaaataaattcaaacacatggagatgcatatcatattcttggataggaagacaacatacacatttcagttctctaaattgaatgcaatcccaataaaaatataaggattaaaaaaaaaaaaaactagatcgctgattccaaagtttctttgaggaaaaaaaaaaaaaaaagcaagactagccaggaaaactgaaaaaacaatgaggaaagactggccttatgaaatatttaaacaagagagctccaataattaaaacagtctggaactggcatatgactagacagatcattcaagcagaaggaaaatgaacccagatatgggaatttagtggaggagaagtgatgtttcagctcagtggggaaaatatggtttattcattaaaggtagtaggacacttgggtagctatagagaacaaagctggattcatacctcataaaccaaaatgcattccagtttaaatatgaaaactgaaatgtttaaagtacccaaagaggttgtcagagaatttttaaagattttagtgtggtaaaggatttcctgaatttgatataaaatttggaatagaatttacaataagaaatgataatgttttcactataaatttgtaacaataaattattattatttttgagatggagtctcactctattgcccaggctagagggcagcggcatgatcttggctcactgcaacctctgcctcccaggttcaagcaattattcctaccttagcctcccaagtagctgggactacaggtgtgcaccaccacacctggctaatttttgtatttttagtagagatggcgtttcacagtgttggccagtctggtcttgaattcctgacctcaagtgatctgcccacctcgacctgccaaagtgctgggattataggtgtgaggcaccatgcccaacatataacaataaattatatcactatataaaataaattcctcacagcaaaaaaccaccataagcatagtctaaagaaaaatgacaaatttggaaaaaatattttcaaatcatatcatgcattgcttaatttataaagaacacctagaaatgaaaaagtccaatgatccaaaaagaaaaaggtacaaaattgtaaacagttttcacagaaaagaataaaatgattcaagccggaaaaaaagttcaactttattactaagagaagtataagacaaaactatactgagataccagttttttaacctattaatcaagaaagactttttagttttataaaacattgtaatattctagatattattggtaagaatggagggaacaagtatttttgctgatagaggggtaaactggaacaaccgctaaggatgacagtgaattctgaatttatttacccaatgtactcttcaagttgcagaggctgagaaattattaaactgttacccagaactttttatgcagatgggggggcagtctgaatgctaattaagttttctcaactatatgctctctcctcatgatttgaaaggcaaaagtgaagcagaggccaagttttgaagttcttgaatgttacgaggtagtgaaaaacgtttccatgcagcagtgatcaagtgtctatcgttcagcttcctgaatatggataggctgtggtggtggcagcagcttcttaatctgacattccaacccctagattgtggtgttacatcttctttctccagcttcccaggagtgaaaggttgtagtggctggcctctggttcccagcagggctccatggtgaccagaggttgtagttcccccagtgaatcatgtttgtgtcactgtgggattcattcccataggctcaacttagattcctaaaccctgctccttcaacccttccagtaactttataagcaccaaattccatttaaaaagtgccttcctgtttaaaatatctataatggcttctgtttcctgcattgaaagctgactgatctggagggcaattgggcaacagcaatcaaaattgtcttttcttttgacctagcagtttcacttcttggaatatatcctgtaaatatgcttatgtatgaaggaaatgagtttgtacaacgtttttcaatgcagtattgtttgtaaattgacaccagtaggggaatagtaaaatcaattactatgcatgcatataataaaattttaggtagctataaaaaagagaatgagaaagctttgcatatttaaaagaaaccatcaacaggaatattaagtttttaaaaaaagccagggcagaacagtctgtatactgtatattttaaaattgaacaagtatagtagacaattgaagtatagtaaagataaaattaattgcacaggccaggcacagtggttcacacctgtaatcccagcattttgggaggccaagatgggcggatcatatgaggtcaggagttcaggaccagcctggcaaatacggtgaaatcccatctctactaaaaatacaaaaattagccgggtgtggtggcaagcaactataatcctaactacttgggaggctgaggcaggagaattgcttgaacccgggaggcggaggttgcagtgagccaagatcatgcccctgtactccagcctgagcaacagagtgagactctatctcaaaaaaaaaaaaaaaaaaattaattgcacatgaagtatacaagttcgatctgtgaaaccaccatcacagtgaagataattaacacatccatcattccacaaaatttccttacactttcttgtaatcccttctccctcccattcctgctttctttaaactatagtttagtttgaattttctataattttatataaataaaatcatataacatgt

SEQ ID NO: 173088 - DNA, 8670 bp, Homo sapiens
  Payload ID: 14019
  Gene Symbol: RAB22A
  Gene Name: RAB22A, member RAS oncogene family
  Uniprot ID: Q9UL26
  ENST ID: ENST00000244040
  CDS Start-End: 282-866
cgaggtgggcggggaggtcaggtgacgcggccggcgtcccaagatggcggcggcggcggctcccggaaggccgcggcggcgtcccggctgctaaggcgggccccacgcggctggcagcggacaggccggacctacggccggaggacgggcggcagccgcctctgcgcggaccggggctgggccgtgcggcggcagcggcgccaggggatgctcttgctgggcctggcctctcccttctcaacttagggcggcggcgggcccgcgcccctggctcccgggccatggcgctgagggagctcaaagtgtgtctgctcggggatacaggtgtaggtaaatcgagtattgtgtggcggtttgtggaagacagttttgatccaaacatcaacccaacaataggggcatcttttatgaccaagactgtccagtaccaaaatgagctacataaattcctaatctgggatacagctggacaagaacgatttcgtgccttagcaccaatgtactatcgagggtcggctgcagctataatcgtttatgatatcacaaaagaagagacattttcaacattaaagaattgggtgaaagagcttcgacagcatggcccacctaatattgtagttgccattgcaggaaataaatgtgatcttatcgatgtaagagaagtcatggagagagatgcaaaggactacgccgactctattcatgcaatttttgtagagaccagcgcaaaaaacgcgataaacataaatgaactctttatagaaattagtcgaagaattccatccactgacgccaacctgccatctggcggtaagggcttcaaactccgaagacagccttcagagccaaagcggagctgctgctgaccgaacctcagcctctcagacttgatgatgaagtaggtggtcctgaaagttaacaggagggctggggtccctgccaccagttttcacctagccagtcttgagtcttctccgtgcaaaaaggattcacagaaatggaccagttctgttctccaaagactgcagcaatgatatttcagtctgtgaacttctattatgtaaagaatctctagtgtacaaagggactacatcgttggcttttgaccttgctgaaaaggaacatataattgtatggatggtaggattaagttgttgagtagttttgtaatcaagattttatgtaacatttgtaaagggaaaattagcacttttgtggttcttaagggaaaagaaacagaccttgtggagattataatttccttggtttctgttaccactgttagagggagttgtatcatttaacatatagtaggatagtttaagtgtagggaggacaattattgtctgaagctaaaatgggttatttataggactgatggaaatgatttcatctctgccatctctaaagcacttttcattgaacatgttagcctaggatacgtacagtaaattaacaatgatagcagcagatgcctagctcatcctgggtttgcttctgaccttgtcatgtgtgtgccaccaaacacgttattggcacctttttaaataagctctcatgatcaagatggtgatggtagagaagctgcccggaataaactgaatttcatatgttctaaaatgactagcaatggtttaaaaaggaagaagagtggaagtgaagaaggtggtataaatgctgtcaatttttttttaacccaagtattttggtggggaaaagcaagtatctattgcttagcatatgtaaagttgtagtctatatttatggggccattgcttaaagattataaattatgtaaatacattaataaattctaagtttcatttgacattccattgaatctcgcacccagtcttgcgtatgcctgcccagttttcagcctcttaacgggagactcaagcacattggtattgtataaaggtatagagcacttagcttacaatctttaaaggtttctctgccttcccttctacccacccgcctcccaccagatcccatctggaaatcataataaagacatatgccactttgacaaacctgactagtccttactagcctgagggtaaaagattaagctccaacctcaagtcatttacctggtcttggtaataagtttcttttagcttgtacagcatcctcagaccaactgaggagctttccttgttaacaatttagcttatctttctgtttcctttatttttcccctgcctctgttagtggttaacactcttttccctcagggagcctaatgaggtttttaatatcatctaaaaataaagcattgaagtgaagttggtgaaaatttgttcctggtctaatttggcacccttccaacctgagtattgtaggggaaggaaatttacaagatttaataggaaatgaaacagcttgaatttcaaactaaattgtattttcagagctatcctgaaactgaacagctgaaactttaaaaaataattggtattattttgtgccccccacttaatatggatagattttaatgggaaaattataattcagattaaataaaaaacaattcccttttccctgttgtatatcttaagcatttggaattttttttatcttctgaaatcatataaaaagaatgtcattagtaaaaattctaacttcgttttgtttaaaagacatgtggatgctccatgcccctaggattttgcttcctccccggtgctaaattagcaagctcctagagaagccatgtgattcccagagccaggcgctttacacctaaagtagtttgactttcttctgtatacatccagatggatcccaggcatccgggcaccaccctggtgtgtccctagaattcccactgctgggcctctatctccatgacaacaaaataaaaacagaggttgcttgactcattaccaaagaggcaaagcatgtgcgaccctttctgtcttattttaccaaaagatggtgcaaatctatgaccttcacattttttccaccacacccaccagtagctgttggtgattgcatggtgtctcggtgcatggggaaaggcaaggtcttctgagctcatcttaactggtgaggcatctggatgtgtctgatcttactgtgatgttttactgtaccgagcccaatgtgggtccatctcatcagccctttgctgatttcatgatttctcaccctccctcccatatgtagggtgtgattctgttttattatagccacatgttttattaacagaatgagtgatatgaagcttgtacttatgcatttctcgggcctcttccctcattttcatcagtctgtctaagaacttgactcggcactgtttctcgtgtaatatccttctaatgcttagcaacaacaacaaaaaattgctctctcagatccataatccatactcagtgaaagcagggaaaaaatattttcacttattttatttgcttctaaaatgcaaagatgaatactaaagtcagaagcagtgtttcattttgaacacattttggattattaagctgactaagcaatgatctaatacacatttcatattttctttataataatttcttatggagaagaggctatatttcaaaggaattgagacatactcccatctataaacatgtttggttttcttacgatacagggccatttttttaaaactctcaggactgaacagaagagaaaaattattaattagctgctactgtatgttgattcttttcggagaaattgaaataagctctttgcaggcgtccaatcctagaaaccaatggtctccagaactctcacacaagtgtttttctgattctatgataactaattaaccatcatctggtgattaaaagaacataaagtaagattatgattaagtgtccatcacctgcctgtcagccgtggtcagaataagttttacacgaagcaggtgaaagatttagttcttttcaaagtaacttattttcttgtgacccgtttatgatgttgtttgaagtccctgtttcccattgtgtacgcactttctggatgtctggaaggatcgggacttttgtgtgagaggcttgagcgcctcctctatgtgggctggtgtccttcttgaagttgtcaattcctcttattcttaaatatctaaagggaaaggaaaccaactttaatttcagaacttctctttacgtcttgtatgtatttcttttctgttctcaaggaggaaaattggtctaggaagccttctaaattaaactctgggaaatatagtaatgaaaatatcctttagctaactttcctgtaactgtcaaaccaaaatgtcagtatttttagggcattgtgttaaaataagcagtttagattccgacgacactgcactaattggcatgtcagcctccagctcagaaaggcatttgctcatggttacaggcatcttttagattctaagagtgagttacagaattctttttggtactttcacttattctttcagaatacatcaaggatgtgatttatgggcccttaagagtataagatataggtgcacagtatgttacttaagtaacggatgagcccccctaaacatccacgtgtctctgcaggaacctgtgtaagtattgtgaaaacccttttcttccagggaaaaattattggaaattccttaactgagctatacttggtacttgctctagaacatttgggaaatgacaaactcaggctggctctcctctctaacctcactgggctataaatgttccttctaactctgtaatgaaagttcagtgacaaactagatagtgaacctgtgaaagtcattatttacatttgctttaaagggacagttttaccgttcaacttcaagagtttttctacctctttaacagttaatattttttaaaggaagaaatggaatgtaccttcaggggtcaagctgttaactgtatacctgcctctagttagcttggtttatcaaaaggatttttaaatgattcaaggtaatgtttaggatatttgttttaactcctgctgtgctgtgatttaaaaaaaaatagtctaagaaacaaatttatccatgagataaacatcatattttatagttttagaaaaaagggttgggggtggaatttagcctagaacttaaagaaacaacctctgcgaatttctcttgacagcggagttgcttgtcttgacttctaataatataaatccaggcagtttgattatccgatttgcaagaaactttaatggaattctggggcatttgtcctgttttatgtgcaaatgaaagtctaaaaaatatgaggaagatattacatttttcaggagcctccattttttcagtctaagagaatgataagtgagaggcctattgtgatgaagttgcattggacataatgtgggaagtgaataaatagaaccaagaatcttcatctatctctgttggtctttcaggattctcttagcatataggaaaatgatttaccttccagatctcgaaggacttccaatagcatagatcaggtttaatttgatggtctataccatcagaaataactaatatctgttttctttccttttagagtataatcaattatggataggccagaatatttttggcttcaaaacaaaaggattcataagcttaaaaaaacaaaaatcccaaaccttccatctatcccttttattacgttgaacattttagatagtaagattaagatgtatcattagtatatggtgaaattaaaaccgtggtgtctaacagatttaacaaaaagtgtttaatttactgcaagttcatttttagatctgtatggtgcccagtactccacaaaatgcatcataattgaaacaacaaaattattttcatgagcaagaattcaagtatcaaggcctatcagccaattaaaagccgtaagatagtaatgattttttttctttttttttttttttctttttttagatggagtctcactctgtcgcccaggctggtatgcagtggcgcgatctcagctcactgcaacctgtctcctgggttcaagcagttctcctgcctcagcctcctgagtagctgggatgacaggcgtgcaccaccatacccagctaatttttgtatttttagtagagatggggtttcaccatgtttgccaggctggtctcgaactcctgacctcaggtgatctgcttgcctcggcttcgcaacattctgggattacagacgtgagccaccgcgcccaaccagtaacgatttttttaaagggcctttcttaattgacagttttaagctgtagacattaatattataacaaacaaaacatgccagttttactgattccgctttttgcttgattcaggaacttttcattgtttggggaagcttttgaatgcagtactgtggaggaaatcatccttaaaatagcatttcacacatagggccaaaattgaaattgtcaaggaaacccctcagcatctaacgtcatcttgtagaagagctgggcatacctcttcctctaggccaattcagaggccactggccacccaagtagagtggggcccactggcatgagtagtccctgtgcccatgcccatggtggtgcttgactttgctttggggcttaatcctagtatcatttggccattaatttttaattaagtttatacttgaataatcagttttactcctgaaaaattttgaagccagcactgactttgtttatattcacttaccttgtatatgaacttatgacattagagtttgtgaaactgtcttaacgtggctcatacacgtgatgtcagagggactggtcagttctttacagggtgaattaatcggcagctggctagtcagagcaactgatgggtggcttttttttctttttttttttgagacggagtctcgctctgtcacccaggctggagtgtaagggcgcgatctcggctcactgcaacctccgcctcccaggttcaagcaattctcctgcctcagccacctgaatagctaggattacaggcgcccgcccccacacccggctaatattttttgtatttttagtagagacagggtttcaccgtgttgatcaggctggtctcgaactcctgacctcacgatccgcccgcctcggcctcccaaagtgctgggattacaggcgtgagtggtggccctatttttaaaccattcgttacgctgtgtagacagagctttattgccctggaaaagattttttttttaactctcatgcagttcagtctttccatcatttcactttgtgagtcactcacataattgtcaatcattcctctgaccttcttaagaatttacaccttaccgtctctgtgattgaagcagacttctcgctttatttcccttaggctcatttttctgtgggctctcccttaaagacacatggccacagacacctccttcgcatatgtaatctgccttcccctgcggccttccgtggtcacagcaacagggactgctcaccccctccagctggggcttttctaacaagcacagtcagaaatgcgcaggcctggggttggggatgaacagaagttgattagtgggcacagaaatacagttagatagaaggaatagttccagcattcgatattacagtagggagactgcatttaacaataattgattgtatatttgaaaacagctagaagaataagaatattcccaacacaaagaaaagataagcgaggtgaaggaaatcccagttaccctcattcagtccattacacattcgatacaggtatcaaaatatcataggcacctcaaagacatgtacaactcttaatttaacatttttgaaagaaaaaaaaaccggccagagcattaaaacaaataaaataagaaacacagaggccagtgttaggtgaagaactccgctgcttcagaaagagaatagcagcgctcgcttaccgtgggaacacggccagttaacaaaatgggttttggttttttgttttgttttgttttaccattggtaataagatagttaacataagtggtcagaacttcgctgaatttgtaataaagcatttgttaagcgtgtaaaagtccaaattaaaagtcttgaagaaaaacagctatggcaatgagcctagacatttttcaaaaaaaaaagctaagccgtcctaccagcaatctctctttctcctaagaatgtcatgccttctcaagacctgatgaaaggaataagatatttgtgcctttttataaaagcatctattacgaaagtaaaattcagttgcttacagttttggccgctttgtagcactattataaacagcccaaatttatggccttggacttactgcatgacacatggcctggttacctgtcatggaatgctgcagtggtggtttgccaagcttctgtggatgtttgaagactttatttttgcagtcttaaccttgggctggacctaagtgtatgtaaaccatatgatgcctgtattgtttatagatgctgacaaaagaaaactagaccttttgttttttgttgtaagatttttgttttcatgcctatgctcatagtagatagtttgcaaatgaaagttgatttgccatacttttaaataatattgttttagcttgaatattctataatacacttttatagagtataacatgctaaatcactgttttgttgtaagaagggtgtaaacattttgttaataaaatgctatgtttacaaatata

SEQ ID NO: 173089 - DNA, 2546 bp, Homo sapiens
  Payload ID: 14020
  Gene Symbol: RAB23
  Gene Name: RAB23, member RAS oncogene family
  Uniprot ID: Q9ULC3
  ENST ID: ENST00000317483
  CDS Start-End: 155-868
tgacactggttgctacagaattaactttactcggagatccgaggagccatcggcagttcccaggagtaagaacctgagagcgtgtgagaatttgagagggaagatctgatctcctagaattagagttggtacagaaaccatttcagctccaaaaatgttggaggaagatatggaagtcgccataaagatggtggttgtagggaatggagcagttggaaaatcaagtatgattcagcgatattgcaaaggcatttttacaaaagactacaagaaaaccattggagttgattttttggagcgacaaattcaagttaatgatgaagatgtcagactaatgttatgggacactgcaggtcaggaggaatttgatgcaattacaaaggcctactatcgaggagcccaggcttgtgtgctcgtgttctctaccacagatagggaatcttttgaagcagtttccagttggagagagaaagtagtagccgaagtgggagatataccaactgtacttgtgcaaaacaagattgatcttctggatgattcttgtataaagaatgaggaagctgaggcactggcaaaaaggttaaagttaagattctacagaacatcagtgaaagaagatctaaatgtgaatgaagtttttaagtatttggctgaaaaataccttcagaaactcaaacaacaaatagctgaggatccagaactaacgcattcaagtagtaacaagattggtgtctttaatacatctggtggaagtcactccggtcagaattcaggtaccctcaatggtggagatgtcatcaatcttagacccaacaaacaaaggaccaagaaaaacagaaatccttttagcagctgtagcataccctaagatgttttgggaggaaaacaattgaattacattgtgcaatgcattaagaaacccatccagctgtcatggtatgttacaaggttttcagcagactttgctcctaatggctctctgaaagtgacagacttaaatattgctctgcagtgcttttcagaatgtagagtgagacctctggtggaaaaattattgccctgtggactcctttaattttttttacattagacgaagcttctcctgtttgtaaaggaatgctataagaaatttcaaacacaggttttgcggaattttaaatgctggaaaacataaatgaaatgcctaaatatattgttacagattttaatactgtggatcaaggaaagatagcaagcattcttttcctgaaattggtcatgtagcttttctgcgaaatagtattgaatctgaatactttcacaaaataatactgaaaggtaaaccctaaatcttgccagactgcattagtattttggcattgaaacttgtgcaatatctgtgtaatgtagaatgtggggtgtgcatgcagatgtctggtactggagtaagctgaaggtatgtgcagtatttaagaaaatgtacattctaattaattcacttataaaaccatttacatattgtgtatatgtttttattttcaaatgataaactctagacatatattttgcaaaatgagcttgggtttaaaaagtgctttgtgccaaaaatatcatacctaatttttatagtgctttactatcagaatttatattgtttattatatcttttaaaagcagtaagcagttttcatctgacagcgtagataaaagaggagtataggaatttgaatgctagagcatctcccaggtgagccttattgcagatctttttgatatagtcacccataagcatggtgagctcctgctctcataaggtcagccaaagccccttaagaaggtacacagcacatctgcagtcattcaggaggtcctgtgaagtgtggtgatgcatctaacaccttttgctgctcactgagaacccagctttgaacttacaagattacactaaccatttttaaagtgcacaaaaatattattattagtcttaactaaaattacatattttataatgccctgcaactctaaaccatccttttgtttacacatttttgtatggtattttaagattatcaatcacttcaacatttctataaccttgtttgtatagcactttctcaagagctgtcagtcccacatacagaatcatttcttttacaaaatgatttaatatgtaatcatgtgtcaggacataaattttgtcacttgggacagtagctttccagctaagataattgcgtgaactctgttaaaactgattatcactcatcaatggctttatttttaacctataaataacccctttcaatatacctggtttttacagcattgcaaaatctgtaaaaataacttttattggaaaatgtcatgaagtcatttttcattatttgtactaaacaatgttttatgtactccttttgtgttttatcttttgtttttccatctgtactcccctcatcctcctaatgttgagaaaatcaaatttcctgggtgtgtccttgttaagtgatcaaaagtaaatgttctctttgccattttagatggaaaaataaaaaaaattaaaaagtaaa

SEQ ID NO: 173090 - DNA, 4837 bp, Homo sapiens
  Payload ID: 14020
  Gene Symbol: RAB23
  Gene Name: RAB23, member RAS oncogene family
  Uniprot ID: Q9ULC3
  ENST ID: ENST00000468148
  CDS Start-End: 655-1368
acggcgcatgctccgcagcgcggcgggtccacagatgaggggagtcgagactcccgcgccccaccacccccggcggagctgctgctgagccactcaatctgagccctggctactaataaagttcgtttaaaaatcataatcattcttaagagagcgaaagagggtgcgaactagccgctcggccccgcagggagagctggcgcgtcgggaggagacagcggcggcagcggttgcgccgcgaccaggaggagccggtggcgccgggcggcgggtccgcggccggtgggggacggtgagtagcggctcgcgctgcggtgcagcggcgctgcactcactcgccctctccaggggctgggggttcgtccggctccactggggaagactcagcttctccccggggtcccgggttgtgccttactctccggagtgggcaggggtatcgagggcaggggcctcccggcccggctcccccatcccccggttcggaccgccgagcgccggctctcccctccctgagcaccgatcccaagttccagctagagaaggtgggcggcagcgccagcccggcgccccctcccagctcccagcgatttgagagggaagatctgatctcctagaattagagttggtacagaaaccatttcagctccaaaaatgttggaggaagatatggaagtcgccataaagatggtggttgtagggaatggagcagttggaaaatcaagtatgattcagcgatattgcaaaggcatttttacaaaagactacaagaaaaccattggagttgattttttggagcgacaaattcaagttaatgatgaagatgtcagactaatgttatgggacactgcaggtcaggaggaatttgatgcaattacaaaggcctactatcgaggagcccaggcttgtgtgctcgtgttctctaccacagatagggaatcttttgaagcagtttccagttggagagagaaagtagtagccgaagtgggagatataccaactgtacttgtgcaaaacaagattgatcttctggatgattcttgtataaagaatgaggaagctgaggcactggcaaaaaggttaaagttaagattctacagaacatcagtgaaagaagatctaaatgtgaatgaagtttttaagtatttggctgaaaaataccttcagaaactcaaacaacaaatagctgaggatccagaactaacgcattcaagtagtaacaagattggtgtctttaatacatctggtggaagtcactccggtcagaattcaggtaccctcaatggtggagatgtcatcaatcttagacccaacaaacaaaggaccaagaaaaacagaaatccttttagcagctgtagcataccctaagatgttttgggaggaaaacaattgaattacattgtgcaatgcattaagaaacccatccagctgtcatggtatgttacaaggttttcagcagactttgctcctaatggctctctgaaagtgacagacttaaatattgctctgcagtgcttttcagaatgtagagtgagacctctggtggaaaaattattgccctgtggactcctttaattttttttacattagacgaagcttctcctgtttgtaaaggaatgctataagaaatttcaaacacaggttttgcggaattttaaatgctggaaaacataaatgaaatgcctaaatatattgttacagattttaatactgtggatcaaggaaagatagcaagcattcttttcctgaaattggtcatgtagcttttctgcgaaatagtattgaatctgaatactttcacaaaataatactgaaaggtaaaccctaaatcttgccagactgcattagtattttggcattgaaacttgtgcaatatctgtgtaatgtagaatgtggggtgtgcatgcagatgtctggtactggagtaagctgaaggtatgtgcagtatttaagaaaatgtacattctaattaattcacttataaaaccatttacatattgtgtatatgtttttattttcaaatgataaactctagacatatattttgcaaaatgagcttgggtttaaaaagtgctttgtgccaaaaatatcatacctaatttttatagtgctttactatcagaatttatattgtttattatatcttttaaaagcagtaagcagttttcatctgacagcgtagataaaagaggagtataggaatttgaatgctagagcatctcccaggtgagccttattgcagatctttttgatatagtcacccataagcatggtgagctcctgctctcataaggtcagccaaagccccttaagaaggtacacagcacatctgcagtcattcaggaggtcctgtgaagtgtggtgatgcatctaacaccttttgctgctcactgagaacccagctttgaacttacaagattacactaaccatttttaaagtgcacaaaaatattattattagtcttaactaaaattacatattttataatgccctgcaactctaaaccatccttttgtttacacatttttgtatggtattttaagattatcaatcacttcaacatttctataaccttgtttgtatagcactttctcaagagctgtcagtcccacatacagaatcatttcttttacaaaatgatttaatatgtaatcatgtgtcaggacataaattttgtcacttgggacagtagctttccagctaagataattgcgtgaactctgttaaaactgattatcactcatcaatggctttatttttaacctataaataacccctttcaatatacctggtttttacagcattgcaaaatctgtaaaaataacttttattggaaaatgtcatgaagtcatttttcattatttgtactaaacaatgttttatgtactccttttgtgttttatcttttgtttttccatctgtactcccctcatcctcctaatgttgagaaaatcaaatttcctgggtgtgtccttgttaagtgatcaaaagtaaatgttctctttgccattttagatggaaaaataaaaaaaattaaaaagtaaatttttgcttttcattatattgaaatgatctggcattatctatttcacagtaatgtaaaatgcttatttttatgtcaccagttgtcaccactcccattgctgatagtgacataggttttgggggcaaaattcagttcctaacaaacagtggatactgctaatgagtcatcttttctactctcttcaattttctactctctactctcctctttaatttttgcacaaaataatactttgcaacaaatagtcttttgtctttattggcagaaaaatcacttgttatatgtgttctagttagttctttttcatgttagctgtgtggctaaaagcgtgttacctttctatatttaaaaaaagtaatctctgaggatagttacagttcctgtaatataattttatgtacctagttttatctttttttaaataagaactgaagagagagctttgttacatatttgaatttttaatttgcactgctgtattttaaacctaaccataattagtcatttaaaataattaagtaggcctgaaagtcagccatgttaatttctcaatttaatcaattcttaaagccttcaaaaattgacattttttttccaagacccttcattctcttaaataactttaattttatgaaaccatgtatactaaagaaaaacttttccaagattccaggtgattgtgcatttgtgctctaatctacttttttaacattacggctaatcttttgcgtagacatatcgctgtggaataactgccatatttcagagttcctcaggtttccttttccttttccagtctctgtctatgaattaaatagtatatagaatgacccatataaggcaatatagttaaataaaaccaggttaaatgatttcctttgtatctgcccaaagttgatagcacacgttactttttcaaaataaagctaaaactaccaaaaagaggatgaaaactttttcctcattatggagtgaagttctaggtggttgctttagaagttggcagtgcagtgctcagaaggaactctcaataaataacatgtactccttggacctgtgagttttaggaaactggaccttttctgaagaccttagaatagggagttggccttaggacctaatgtcccaacttagtgttggacccttttaatataagatattgttaattattagcatacttttcaaaacctttgaaatagttactgctaacctgataaaatgttcccattaatctatcattagtctgtttctctgaaaacaaaatgcattgatgaggtgaaagcttgttccacatggcacctacctaatgaacaggacttactcagtttttaactgttaagaatgtcacatgtactattgtcactccttaggttttcagctataaaacatgtaagtctctcatcatacagatgaattcatttgctaacaaaatatttaaaacccgcagtagactctgaaatatccagtcatcaaactcctggctaactggatgatttggctataataatctttattattattattttcatctgtctctcgaaatatctacagtaggatgttagtaaatggtcttttaaaagcaaaaaattggggataaaaggaaaactgaattccttctatatttttattactaataaataatgcttttgtaaatttgaatggaaaaccacttgtatgtattgctatttggttgcagttacactctggagcttaatttaaaacactactctaaaaatttcatgaaggatgaattccaataatcagaaaataaatgcatttcaaagctaaaa

SEQ ID NO: 173091 - DNA, 1385 bp, Homo sapiens
  Payload ID: 14021
  Gene Symbol: RAB24
  Gene Name: RAB24, member RAS oncogene family
  ENST ID: ENST00000303270
  CDS Start-End: 604-1128
cctcccgcgggagtcgcggcgctgcgggtaggagccgggttgcgggagaccccaggttcggttgggattcccagccagaacggagcttaagccgggcaggcgagcgaatgacggagtagcgagctgcacggcggcgtgctgcgctgttgaggacgctgtcccgcgcgctcccaggccgccccgaggcttggggtcttcgaaggataatcggcgcccggggccgaacagcgggggcacacggggcgctgccgaagtgcaaggccacggccagagctcgagcccgacgcgctgtctggagtcgtaggttggcgccgtttggggtcggggtctgaggcttgggcgctgcctgggccgagcggagatcggggtttgcctcccgtccccgctcaggaccctgacgtggctgaagcggccccgggagcatgagcgggcagcgcgtggacgtcaaggtggtgatgctgggcaaggagtacgtgggcaagactagcctggtggagcgctacgtgcacgaccgctttctggtggggccttatcagaacgtgagtgcatccggaggggccaggcacggtgggcgggggagtggggggccggtaatctgcacctatggccccgatctcttccctctcgttgcagaccatcggggccgccttcgtggccaaggtgatgtcggtcggagaccggactgtgacattaggtatttgggacacagcaggctctgagcgctatgaggccatgagtagaatctactatcggggtgccaaggctgccatcgtctgctatgacctcacagacagcagcagctttgagcgagcaaagttctgggtgaaggaactgcgcagcctagaggagggctgccaaatctacttatgtggcaccaagagtgacctgctggaagaagaccggaggcgtcgacgtgtggacttccacgacgtccaggactatgcagacaatatcaaagctcagctctttgaaacatccagcaagacaggccagagtgtggacgagctcttccagaaagtggcagaggattacgtcagtgtggctgccttccaggtgatgacagaggacaagggcgtggatctgggccagaagccaaacccctacttctacagctgttgtcatcactgagtcagcactcacctggcctgggggaattaaaggaattccccgtaagggctggacccagctcctttctgggcttgggtagtcaaatgtctgagctaccccaggtcctcatgtcagcagagtggcgcctgcctgtgctggcccatggaacggagacagcattgggctgactgtgggcatgaggagggataaggctgatttggaccccaggcttctgccctggacagcacttgtgtctgcagattatttaagtggctttt

SEQ ID NO: 173092 - DNA, 1311 bp, Homo sapiens
  Payload ID: 14021
  Gene Symbol: RAB24
  Gene Name: RAB24, member RAS oncogene family
  Uniprot ID: Q969Q5
  ENST ID: ENST00000303251
  CDS Start-End: 421-1032
tcccgcgggagtcgcggcgctgcgggtaggagccgggttgcgggagaccccaggttcggttgggattcccagccagaacggagcttaagccgggcaggcgagcgaatgacggagtagcgagctgcacggcggcgtgctgcgctgttgaggacgctgtcccgcgcgctcccaggccgccccgaggcttggggtcttcgaaggataatcggcgcccggggccgaacagcgggggcacacggggcgctgccgaagtgcaaggccacggccagagctcgagcccgacgcgctgtctggagtcgtaggttggcgccgtttggggtcggggtctgaggcttgggcgctgcctgggccgagcggagatcggggtttgcctcccgtccccgctcaggaccctgacgtggctgaagcggccccgggagcatgagcgggcagcgcgtggacgtcaaggtggtgatgctgggcaaggagtacgtgggcaagactagcctggtggagcgctacgtgcacgaccgctttctggtggggccttatcagaacaccatcggggccgccttcgtggccaaggtgatgtcggtcggagaccggactgtgacattaggtatttgggacacagcaggctctgagcgctatgaggccatgagtagaatctactatcggggtgccaaggctgccatcgtctgctatgacctcacagacagcagcagctttgagcgagcaaagttctgggtgaaggaactgcgcagcctagaggagggctgccaaatctacttatgtggcaccaagagtgacctgctggaagaagaccggaggcgtcgacgtgtggacttccacgacgtccaggactatgcagacaatatcaaagctcagctctttgaaacatccagcaagacaggccagagtgtggacgagctcttccagaaagtggcagaggattacgtcagtgtggctgccttccaggtgatgacagaggacaagggcgtggatctgggccagaagccaaacccctacttctacagctgttgtcatcactgagtcagcactcacctggcctgggggaattaaaggaattccccgtaagggctggacccagctcctttctgggcttgggtagtcaaatgtctgagctaccccaggtcctcatgtcagcagagtggcgcctgcctgtgctggcccatggaacggagacagcattgggctgactgtgggcatgaggagggataaggctgatttggaccccaggcttctgccctggacagcacttgtgtctgcagattatttaagtggcttttgatctgtaaataaaatcagtgc

SEQ ID NO: 173093 - DNA, 1236 bp, Homo sapiens
  Payload ID: 14021
  Gene Symbol: RAB24
  Gene Name: RAB24, member RAS oncogene family
  Uniprot ID: Q969Q5
  ENST ID: ENST00000393611
  CDS Start-End: 333-944
ccgcgggagtcgcggcgctgcgggtaggagccgggttgcgggagaccccaggttcggttgggattcccagccagaacggagcttaagccgggcaggcgagcgaatgacggagtagcgagctgcacggcggcgtgctgcgctgttgaggacgctgtcccgcgcgctcccaggccgccccgaggcttggggtcttcgaaggataatcggcgcccggggccgaacagcgggggcacacggggcgctgccgaagtgcaaggccacggccagagctcgagcccgacgcgctgtctggagtcgtaggaccctgacgtggctgaagcggccccgggagcatgagcgggcagcgcgtggacgtcaaggtggtgatgctgggcaaggagtacgtgggcaagactagcctggtggagcgctacgtgcacgaccgctttctggtggggccttatcagaacaccatcggggccgccttcgtggccaaggtgatgtcggtcggagaccggactgtgacattaggtatttgggacacagcaggctctgagcgctatgaggccatgagtagaatctactatcggggtgccaaggctgccatcgtctgctatgacctcacagacagcagcagctttgagcgagcaaagttctgggtgaaggaactgcgcagcctagaggagggctgccaaatctacttatgtggcaccaagagtgacctgctggaagaagaccggaggcgtcgacgtgtggacttccacgacgtccaggactatgcagacaatatcaaagctcagctctttgaaacatccagcaagacaggccagagtgtggacgagctcttccagaaagtggcagaggattacgtcagtgtggctgccttccaggtgatgacagaggacaagggcgtggatctgggccagaagccaaacccctacttctacagctgttgtcatcactgagtcagcactcacctggcctgggggaattaaaggaattccccgtaagggctggacccagctcctttctgggcttgggtagtcaaatgtctgagctaccccaggtcctcatgtcagcagagtggcgcctgcctgtgctggcccatggaacggagacagcattgggctgactgtgggcatgaggagggataaggctgatttggaccccaggcttctgccctggacagcacttgtgtctgcagattatttaagtggcttttgatctgtaaataaaatcagtgcactgtgcatcaca

SEQ ID NO: 173094 - DNA, 563 bp, Homo sapiens
  Payload ID: 14021
  Gene Symbol: RAB24
  Gene Name: RAB24, member RAS oncogene family
  ENST ID: ENST00000504395
  CDS Start-End: 367-563
gaccttgcggccccgccccctcgccctctagccccctcccgcgggagtcgcggcgctgcgggtaggagccgggttgcgggagaccccaggttcggttgggattcccagccagaacggagcttaagccgggcaggcgagcgaatgacggagtagcgagctgcacggcggcgtgctgcgctgttgaggacgctgtcccgcgcgctcccaggccgccccgaggcttggggtcttcgaaggataatcggcgcccggggccgaacagcgggggcacacggggcgctgccgaagtgcaaggccacggccagagctcgagcccgacgcgctgtctggagtcgaccctgacgtggctgaagcggccccgggagcatgagcgggcagcgcgtggacgtcaaggtggtgatgctgggcaaggagtacgtgggcaagactagcctggtggagcgctacgtgcacgaccgctttctggtggggccttatcagaacaccatcggggccgccttcgtggccaaggtgatgtcggtcggagaccggactgtgacattaggtatttgggacacagcagg

SEQ ID NO: 173095 - DNA, 1110 bp, Homo sapiens
  Payload ID: 14022
  Gene Symbol: RAB25
  Gene Name: RAB25, member RAS oncogene family
  Uniprot ID: P57735
  ENST ID: ENST00000361084
  CDS Start-End: 242-883
ctcagcttccgtcctctctgcttccttacagcacccccacctgccagagctgatcctccctaggccctgcctaaccttgagttggcccccaatccctctggctgcagaagtccccttacccccaatgagaggaggggcaggaccagatcttttgagagctgagggttgagggcattgagccaacacacagatttgtcgcctctgtccccgaagacacctgcaccctccatgcggagccaagatggggaatggaactgaggaagattataactttgtcttcaaggtggtgctgatcggcgaatcaggtgtggggaagaccaatctactctcccgattcacgcgcaatgagttcagccacgacagccgcaccaccatcggggttgagttctccacccgcactgtgatgttgggcaccgctgctgtcaaggctcagatctgggacacagctggcctggagcggtaccgagccatcacctcggcgtactatcgtggtgcagtgggggccctcctggtgtttgacctaaccaagcaccagacctatgctgtggtggagcgatggctgaaggagctctatgaccatgctgaagccacgatcgtcgtcatgctcgtgggtaacaaaagtgacctcagccaggcccgggaagtgcccactgaggaggcccgaatgttcgctgaaaacaatggactgctcttcctggagacctcagccctggactctaccaatgttgagctagcctttgagactgtcctgaaagaaatctttgcgaaggtgtccaagcagagacagaacagcatccggaccaatgccatcactctgggcagtgcccaggctggacaggagcctggccctggggagaagagggcctgttgcatcagcctctgaccttggccagcaccacctgcccccactggctttttggtgccccttgtccccacttcagccccaggacctttccttgccctttggttccagatatcagactgttccctgttcacagcaccctcagggtcttaaggtcttcatgccctatcacaaatacctcttttatctgtccacccctcacagactaggaccctcaaataaagctgttttatatcaatgcctggtca

SEQ ID NO: 173096 - DNA, 1019 bp, Homo sapiens
  Payload ID: 14022
  Gene Symbol: RAB25
  Gene Name: RAB25, member RAS oncogene family
  ENST ID: ENST00000615862
  CDS Start-End: 211-981
cacccccacctgccagagctgatcctccctaggccctgcctaaccttgagttggcccccaatccctctggctgcagaagtccccttacccccaatgagaggaggggcaggaccagatcttttgagagctgagggttgagggcattgagccaacacacagatttgtcgcctctgtccccgaagacacctgcaccctccatgcggagccaagatggggaatggaactgaggaagattataactttgtcttcaaggtggtgctgatcggcgaatcaggtgtggggaagaccaatctactctcccgattcacgcgcaatgagttcagccacgacagccgcaccaccatcggggttgagttctccacccgcactgtgatgttgggcaccgctgctgtcaaggctcagatctgggacacagctggcctggagcggtaccgagccatcacctcggcgtactatcgtggtgcagtgggggccctcctggtgtttgacctaaccaagcaccagacctatgctgtggtggagcgatggctgaaggagctctatgaccatgctgaagccacgatcgtcgtcatgctcgtgggtaacaaaagtgacctcagccaggcccgggaagtgcccactgaggaggcccgaatgttcgctgaaaacaatggactgctcttcctggagacctcagccctggactctaccaatgttgagctagcctttgagactgtcctgaaagaaatctttgcgaaggtgtccaagcagagacagaacagcatccggaccaatgccatcactctgggcagtgccaggctggacaggagcctggcctggggagaagagggcctgttgcatcagcctctgaccttggccagcaccacctgcccccactggctttttgtgccccttgtccccacttcagccccaggacctttccttgccctttggttccagatatcagactgttccctgttcacagcaccctcagggtcttaaggtcttcatgccctatcacaaatacctcttttatctgt

SEQ ID NO: 173097 - DNA, 1675 bp, Homo sapiens
  Payload ID: 14023
  Gene Symbol: RAB26
  Gene Name: RAB26, member RAS oncogene family
  Uniprot ID: Q9ULW5
  ENST ID: ENST00000210187
  CDS Start-End: 161-931
ggcgcgagccgggcgcccgggatgatgccgccgccgccgccgccgccgccgccgccgccaggggaagggttcgggtccgggtcgggctcggcgggcgcggggtgcgggacggcccagggcacggcggctgcagcgggagcacactgagcgcccgcccgccatgtccaggaagaagacccccaagagcaaaggggccagcacccccgctgcctccacgctgcccaccgccaacggggcccgaccggcgcgctccgggactgcgctttccggccccgacgcgccgcccaacgggcccttgcagcccggccggccctcgcttggcggcggtgtcgacttctacgacgtcgccttcaaggtcatgctggtgggggactcgggtgtggggaagacctgtctgctggtgcgattcaaggatggtgctttcctggcggggaccttcatctccaccgtaggcattgacttccggaacaaagttctggacgtggatggtgtgaaggtgaagctgcagatgtgggacacagctggtcaggagcggttccgcagtgttacccatgcctactaccgggatgctcatgctctgctgctgctctacgatgtcaccaacaaggcctcctttgacaacatccaggcctggctgaccgagatccacgagtacgcccagcacgacgtggcgctcatgctgctggggaacaaggtggactctgcccatgagcgtgtggtgaagagggaggacggggagaagctggccaaggagtatggactgcccttcatggagaccagcgccaagacgggcctcaacgtggacttggccttcacagccatagcaaaggagttgaagcagcgctccatgaaggctcccagcgagccgcgcttccggctgcatgattacgttaagagggagggtcgaggggcctcctgctgccgcccttgaacctggctgagctcagtcctctggaggaagccgtccagtccctagaaggctggacagagggtctccaggcccttctgactttgttgcccagtggccaacgcccgagtgtctgttttcaggagccccaggtcaagccttgtcccttcctcctcccagcaacagtcccaacaagcaggcttctgagagcccgtggccgcacactggccgccacggaaaagcagtcttctgcacgggacggggagcggcaagtggacagactttgccacggtgctctgctgccccctcctgggcacgtccaggtgagggagggctggggctggcaccacgcacagtgcctaaccctagaaaagccatgtcttcagccgcacatgctcaggcagctaagggaggacgcctgcccacgcctgggacagaaggcttcactgctaatcacatcgtgcatctgtgtgtcctgggagctgcctgctcccggcccaccctctaggaggctctggctcaaacagcaatagggtcttcctcactgaccttggaggatgcctgtggccttgtgataaaatgtgggaaatcacagaaaacaccagaaacaacaactgccagcccggcctggccacaggtgaggtctgtgatttccgagcacgctccaccttgcactcaacttggccttttgattgcacaagcctttgttttcagtcctagtgaataaagttgtgttttctggagcgtctgtctcatctgttgaaaaaa

SEQ ID NO: 173098 - DNA, 944 bp, Homo sapiens
  Payload ID: 14023
  Gene Symbol: RAB26
  Gene Name: RAB26, member RAS oncogene family
  Uniprot ID: Q9ULW5
  ENST ID: ENST00000541451
  CDS Start-End: 372-944
gtgtgtttgccaagccagggctggagcttcctggacccgcctaccctggaggggatggagcagtgaagggcaccgggccaagcgctaggcatctggggctaaggagacagaagcccgcggtgcccgtccatgcgggccctctgccccagcacccacatctcaggacaccccttcctcccaggaagaagacccccaagagcaaaggggccagcacccccgctgcctccacgctgcccaccgccaacggggcccgaccggcgcgctccgggactgcgctttccggccccgacgcgccgcccaacgggcccttgcagcccggccggccctcgcttggcggcggtgtcgacttctacgacgtcgccttcaaggtcatgctggtgggggactcgggtgtggggaagacctgtctgctggtgcgattcaaggatggtgctttcctggcggggaccttcatctccaccgtaggcattgacttccggaacaaagttctggacgtggatggtgtgaaggtgaagctgcagatgtgggacacagctggtcaggagcggttccgcagtgttacccatgcctactaccgggatgctcatgctctgctgctgctctacgatgtcaccaacaaggcctcctttgacaacatccaggcctggctgaccgagatccacgagtacgcccagcacgacgtggcgctcatgctgctggggaacaaggtggactctgcccatgagcgtgtggtgaagagggaggacggggagaagctggccaaggagtatggactgcccttcatggagaccagcgccaagacgggcctcaacgtggacttggccttcacagccatagcaaaggagttgaagcagcgctccatgaaggctcccagcgagccgcgcttccggctgcatgattacgttaagagggagggtcgaggggcctcctgctgccgcccttga

SEQ ID NO: 173099 - DNA, 857 bp, Homo sapiens
  Payload ID: 14023
  Gene Symbol: RAB26
  Gene Name: RAB26, member RAS oncogene family
  ENST ID: ENST00000565592
  CDS Start-End: 151-345
gcatcaaatcttgaaaccagatcaaaactgaagctcccacaagcacagcctaattcagggactcccacctgagtagagaggccggaagaaccatccgcagagggtcacaggacagctggacaccctgacagcccagatcactgaaaggtcatgctggtgggggactcgggtgtggggaagacctgtctgctggtgcgattcaaggatggtgctttcctggcggggaccttcatctccaccgtaggcattgacttccggcagggtctcactctgtcgccctggctggagtgcagtggtgatcatggtggactgcaacctccaacttctgggttcaagccatcctgagtctttcaaattagcaaaaagagctactgggaaggctgaggcgttgcagctcgttagttactgcacccatttgcagatgaggaaaccgaggcagtgtcaaacaaagttctggacgtggatggtgtgaaggtgaagctgcagatgtgggacacagctggtcaggagcggttccgcagtgttacccatgcctactaccgggatgctcatgctctgctgctgctctacgatgtcaccaacaaggcctcctttgacaacatccaggcctggctgaccgagatccacgagtacgcccagcacgacgtggcgctcatgctgctggggaacaaggtgggaggcccggctgtcctcacctgggccacagggcagggcaggtgagggggcaggggccaaccatgggccagctttcaccaagaccctgtgcctgggccaggtggactctgcccatgagcgtgtggtgaagagggaggacggggagaagctggccaaggtgagtcagggcaggggggtggtga

SEQ ID NO: 173100 - DNA, 644 bp, Homo sapiens
  Payload ID: 14023
  Gene Symbol: RAB26
  Gene Name: RAB26, member RAS oncogene family
  ENST ID: ENST00000566724
  CDS Start-End: 1-409
caaggagtatggactgcccttcatggagaccagcgccaagacgggcctcaacgtggacttggccttcacagccatagcaaacaacagtcccaacaagcaggcttctgagagcccgtggccgcacactggccgccacggaaaagcagtcttctgcacgggacggggagcggcaagtggacagactttgccacggtgctctgctgccccctcctgggcacgtccaggtgagggagggctggggctggcaccacgcacagtgcctaaccctagaaaagccatgtcttcagccgcacatgctcaggcagctaagggaggacgcctgcccacgcctgggacagaaggcttcactgctaatcacatcgtgcatctgtgtgtcctgggagctgcctgctcccggcccaccctctaggaggctctggctcaaacagcaatagggtcttcctcactgaccttggaggatgcctgtggccttgtgataaaatgtgggaaatcacagaaaacaccagaaacaacaactgccagcccggcctggccacaggtgaggtctgtgatttccgagcacgctccaccttgcactcaacttggccttttgattgcacaagcctttgttttcagtcctagtgaataaagttgtgttttctgga

SEQ ID NO: 173101 - DNA, 3446 bp, Homo sapiens
  Payload ID: 14024
  Gene Symbol: RAB27A
  Gene Name: RAB27A, member RAS oncogene family
  Uniprot ID: P51159
  ENST ID: ENST00000336787
  CDS Start-End: 243-908
gcggaaaatacccgccaacgacccaaaaaaggccggcggcgggtggacgcggcgcgcgaggacccgagccaggcggggacaggacggcggggcgagccagacaaaaagtaaccttcctgaagaggacatgtgattggaagttgtcaattgttgaagcattggtaactccagtctctaacgttttagaaaatcataacaagcggttctctaccctgtaaaggtgaactactgagttcttcattatgtctgatggagattatgattacctcatcaagtttttagctttgggagactctggtgtagggaagaccagtgtactttaccaatatacagatggtaaatttaactccaaatttatcacaacagtgggcattgatttcagggaaaaaagagtggtgtacagagccagtgggccggatggagccactggcagaggccagagaatccacctgcagttatgggacacagcagggcaggagaggtttcgtagcttaacgacagcgttcttcagagatgctatgggttttcttctactttttgatctgacaaatgagcaaagtttcctcaatgtcagaaactggataagccagctacagatgcatgcatattgtgaaaacccagatatagtgctgtgtggaaacaagagtgatctggaggaccagagagtagtgaaagaggaggaagccatagcactcgcagagaaatatggaatcccctactttgaaactagtgctgccaatgggacaaacataagccaagcaattgagatgcttctggacctgataatgaagcgaatggaacggtgtgtggacaagtcctggattcctgaaggagtggtgcgatcaaatggtcatgcctctacggatcagttaagtgaagaaaaggagaaaggggcatgtggctgttgagaagtcaagtaagcgacatagtagttcaggtggcccatgcctgggatcttctctatgattgatacatggcacagtgagagattaatgggcattgtgtacaaattgcttctcaccatccccattagacctacgaataaagcatccggttctaaaattaatttgttgcagctttgtaaatatttctttaagattcagcctgagagttaggagaaatatttcagagccaaaagtgccttatacaaccttagcctattatagtaaatcattcaaggattcagaattttgcagtcacagaagagtgtatttattatgtagaatgaatgagggtactgtcacctgccttaatgtaggtaggcccagagtcttacatttaagatcttacatgcagttataaaaccgccacagtcttcaatccagatttgaagactcatgccataggtgacattctaaaataccattaaagccacttaaatgttaaataagaatatacatgcacatcagctcaatgtctttgagtattaattttatgtaagcattctatttaacatgaatataggacaaatcatggctatatctatagaccttggataaactggattgaccaattatacactcacggtgacttttttattggtgggaaggggattggggtggggcaggctggcttaatgtaatatgagcaaccaaagtgggacttctgtctccccgctatattcccattgctctgaatggttgattgaagggtcagggaactagattttatggctttagttcactgtgattgtacatttatacttggcctatgtgctggccgcacctgaacatagctggtgcttatgccgagttatttgcgatgagtaaatatttagtttctttttcttcatatttataatgttgatctggcatcctcaggctgcagctttattagcttataacttactcatctctatctttaccagcaggctctgtattgttgatatttgcaacttgttttgcttttccattggtggaattgaaataattagtttttaattacataagatgcctgtttgctatttggtggaagatagatgttcatattgaagcagtcacatttgtactgtagttcaataaaagaaaaatgaagtattctgtagcctatatttttcatagagctcatgagcatttactgtacttgctgggtcttgccaagatcatttattccgctgcattgccaaagtgtcttcataccaaattaaaggtggttttaatatatgtttcatggaagttgtttataaaattcaaaggtatttcatttaggtgaaaagtcttatttattaaagtggtttgaataaagtagatcaaaacttccagagatcttaatggctatataggaagaaatatcactcaccataatttaaataaagaataaaaatacttgtattttgtggtggcaaatgtttggtagaactgtaattagaaaaatacaagtatatttgcgtgatggttacactagaagcccagactttacgactacacaatatattcatgtatctaaactgtacttgtaccccctaaatttatttttaaaaaaggaaaaataaaagtatcatgaaaaaacctatttttttttccactgtccttccactactcccataacaaacttatccatggttggtaaaattttacatatttctatccttgaaatgaaggcttcttttaaattccaaagaagtcatggaggcctgtgcatttgaattgtatatgctagtgaggaaaagatttagacatttcaagagcagggttggccaggcgcggtggctcacacctgtaatcccagcactttgggaggccgaggagggcggatcacgaggtcaggagatcgagaccatcctggctaacacagtgaaaccccatctctactaaaaaaaaaaaaaaaaaaaaaatgggctgggcgtggtggtgggcacctgtagtcccagctactcaggaggctgaggcaggagaatggcgtgaacctgggaggcggagcttgcagtgagccgagattgcgccactgcactccagcctgggcgacagaggagactctgtctcaaaaaaaaaaaaaaaaaaaaagagcagggtcataatcacacagcagtgccttatatagttgccataagacttcagtgcagtacaacataattttacagctacatatcagggcatattctatatggtgtatttgtgttagaataacacattaaatgtctttaaacataaaaataagaatgtttgcatgtttcagttttcaagaaccaaatgagtaattagctatagattccactggccttaaacatacaattaagtgtatacatgatatagtgcacacacaaaagccacctttaattattgaaataacctgtattctttttggaaatcatttaagtttggtattgaagtactatattttttgtgcatcaatgtatttttctatttacaagcctatgtaaaagtgaagtgtatcttcagtgaaccatgtgccaattaagctgtaataaaaaagtggtctagtctgtc

SEQ ID NO: 173102 - DNA, 3459 bp, Homo sapiens
  Payload ID: 14024
  Gene Symbol: RAB27A
  Gene Name: RAB27A, member RAS oncogene family
  Uniprot ID: P51159
  ENST ID: ENST00000396307
  CDS Start-End: 253-918
gatgcctgttttgaaagttgatggagcgaactgcttttccaaagactcttttgaaaaactttttaagtaggccattctgactttaacatttctctttgtcttaacattagacaaaaagtaaccttcctgaagaggacatgtgattggaagttgtcaattgttgaagcattggtaactccagtctctaacgttttagaaaatcataacaagcggttctctaccctgtaaaggtgaactactgagttcttcattatgtctgatggagattatgattacctcatcaagtttttagctttgggagactctggtgtagggaagaccagtgtactttaccaatatacagatggtaaatttaactccaaatttatcacaacagtgggcattgatttcagggaaaaaagagtggtgtacagagccagtgggccggatggagccactggcagaggccagagaatccacctgcagttatgggacacagcagggcaggagaggtttcgtagcttaacgacagcgttcttcagagatgctatgggttttcttctactttttgatctgacaaatgagcaaagtttcctcaatgtcagaaactggataagccagctacagatgcatgcatattgtgaaaacccagatatagtgctgtgtggaaacaagagtgatctggaggaccagagagtagtgaaagaggaggaagccatagcactcgcagagaaatatggaatcccctactttgaaactagtgctgccaatgggacaaacataagccaagcaattgagatgcttctggacctgataatgaagcgaatggaacggtgtgtggacaagtcctggattcctgaaggagtggtgcgatcaaatggtcatgcctctacggatcagttaagtgaagaaaaggagaaaggggcatgtggctgttgagaagtcaagtaagcgacatagtagttcaggtggcccatgcctgggatcttctctatgattgatacatggcacagtgagagattaatgggcattgtgtacaaattgcttctcaccatccccattagacctacgaataaagcatccggttctaaaattaatttgttgcagctttgtaaatatttctttaagattcagcctgagagttaggagaaatatttcagagccaaaagtgccttatacaaccttagcctattatagtaaatcattcaaggattcagaattttgcagtcacagaagagtgtatttattatgtagaatgaatgagggtactgtcacctgccttaatgtaggtaggcccagagtcttacatttaagatcttacatgcagttataaaaccgccacagtcttcaatccagatttgaagactcatgccataggtgacattctaaaataccattaaagccacttaaatgttaaataagaatatacatgcacatcagctcaatgtctttgagtattaattttatgtaagcattctatttaacatgaatataggacaaatcatggctatatctatagaccttggataaactggattgaccaattatacactcacggtgacttttttattggtgggaaggggattggggtggggcaggctggcttaatgtaatatgagcaaccaaagtgggacttctgtctccccgctatattcccattgctctgaatggttgattgaagggtcagggaactagattttatggctttagttcactgtgattgtacatttatacttggcctatgtgctggccgcacctgaacatagctggtgcttatgccgagttatttgcgatgagtaaatatttagtttctttttcttcatatttataatgttgatctggcatcctcaggctgcagctttattagcttataacttactcatctctatctttaccagcaggctctgtattgttgatatttgcaacttgttttgcttttccattggtggaattgaaataattagtttttaattacataagatgcctgtttgctatttggtggaagatagatgttcatattgaagcagtcacatttgtactgtagttcaataaaagaaaaatgaagtattctgtagcctatatttttcatagagctcatgagcatttactgtacttgctgggtcttgccaagatcatttattccgctgcattgccaaagtgtcttcataccaaattaaaggtggttttaatatatgtttcatggaagttgtttataaaattcaaaggtatttcatttaggtgaaaagtcttatttattaaagtggtttgaataaagtagatcaaaacttccagagatcttaatggctatataggaagaaatatcactcaccataatttaaataaagaataaaaatacttgtattttgtggtggcaaatgtttggtagaactgtaattagaaaaatacaagtatatttgcgtgatggttacactagaagcccagactttacgactacacaatatattcatgtatctaaactgtacttgtaccccctaaatttatttttaaaaaaggaaaaataaaagtatcatgaaaaaacctatttttttttccactgtccttccactactcccataacaaacttatccatggttggtaaaattttacatatttctatccttgaaatgaaggcttcttttaaattccaaagaagtcatggaggcctgtgcatttgaattgtatatgctagtgaggaaaagatttagacatttcaagagcagggttggccaggcgcggtggctcacacctgtaatcccagcactttgggaggccgaggagggcggatcacgaggtcaggagatcgagaccatcctggctaacacagtgaaaccccatctctactaaaaaaaaaaaaaaaaaaaaaatgggctgggcgtggtggtgggcacctgtagtcccagctactcaggaggctgaggcaggagaatggcgtgaacctgggaggcggagcttgcagtgagccgagattgcgccactgcactccagcctgggcgacagaggagactctgtctcaaaaaaaaaaaaaaaaaaaaagagcagggtcataatcacacagcagtgccttatatagttgccataagacttcagtgcagtacaacataattttacagctacatatcagggcatattctatatggtgtatttgtgttagaataacacattaaatgtctttaaacataaaaataagaatgtttgcatgtttcagttttcaagaaccaaatgagtaattagctatagattccactggccttaaacatacaattaagtgtatacatgatatagtgcacacacaaaagccacctttaattattgaaataacctgtattctttttggaaatcatttaagtttggtattgaagtactatattttttgtgcatcaatgtatttttctatttacaagcctatgtaaaagtgaagtgtatcttcagtgaaccatgtgccaattaagctgtaataaaaaagtggtctagtctgtcaaa

SEQ ID NO: 173103 - DNA, 663 bp, Homo sapiens
  Payload ID: 14024
  Gene Symbol: RAB27A
  Gene Name: RAB27A, member RAS oncogene family
  ENST ID: ENST00000566877
  CDS Start-End: 107-663
actctgcatactgaataataggtgaaataaggaaagactttgagaagcaataagaaatatatctgatttgaccttgtccattaggtgaactactgagttcttcattatgtctgatggagattatgattacctcatcaagtttttagctttgggagactctggtgtagggaagaccagtgtactttaccaatatacagatggtaaatttaactccaaatttatcacaacagtgggcattgatttcagggaaaaaagagtggtgtacagagccagtgggccggatggagccactggcagaggccagagaatccacctgcagttatgggacacagcagggcaggagaggtttcgtagcttaacgacagcgttcttcagagatgctatgggttttcttctactttttgatctgacaaatgagcaaagtttcctcaatgtcagaaactggataagccagctacagatgcatgcatattgtgaaaacccagatatagtgctgtgtggaaacaagagtgatctggaggaccagagagtagtgaaagaggaggaagccatagcactcgcagagaaatatggaatcccctactttgaaactagtgctgccaatgggacaaacataagccaagcaattgagatgcttctggacctgataatgaagcgaatgga

SEQ ID NO: 173104 - DNA, 1057 bp, Homo sapiens
  Payload ID: 14024
  Gene Symbol: RAB27A
  Gene Name: RAB27A, member RAS oncogene family
  Uniprot ID: P51159
  ENST ID: ENST00000564609
  CDS Start-End: 234-899
agacaaaaagtaaccttcctgaagaggacatgtgattggaagttgtcaattgttgaagcattggtaactccagtctctaacgttttagaaaatcataacaagcggttctctaccctgtaaagaacagaaacctggaaatctaaggctcaaagacatccaagtaattggtatctgggagatttgggattcaaacccagctctgcttgacttggtgaactactgagttcttcattatgtctgatggagattatgattacctcatcaagtttttagctttgggagactctggtgtagggaagaccagtgtactttaccaatatacagatggtaaatttaactccaaatttatcacaacagtgggcattgatttcagggaaaaaagagtggtgtacagagccagtgggccggatggagccactggcagaggccagagaatccacctgcagttatgggacacagcagggcaggagaggtttcgtagcttaacgacagcgttcttcagagatgctatgggttttcttctactttttgatctgacaaatgagcaaagtttcctcaatgtcagaaactggataagccagctacagatgcatgcatattgtgaaaacccagatatagtgctgtgtggaaacaagagtgatctggaggaccagagagtagtgaaagaggaggaagccatagcactcgcagagaaatatggaatcccctactttgaaactagtgctgccaatgggacaaacataagccaagcaattgagatgcttctggacctgataatgaagcgaatggaacggtgtgtggacaagtcctggattcctgaaggagtggtgcgatcaaatggtcatgcctctacggatcagttaagtgaagaaaaggagaaaggggcatgtggctgttgagaagtcaagtaagcgacatagtagttcaggtggcccatgcctgggatcttctctatgattgatacatggcacagtgagagattaatgggcattgtgtacaaattgcttctcaccatccccattagacctacgaataaagcatccggttctaaaattaa

SEQ ID NO: 173105 - DNA, 1013 bp, Homo sapiens
  Payload ID: 14024
  Gene Symbol: RAB27A
  Gene Name: RAB27A, member RAS oncogene family
  Uniprot ID: P51159
  ENST ID: ENST00000569493
  CDS Start-End: 194-859
cacaggaagagaagtgggtttgaagcaaggttgtggagaaaagcaaaggagacaaaaagtaaccttcctgaagaggacatgtgattggaagttgtcaattgttgaagcattggtaactccagtctctaacgttttagaaaatcataacaagcggttctctaccctgtaaaggtgaactactgagttcttcattatgtctgatggagattatgattacctcatcaagtttttagctttgggagactctggtgtagggaagaccagtgtactttaccaatatacagatggtaaatttaactccaaatttatcacaacagtgggcattgatttcagggaaaaaagagtggtgtacagagccagtgggccggatggagccactggcagaggccagagaatccacctgcagttatgggacacagcagggcaggagaggtttcgtagcttaacgacagcgttcttcagagatgctatgggttttcttctactttttgatctgacaaatgagcaaagtttcctcaatgtcagaaactggataagccagctacagatgcatgcatattgtgaaaacccagatatagtgctgtgtggaaacaagagtgatctggaggaccagagagtagtgaaagaggaggaagccatagcactcgcagagaaatatggaatcccctactttgaaactagtgctgccaatgggacaaacataagccaagcaattgagatgcttctggacctgataatgaagcgaatggaacggtgtgtggacaagtcctggattcctgaaggagtggtgcgatcaaatggtcatgcctctacggatcagttaagtgaagaaaaggagaaaggggcatgtggctgttgagaagtcaagtaagcgacatagtagttcaggtggcccatgcctgggatcttctctatgattgatacatggcacagtgagagattaatgggcattgtgtacaaattgcttctcaccatccccattagacctacgaataaagcatccggttctaaaa

SEQ ID NO: 173106 - DNA, 809 bp, Homo sapiens
  Payload ID: 14024
  Gene Symbol: RAB27A
  Gene Name: RAB27A, member RAS oncogene family
  ENST ID: ENST00000565972
  CDS Start-End: 402-809
gagaagtgggtttgaagcaaggttgtggagaaaagcaaaggagacaaaaagtaaccttcctgaagaggacatgtgattggaagttgtcaattgttgaagcattggtaactccagtctctaacgttttagaaaatcataacaagcggttctctaccctgtaaagaacagaaacctggaaatctaaggctcaaagacatccaagtaattggtatctgggagatttgggattcaaacccagctctgcttgacttgaggctctgcccttatccacgggctagccatacctgaaacgtgaggttgcagatctgcactgaagcactctgaggaaacacactgcagtggcttttggggctcagcattcaggagttttcagcataaggtgaactactgagttcttcattatgtctgatggagattatgattacctcatcaagtttttagctttgggagactctggtgtagggaagaccagtgtactttaccaatatacagatggtaaatttaactccaaatttatcacaacagtgggcattgatttcagggaaaaaagagtggtgtacagagccagtgggccggatggagccactggcagaggccagagaatccacctgcagttatgggacacagcagggcaggagaggtttcgtagcttaacgacagcgttcttcagagatgctatgggttttcttctactttttgatctgacaaatgagcaaagtttcctcaatgtcagaaactggataagccagctacagatgcatgcatattgtgaaaacccagatatagtgctgtgtggaaacaagagtgat

SEQ ID NO: 173107 - DNA, 432 bp, Homo sapiens
  Payload ID: 14024
  Gene Symbol: RAB27A
  Gene Name: RAB27A, member RAS oncogene family
  ENST ID: ENST00000568803
  CDS Start-End: 218-432
tgtgattggaagttgtcaattgttgaagcattggtaactccagtctctaacgttttagaaaatcataacaagcggttctctaccctgtaaagatttatgtgatcccaatgcaatgcaatgcaattccaataagaatccccatatggtttttgaggaactcagatggaaatgtgaagggttcatgtccttggtaaggtgaactactgagttcttcattatgtctgatggagattatgattacctcatcaagtttttagctttgggagactctggtgtagggaagaccagtgtactttaccaatatacagatggtaaatttaactccaaatttatcacaacagtgggcattgatttcagggaaaaaagagtggtgtacagagccagtgggccggatggagccactggcagaggccagagaatccacctgcagtt

SEQ ID NO: 173108 - DNA, 702 bp, Homo sapiens
  Payload ID: 14024
  Gene Symbol: RAB27A
  Gene Name: RAB27A, member RAS oncogene family
  ENST ID: ENST00000563262
  CDS Start-End: 417-702
cccgacgtggtggcctccttgcggtttcctttcgccgtttccgaaccgagggattgctactcgcctttggcttggcggtctctgtgctcgggggtccgaaaactgctggaaggcccccggtctctggaggggagcaggcggtagcgagtttagtgacgtggagcaggcgcagaacagtcggagatacagtctcgctgtgatgcccaggctggagtgcaatggcgtgattttggctcactgcaacctctcccacccaggttcaagtgattctcctgcctcagcctcccgagcagctgggattacagaacagaaacctggaaatctaaggctcaaagacatccaagtaattggtatctgggagatttgggattcaaacccagctctgcttgacttggtgaactactgagttcttcattatgtctgatggagattatgattacctcatcaagtttttagctttgggagactctggtgtagggaagaccagtgtactttaccaatatacagatggtaaatttaactccaaatttatcacaacagtgggcattgatttcagggaaaaaagagtggtgtacagagccagtgggccggatggagccactggcagaggccagagaatccacctgcagttatgggacacagcagggcaggagaggtttcgtagcttaacgacagcgttcttcagagatgctatgggttttc

SEQ ID NO: 173109 - DNA, 701 bp, Homo sapiens
  Payload ID: 14024
  Gene Symbol: RAB27A
  Gene Name: RAB27A, member RAS oncogene family
  ENST ID: ENST00000567380
  CDS Start-End: 262-701
gagaaaagcaaaggaggtgagtacgggacatgctggatttgagatgccagcaagatatctgggtggactcccttgtaggcagttttacttatgaaattggaggccagctgcaaggtctgacaaaaagtaaccttcctgaagaggacatgtgattggaagttgtcaattgttgaagcattggtaactccagtctctaacgttttagaaaatcataacaagcggttctctaccctgtaaaggtgaactactgagttcttcattatgtctgatggagattatgattacctcatcaagtttttagctttgggagactctggtgtagggaagaccagtgtactttaccaatatacagatggtaaatttaactccaaatttatcacaacagtgggcattgatttcagggaaaaaagagtggtgtacagagccagtgggccggatggagccactggcagaggccagagaatccacctgcagttatgggacacagcagggcaggagaggtttcgtagcttaacgacagcgttcttcagagatgctatgggttttcttctactttttgatctgacaaatgagcaaagtttcctcaatgtcagaaactggataagccagctacagatgcatgcatattgtgaaaacccagatatagtgctgtgtggaaacaagagtgatctggaggaccagagagtagtgaaagaggagga

SEQ ID NO: 173110 - DNA, 7281 bp, Homo sapiens
  Payload ID: 14025
  Gene Symbol: RAB27B
  Gene Name: RAB27B, member RAS oncogene family
  Uniprot ID: O00194
  ENST ID: ENST00000262094
  CDS Start-End: 522-1178
agcgccctgggctctttgaatgagagacatcaaagaaaacacagaacaaaaatgaataaaaatgagctcgctggtaaggctagaagccccacagtgtggagacttcatccccgagaggagtgtgtttctcactgcagcagttgagtcaccagcaagacttgcctgaggtgagctccgcacatccgcgttgggacttgcagacacgccttcttctcacacaaaccttacccagccccgccgccgcggcggactccgagggtggtgccaccagccctgccactcgcagtcctgacgggcaggggctgcggaccgcccggccttggacccatccggagccacaggttggaggagataagtagctgtccccgtgctcatcgccctgtggagcagatcctgtctccttgctgacggtggagcccgggagttccagggcttgggaaggggaaggaaacctctctgaaatctgacacctgctctcccggcaaggaaacttcgcaggctgaccgaccaagaccatcactatgaccgatggagactatgattatctgatcaaactcctggccctcggggattcaggggtggggaagacaacatttctttatagatacacagataataaattcaatcccaaattcatcactacagtaggaatagactttcgggaaaaacgtgtggtttataatgcacaaggaccgaatggatcttcagggaaagcatttaaagtgcatcttcagctttgggacactgcgggacaagagcggttccggagtctcaccactgcatttttcagagacgccatgggcttcttattaatgtttgacctcaccagtcaacagagcttcttaaatgtcagaaactggatgagccaactgcaagcaaatgcttattgtgaaaatccagatatagtattaattggcaacaaggcagacctaccagatcagagggaagtcaatgaacggcaagctcgggaactggctgacaaatatggcataccatattttgaaacaagtgcagcaactggacagaatgtggagaaagctgtagaaacccttttggacttaatcatgaagcgaatggaacagtgtgtggagaagacacaaatccctgatactgtcaatggtggaaattctggaaacttggatggggaaaagccaccagagaagaaatgtatctgctagactctacatagaaactgaacatcaagaaccccaccaaaatattacttttaaaaacaatgacaaaccacacaattgttgttgagtaaaccacgcacaatggcatgtctttctttttctgccagaaaatctattttaagaaaccagaatagtcaacagtgttcaaaagaattgactagttatccctgaggccctttcaaacatgatcaaagatttcccaatgtgatctcatcatcatggatactcaatttgttttttcttatagagaaaatgagtatataagacaatatacaagaagaaatatcagtgagttttaaatcagaacaagttacctgtcacattgaagaaaagggtaggcactaaagggagaacacagaaagaagaatttctaaaatattggatttacttcttatattgagtcagatgcatacttttagatttgcattggggaaaatgtactagctaaaaatggatacacaatgaagaattctatttggctaattaagaatgatatactatgtacacccaataagctgtactagaatgaataaattactgataaggttacaaataggtaaatgtcacacttctgttaaaatgcaggaggtagtgtcataatgccgtctttatattcttaataaatagcactttgacaagaacaggactgtaaatgatgaagtacaagacaaataccctgggaaaaaaaatgaaagtatgagaaattggcatttctacagctgaaattcaatgtatctgttagagatgtctggaagggttacttagccaaattttactcaagccaattaggagctgatattatcagttggaattaagagaactccagaggtttccatttcaaacaaaattttagaaattggtttggtgttcagcttcacatttcattttttcttagcacatgttgataaaatagtcacaaggagaaattaccagttacggtttattaaatctcttttaaaatgcagtcaaggaaaactagccttgaattttttttagataaaataagatggtgatatgaaacaaaaagtggcaattattgcaggtttccttttagtttacaaaagtactggaaactaaatcatatttcttccctccaaatttcacccattcctgactttgaatcaattgcagaaatgcaggtgtgttactttgttgatcaataactttggaacaattatggatcaattctatggtcactctgaattttcatgtcattaatcacataaaaattgataatacctcattctgtattacaatatgattttattttgccaaaggcaagacacctatagttgagctgtattttgggggattgggtgaggaaggacttctgatcttatctcaacaaaaaactggccagtatttttgttaatgtaaagcttccttttctttctaaaaaatagtaacaaaattatttttcattggcctattctgttcttgtgtctaaactaacattacattaatttttaatcttagtttctgataaacacaagccattcctatcaaaatattatttatttcagtcaattttaccaaataacaaagacaatatattttcgtttttttttattatgagcatatgattttttgacaggctgtttcctcgtcgtatagattttttccaatcaaacctactttttccatactctgtgcatattttttgtgaagttatacacattgaagaccctaaaaatcccagtccatcattcagcttacctctgcgaacttctatctggtattgaatcagtttcagaaacacagacagatccaaggaaatgtctctttataatgttcttaggatggactagacccataaatgtgccatgaatcaaaatattaataatttgaaagctttcatgctgttagcccctgatgaaattctcagcattaactggccagctcctctgatttctgcagcatcgcaacaggttcgaagatgggttgtggctgggtattccctcccatggtgtttcctctgggatgctcttcattatctcaatgcctgtgccatgaagatagaaaactgtaagctaacatttaagatgtttcttctggaaggaaagtgagcaggaacaagttatattgccactgctgtggcaaattttggtgaacttttggggtcattatatcaattttttctttggattcaaattgtaatgtcccctgcatttccttaatagggaatgtgaaacctttataaaactctaaaagtattctgttttgatatgtctttttgtttctattcattttcagttatatgattgatttacttatgccaagattctgtcactgtcagttatttaatgagtgttttttcagggtctgttttaagatcattatttgatagctgtagcatgaagcagaggttgatgatgcccataattgcaagactattcctgtaaaaataacaattattgggtaataacttcaagaggaatgagaagtgacaaaattgatttaaaatattgttctacttataaataaatgcttgatataaaaaattttctccataaagtttgacatctgaccccagattctatgtaatcattattagaaattccttctctcattatttcaggattagtagttctgtgtaattcattttacaatttcaaattgttctggtgccataaagtatacagactactttaaagatttccaaatcccctaatttaccccacaacagcatgtaattttagccaagatatgtcctgttactaagtatctcccaatgctttagtaaaacgtatttaggagaaatgttgaaaatgtacatgaagctcctttctgatatagaaaccatttctggagtatttacactggtttgatgtttacattgctctaactcggtgcctcagatacctctgtgaccaaatttgtctccaaccacatagctcatttcctataatgttatatcataggaagccctcacagagacactaacacagctaaagatcttctgatattatcagcaagggatgcaaggactttattggaatctggagagtttaactgccttctcttggtctcctcacttacttcttatgaagttggcattacctgagactcttagctgtgattaggtacaagcttaccttttagggtagaaaaagaaagatcatttgaaaaatgtatctaaaataatccagagaacataatgtttgtcttggtctgataatgataagaagtcaaggattggcagagaaaatactaaacgccaagagttgagcctgtgggtctctccataagagttttaaaactcttgccagttaccactttatccaatttgctatcattttcgtattatcagctatcgccctgtaaaatattcaaaactagctatttctaaagtaaacattttatctgttacttttaaccagataggtgtctttgtcatccttctactataaattgttctttgccaacctgtacaggtagatgaaccaggcgagagttttaatcagccttttcttgtcccctttgtaagaaagagatgcttgccatagagaaggacatgagtacattaaaaataatttaatagccacaatatgatgttctttaagctgcaaattgagtacactgggaatcaacaaatttgatgaagcctgtctgtctcttcaccagtggagtgagtgcagcagttagaaagagaagcaatattgtgcaactggtgcagtggtgagttaatcatagtgtataaccttgtgttcatgaaacaggttgttcattgttctgcatctctcttcatttaaaaaggatacacaattctttcctcattgcatattacaccaaacgtttgagggaaaaatcctcattcgtaaaggattttggatgtataatctaaaactcaacaataaagaaataatattccaagtctctggtttcctaagatacataataactgtttataaagaaggtctaagagctgatatttgccaaagtgatagaagagttgttttttcctctctactaccaagctttaagacattaaaagaagtctagtgtatttgaatattttagagaaagctttatcattttttaagatgccaagatgctgcctacgtttgcaaaagttgtctaagaattcaccatgagctatattttcttctggatctttgaccaaggtgatgtcagcttatttctggggaaggtgttgagctcttatacatgaaaatggatataggctattctctgggatgagtgtcatttcaatgctttataaatccatgaagctgcttgtctcataaagtagaactgatacaaattttggttggatatatagagaattttataaatgtattgccttagaatttctgggtggagacccaactacaatgacattgtcatgccagaactataaagataattagagttaaaagttgtttaaattgtgcccttaaatacagcagaacctggagaaggtcatacttcaaaggtcgattttgagtccgaataaagaaagacctagtaacagatagtttttttttgttcattttcttctaccaagtagaggtttatgccctcagaactaaactagtaaaaatatctgaacaaaaaacctttcgttgttggcataaaaatgtgatacacttagagacattttgtttattgcatataaatctaatttttccataaattagatttatgatattttcataaagcacttgattagtttttcaaggcgtaccatcacaaagatgctttcctgcagagttctttgtatcaacagcctatggttgagatgttttctcatttcctgtagagagagaataccactaacaaacaaacaaaaactttagtgccaaaatagtggaactattttgtcatcttttgagaaaaaaatatacaaagaagtcatcttttcattaagtggattccctggttcctttccagctggttgtggaagtaatggctaacatccttcagctgactttgtctacaaggattattagcaaattctgtaggagcaagcatgtctgaccttaacttaatggatcccttattcaatcagtggcttctgtctttatgtctgttggcatatcaaaatggtttctgttcctagaaaagtaataacatatgcttatctttattctttttccaggtgattttgttttcaaatgctccttgtgaaaacacctagtgttgtagaaaggaaagtggccagaaagaacaacttgggaccatgagtaggtcattaaatagcttagtgatttatcctcatatagggcttataaaccctgtatgtgtttatatgtgcttcacagagttcgtgtcaggctcaaaggagatatgtataagaaagtggtttgtaaattatgttccatttcataaatagacactattcacaaactaaaatctaataaaaaaccacagttgtaatttaaactgcttgatataaaaagaggtatcatagcagggaaaacacactaattttcatacagtagaggtattgaaaactgaaaatgggaaggcaacttgaagtcattgtatttgattgaaaatgtttaatacatctcattattgacaaaatatgtcatcttgtatttatttcaaggaaaccaatgaattctaggtagtatattacaagttggtcaaaatattccatgtacaaatagggcttctgtgtccatagccttgtaagagatactgattgtatctgaaattattttttaaaaaaataaattatcctgctttagttagtgtgttaaaagtagacgatgttctaatataacactgaagtgcttcattgtatcccaacagtttaccttcaagtaatattatctttatttttaggctaagcacgtttgattattttgtctgtctcctatatagatctgttttgtctagtgctatgaatgtaacttaaaactataaacttgaagtttttattctatatgccccttaatagactgtggttcctgacgcacactgttaggtcattattttgttgtaccaaagttctagtggcttcagaaatcatagcatccaatgattttttggtgtctggctatgaatactatggttgagaattgtattcagtgattgtttctgcacacttttcaaataaaaaatgaatttttatcaatta

SEQ ID NO: 173111 - DNA, 423 bp, Homo sapiens
  Payload ID: 14025
  Gene Symbol: RAB27B
  Gene Name: RAB27B, member RAS oncogene family
  ENST ID: ENST00000592334
  CDS Start-End: 1-394
tttcagagacgccatgggcttcttattaatgtttgacctcaccagtcaacagagcttcttaaatgtcagaaactggatgagccaactgcaagcaaatgcttattgtgaaaatccagatatagtattaattggcaacaaggcagacctaccagatcagagggaagtcaatgaacggcaagctcgggaactggctgacaaatatggctgcaaattgagtacactgggaatcaacaaatttgatgaagcctgtctgtctcttcaccagtggagttgttcattgttctgcatctctcttcatttaaaaaggatacacaattctttcctcattgcatattacaccaaacgtttgagggaaaaatcctcattcgtaaaggattttggatgtataatctaaaactcaacaataaagaaataatattccaa

SEQ ID NO: 173112 - DNA, 432 bp, Homo sapiens
  Payload ID: 14025
  Gene Symbol: RAB27B
  Gene Name: RAB27B, member RAS oncogene family
  ENST ID: ENST00000586570
  CDS Start-End: 171-432
tttgctgttacacaggaagagagcaggcagcatcagtatcggctcagcatccttcccccttctgttcgattagaagctgatcgaagcaacagtgccataaagaaatgggctagatatttccagaggctgcaatctggaggcgtttggaggtaccgaccaagaccatcactatgaccgatggagactatgattatctgatcaaactcctggccctcggggattcaggggtggggaagacaacatttctttatagatacacagataataaattcaatcccaaattcatcactacagtaggaatagactttcgggaaaaacgtgtggtttataatgcacaaggaccgaatggatcttcagggaaagcatttaaagtgcatcttcagctttgggacactgcgggacaagagcggttccggagtctcaccactgcat

SEQ ID NO: 173113 - DNA, 1810 bp, Homo sapiens
  Payload ID: 14026
  Gene Symbol: RAB28
  Gene Name: RAB28, member RAS oncogene family
  Uniprot ID: P51157
  ENST ID: ENST00000288723
  CDS Start-End: 216-878
gtgcgcgtagggggcggggccgcgcgcagagggcggggaggtgggcaagatggcgcttgccgagtgattctcctcgaatacctcctgccggcgcggagacaccggggcgggggtcctgccgcaactacctcccttcctcctctcccccgcccccggagccttcatccttcccttccccccccacctcgaggggcgggcctggttcccgggacaccatgtcggactctgaggaggagagccaggaccggcaactgaaaatcgtcgtgctgggggacggcgcctccgggaagacctccttaactacgtgttttgctcaagaaacttttgggaaacagtacaaacaaactataggactggatttctttttgagaaggataacattgccaggaaacttgaatgttacccttcaaatttgggatataggagggcagacaataggaggcaaaatgttggataaatatatctatggagcacagggagtcctcttggtatatgatattacaaattatcaaagctttgagaatttagaagattggtatactgtggtgaagaaagtgagcgaggagtcagaaactcagccactggttgccttggtaggcaataaaattgatttggagcatatgcgaacaataaaacctgaaaaacacttacggttttgccaggaaaatggttttagtagccactttgtctcagccaagacaggagactctgtcttcctgtgctttcagaaagttgctgctgaaatccttgggatcaaattaaacaaagcagaaatagaacagtcacagcgtattgtcagggcagaaatagtgaagtacccggaagaagaaaatcaacataccacctctactcagagtagaatctgttcagtacagtagtgcagagggtggtgaaggcagatattgtaaactacaaccaggaacctatgtcaaggactgttaaccctcctagaagctctatgtgtgcagttcagtgagcgcatttttcttttgtgttgatagttctggctgcccttcacctctgggtgggcccgaggacttctaggaacttgttttatcagtgaccatctctgtagttcagttaacactttactcccaacttgcttcatcattgctattgcctcacagtggcaggcagctccttggatttgaaagaattcaactttgggaccacacactttgaattcaaaatggaaaacccattccctggaattagactgcttcattgcaaaagaatgatgttgtttctttgtatgtccttgcttcttttttcattgatgtaaatttttttaacttaatatgaaaactctccaagtcttgatcatcagccaggattttgccacagcaatttcattctcttatcggaacttgtatgtgtcaaagtatacttcagagtgcaaacattaagcaagtaatatattttacctacagatacttatgaagacattctttcgctatcgtgagtaaaagtatataaagctgtttctaactgaaaatgcttgaaataagcctgtaatagaaatattttttcattttttaaaaaagggcctaaattgtttatattgtagtttgtaactcacaaagtaatatttgatattgtatttttattactgtatcgttgtcgttatgtattgtgtaatactcaggtttgaaggctttctgaattctgataaatgttcagctgatgctccacgtggaatttctcttgcaaactgcataagagtactcccgagaatgagttatgacattgtggatcagactgtacctgatgttcagatgtttttctttcacaaataaacttatttaaatta

SEQ ID NO: 173114 - DNA, 1715 bp, Homo sapiens
  Payload ID: 14026
  Gene Symbol: RAB28
  Gene Name: RAB28, member RAS oncogene family
  Uniprot ID: P51157
  ENST ID: ENST00000330852
  CDS Start-End: 216-881
gtgcgcgtagggggcggggccgcgcgcagagggcggggaggtgggcaagatggcgcttgccgagtgattctcctcgaatacctcctgccggcgcggagacaccggggcgggggtcctgccgcaactacctcccttcctcctctcccccgcccccggagccttcatccttcccttccccccccacctcgaggggcgggcctggttcccgggacaccatgtcggactctgaggaggagagccaggaccggcaactgaaaatcgtcgtgctgggggacggcgcctccgggaagacctccttaactacgtgttttgctcaagaaacttttgggaaacagtacaaacaaactataggactggatttctttttgagaaggataacattgccaggaaacttgaatgttacccttcaaatttgggatataggagggcagacaataggaggcaaaatgttggataaatatatctatggagcacagggagtcctcttggtatatgatattacaaattatcaaagctttgagaatttagaagattggtatactgtggtgaagaaagtgagcgaggagtcagaaactcagccactggttgccttggtaggcaataaaattgatttggagcatatgcgaacaataaaacctgaaaaacacttacggttttgccaggaaaatggttttagtagccactttgtctcagccaagacaggagactctgtcttcctgtgctttcagaaagttgctgctgaaatccttgggatcaaattaaacaaagcagaaatagaacagtcacagagggtggtgaaggcagatattgtaaactacaaccaggaacctatgtcaaggactgttaaccctcctagaagctctatgtgtgcagttcagtgagcgcatttttcttttgtgttgatagttctggctgcccttcacctctgggtgggcccgaggacttctaggaacttgttttatcagtgaccatctctgtagttcagttaacactttactcccaacttgcttcatcattgctattgcctcacagtggcaggcagctccttggatttgaaagaattcaactttgggaccacacactttgaattcaaaatggaaaacccattccctggaattagactgcttcattgcaaaagaatgatgttgtttctttgtatgtccttgcttcttttttcattgatgtaaatttttttaacttaatatgaaaactctccaagtcttgatcatcagccaggattttgccacagcaatttcattctcttatcggaacttgtatgtgtcaaagtatacttcagagtgcaaacattaagcaagtaatatattttacctacagatacttatgaagacattctttcgctatcgtgagtaaaagtatataaagctgtttctaactgaaaatgcttgaaataagcctgtaatagaaatattttttcattttttaaaaaagggcctaaattgtttatattgtagtttgtaactcacaaagtaatatttgatattgtatttttattactgtatcgttgtcgttatgtattgtgtaatactcaggtttgaaggctttctgaattctgataaatgttcagctgatgctccacgtggaatttctcttgcaaactgcataagagtactcccgagaatgagttatgacattgtggatcagactgtacctgatgttcagatgtttttctttcacaaataaacttatttaaatta

SEQ ID NO: 173115 - DNA, 1787 bp, Homo sapiens
  Payload ID: 14026
  Gene Symbol: RAB28
  Gene Name: RAB28, member RAS oncogene family
  Uniprot ID: P51157
  ENST ID: ENST00000338176
  CDS Start-End: 216-830
gtgcgcgtagggggcggggccgcgcgcagagggcggggaggtgggcaagatggcgcttgccgagtgattctcctcgaatacctcctgccggcgcggagacaccggggcgggggtcctgccgcaactacctcccttcctcctctcccccgcccccggagccttcatccttcccttccccccccacctcgaggggcgggcctggttcccgggacaccatgtcggactctgaggaggagagccaggaccggcaactgaaaatcgtcgtgctgggggacggcgcctccgggaagacctccttaactacgtgttttgctcaagaaacttttgggaaacagtacaaacaaactataggactggatttctttttgagaaggataacattgccaggaaacttgaatgttacccttcaaatttgggatataggagggcagacaataggaggcaaaatgttggataaatatatctatggagcacagggagtcctcttggtatatgatattacaaattatcaaagctttgagaatttagaagattggtatactgtggtgaagaaagtgagcgaggagtcagaaactcagccactggttgccttggtaggcaataaaattgatttggagcatatgcgaacaataaaacctgaaaaacacttacggttttgccaggaaaatggttttagtagccactttgtctcagccaagacaggagactctgtcttcctgtgctttcagaaagttgctgctgaaatccttgggatcaaattaaacaaagcagaaatagaacagtcacagggccatttcattattttcatttcatcaactaatagagaataatcgagtgtgctttgtggctctaaaaataaagagggtggtgaaggcagatattgtaaactacaaccaggaacctatgtcaaggactgttaaccctcctagaagctctatgtgtgcagttcagtgagcgcatttttcttttgtgttgatagttctggctgcccttcacctctgggtgggcccgaggacttctaggaacttgttttatcagtgaccatctctgtagttcagttaacactttactcccaacttgcttcatcattgctattgcctcacagtggcaggcagctccttggatttgaaagaattcaactttgggaccacacactttgaattcaaaatggaaaacccattccctggaattagactgcttcattgcaaaagaatgatgttgtttctttgtatgtccttgcttcttttttcattgatgtaaatttttttaacttaatatgaaaactctccaagtcttgatcatcagccaggattttgccacagcaatttcattctcttatcggaacttgtatgtgtcaaagtatacttcagagtgcaaacattaagcaagtaatatattttacctacagatacttatgaagacattctttcgctatcgtgagtaaaagtatataaagctgtttctaactgaaaatgcttgaaataagcctgtaatagaaatattttttcattttttaaaaaagggcctaaattgtttatattgtagtttgtaactcacaaagtaatatttgatattgtatttttattactgtatcgttgtcgttatgtattgtgtaatactcaggtttgaaggctttctgaattctgataaatgttcagctgatgctccacgtggaatttctcttgcaaactgcataagagtactcccgagaatgagttatgacattgtggatcagactgtacctgatgttcagatgtttttctttcacaaataaacttatttaaatt

SEQ ID NO: 173116 - DNA, 405 bp, Homo sapiens
  Payload ID: 14026
  Gene Symbol: RAB28
  Gene Name: RAB28, member RAS oncogene family
  ENST ID: ENST00000504644
  CDS Start-End: 1-224
ttgatttggagcatatgcgaacaataaaacctgaaaaacacttacggttttgccaggaaaatggttttagtagccactttgtctcagccaagacaggagactctgtcttcctgtgctttcagaaagttgctgctgaaatccttgggatcaaattaaacaaagcagaaatagaacagtcacagggccatttcattattttcatttcatcaactaatagagaataatcgagtgtgctttgtggctctaaaaataaagagggtggtgaaggcagatattgtaaactacaaccaggaacctatgtcaaggactgttaaccctcctagaagctctatgtgtgcagttcagtgagcgcatttttcttttgtgttgatagttctggctgcccttcacctctgggtgggcccg

SEQ ID NO: 173117 - DNA, 1551 bp, Homo sapiens
  Payload ID: 14026
  Gene Symbol: RAB28
  Gene Name: RAB28, member RAS oncogene family
  ENST ID: ENST00000508274
  CDS Start-End: 182-469
ggggaggtgggcaagatggcgcttgccgagtgattctcctcgaatacctcctgccggcgcggagacaccggggcgggggtcctgccgcaactacctcccttcctcctctcccccgcccccggagccttcatccttcccttccccccccacctcgaggggcgggcctggttcccgggacaccatgtcggactctgaggaggagagccaggaccggcaactgaaaatcgtcgtgctgggggacggcgcctccgggaagacctccttaactacgtgttttgctcaagaaacttttgggaaacagtacaaacaaactataggactggatttctttttgagaaggataacattgccaggaaacttgaatgttacccttcaaatttgggatataggagggcagacaataggaggcaaaatgttggataaatatatctatggagcacagttgatttggagcatatgcgaacaataaaacctgaaaaacacttacggttttgccaggaaaatggttttagtagccactttgtctcagccaagacaggagactctgtcttcctgtgctttcagaaagttgctgctgaaatccttgggatcaaattaaacaaagcagaaatagaacagtcacagagggtggtgaaggcagatattgtaaactacaaccaggaacctatgtcaaggactgttaaccctcctagaagctctatgtgtgcagttcagtgagcgcatttttcttttgtgttgatagttctggctgcccttcacctctgggtgggcccgaggacttctaggaacttgttttatcagtgaccatctctgtagttcagttaacactttactcccaacttgcttcatcattgctattgcctcacagtggcaggcagctccttggatttgaaagaattcaactttgggaccacacactttgaattcaaaatggaaaacccattccctggaattagactgcttcattgcaaaagaatgatgttgtttctttgtatgtccttgcttcttttttcattgatgtaaatttttttaacttaatatgaaaactctccaagtcttgatcatcagccaggattttgccacagcaatttcattctcttatcggaacttgtatgtgtcaaagtatacttcagagtgcaaacattaagcaagtaatatattttacctacagatacttatgaagacattctttcgctatcgtgagtaaaagtatataaagctgtttctaactgaaaatgcttgaaataagcctgtaatagaaatattttttcattttttaaaaaagggcctaaattgtttatattgtagtttgtaactcacaaagtaatatttgatattgtatttttattactgtatcgttgtcgttatgtattgtgtaatactcaggtttgaaggctttctgaattctgataaatgttcagctgatgctccacgtggaatttctcttgcaaactgcataagagtactcccgagaatgagttatgacattgtggatcagactgtacctgatgttcagatgtttttctttcacaaataaacttatttaaatta

SEQ ID NO: 173118 - DNA, 193 bp, Homo sapiens
  Payload ID: 14026
  Gene Symbol: RAB28
  Gene Name: RAB28, member RAS oncogene family
  ENST ID: ENST00000510528
  CDS Start-End: 1-155
cacagggagtcctcttggtatatgatattacaaattatcaaagctttgagaatttagaagattggtatactgtggtgaagaaagtgagcgaggagtcagaaactcagccactggttgccttggtaggcaataaaagaaagcagcatggattatgaagaacagcaacacagctgcagattttatgatattgcat

SEQ ID NO: 173119 - DNA, 715 bp, Homo sapiens
  Payload ID: 14026
  Gene Symbol: RAB28
  Gene Name: RAB28, member RAS oncogene family
  ENST ID: ENST00000511649
  CDS Start-End: 1-430
gttggataaatatatctatggagcacagggagtcctcttggtatatgatattacaaattatcaaagctttgagaatttagaagattggtatactgtggtgaagaaagtgagcgaggagtcagaaactcagccactggttgccttggtaggcaataaaattgatttggagcatatgcgaacaataaaacctgaaaaacacttacggttttgccaggaaaatggttttagtagccactttgtctcagccaagacaggagactctgtcttcctgtgctttcagaaagttgctgctgaaatccttgggatcaaattaaacaaagcagaaatagaacagtcacagcgtattgtcagggcagaaatagtgaagtacccggaagaagaaaatcaacataccacctctactcagagtagaatctgttcagtacagtagtgcagatgaggaaaatgaggctcagagcaactgaatagcccatctgaggttgtgaactggtgagtgatgggaaagggatgcaaatccaggtctgcctgacttctcacccatcacgttatacgcctcatgctgcagtgaccctctgtcaggttcagagtaagtgcttattacacagtttcaagtgaacgaacaaactgttttcatgactgaatatataaatctgttacacaagtatatatttagaaaaggagcccataaaaataaagaatgaatattttcaatctc

SEQ ID NO: 173120 - DNA, 1679 bp, Homo sapiens
  Payload ID: 14026
  Gene Symbol: RAB28
  Gene Name: RAB28, member RAS oncogene family
  ENST ID: ENST00000630951
  CDS Start-End: 216-503
gtgcgcgtagggggcggggccgcgcgcagagggcggggaggtgggcaagatggcgcttgccgagtgattctcctcgaatacctcctgccggcgcggagacaccggggcgggggtcctgccgcaactacctcccttcctcctctcccccgcccccggagccttcatccttcccttccccccccacctcgaggggcgggcctggttcccgggacaccatgtcggactctgaggaggagagccaggaccggcaactgaaaatcgtcgtgctgggggacggcgcctccgggaagacctccttaactacgtgttttgctcaagaaacttttgggaaacagtacaaacaaactataggactggatttctttttgagaaggataacattgccaggaaacttgaatgttacccttcaaatttgggatataggagggcagacaataggaggcaaaatgttggataaatatatctatggagcacagttgatttggagcatatgcgaacaataaaacctgaaaaacacttacggttttgccaggaaaatggttttagtagccactttgtctcagccaagacaggagactctgtcttcctgtgctttcagaaagttgctgctgaaatccttgggatcaaattaaacaaagcagaaatagaacagtcacagcgtattgtcagggcagaaatagtgaagtacccggaagaagaaaatcaacataccacctctactcagagtagaatctgttcagtacagtagtgcagagggtggtgaaggcagatattgtaaactacaaccaggaacctatgtcaaggactgttaaccctcctagaagctctatgtgtgcagttcagtgagcgcatttttcttttgtgttgatagttctggctgcccttcacctctgggtgggcccgaggacttctaggaacttgttttatcagtgaccatctctgtagttcagttaacactttactcccaacttgcttcatcattgctattgcctcacagtggcaggcagctccttggatttgaaagaattcaactttgggaccacacactttgaattcaaaatggaaaacccattccctggaattagactgcttcattgcaaaagaatgatgttgtttctttgtatgtccttgcttcttttttcattgatgtaaatttttttaacttaatatgaaaactctccaagtcttgatcatcagccaggattttgccacagcaatttcattctcttatcggaacttgtatgtgtcaaagtatacttcagagtgcaaacattaagcaagtaatatattttacctacagatacttatgaagacattctttcgctatcgtgagtaaaagtatataaagctgtttctaactgaaaatgcttgaaataagcctgtaatagaaatattttttcattttttaaaaaagggcctaaattgtttatattgtagtttgtaactcacaaagtaatatttgatattgtatttttattactgtatcgttgtcgttatgtattgtgtaatactcaggtttgaaggctttctgaattctgataaatgttcagctgatgctccacgtggaatttctcttgcaaactgcataagagtactcccgagaatgagttatgacattgtggatcagactgtacctgatgttcagatgtttttctttcacaaataaacttatttaaatt

SEQ ID NO: 173121 - DNA, 1723 bp, Homo sapiens
  Payload ID: 14027
  Gene Symbol: RAB29
  Gene Name: RAB29, member RAS oncogene family
  Uniprot ID: O14966
  ENST ID: ENST00000235932
  CDS Start-End: 207-818
ggaggaaggggagagagaggcgcgcgggagggcgtctagggaatcgaggtgccggctgctccttcctcacaatttgcccagacaggcggtgggtgggaatgcctcacttcagtttgaagagggtccggatccaaaggggttaaaacgagcgacccccgatccccgaccacacttcccgcctccctaaaacgcacaccccgctagccatgggcagccgcgaccacctgttcaaagtgctggtggtgggggacgccgcagtgggcaagacgtcgctggtgcagcgatattcccaggacagcttcagcaaacactacaagtccacggtgggagtggattttgctctgaaggttctccagtggtctgactacgagatagtgcggcttcagctgtgggatattgcagggcaggagcgcttcacctctatgacacgattgtattatcgggatgcctctgcctgtgttattatgtttgacgttaccaatgccactaccttcagcaacagccagaggtggaaacaggacctagacagcaagctcacactacccaatggagagccggtgccctgcctgctcttggccaacaagtgtgatctgtccccttgggcagtgagccgggaccagattgaccggttcagtaaagagaacggtttcacaggttggacagaaacatcagtcaaggagaacaaaaatattaatgaggctatgagagtcctcattgaaaagatgatgagaaattccacagaagatatcatgtctttgtccacccaaggggactacatcaatctacaaaccaagtcctccagctggtcctgctgctagtagtgtttggcttattttccatcccagttctgggaggtcttttaagtctcttccctttggttgcccacctgacaattttattaagtacatttgaattgtctcctgactactgtccagtaaggaggcccattgtcacttagaaaagacacctggaacccatgtgcatttctgcatctcctggattagcctttcacatgttgctggctcacattagtgccagttagtgccttcggtgtaagatcttctcatcagccctcaatttgtgatccggaattttatgagaaggattagaaatcagcacctgcgttttagagatcataattctcacctacttctgagcttatttttccatttgatattcattgatatcatgacttccaattgagaggaaaatgagatcaaatgtcatttcccaaatttcttgtaggccgttgtttcagattctttctgtcttggaatgtaaacatctgattctggaatgcagaaggagggggtctgggcatctgtggatttttggctactagaagtgtcccagaagtcactgtatttttgaaacttctaacgtcataattaagtttctcttgtcttggcatcaagaatagtcaagttttttggccgggcatggtggctcatgcctgtaatcccagcacttggggaggccaaggcaggcggatcacatgaggccaggaattcgagaccaacctggtcagcatggcaaaaccccgtctctactaaaagtacaaaaattagccaggcgtgatggcacgtgtctgtaatcccagctactctggagactgaggtgggagaatcgcttgagactgggaggcagaggttgcagtgaaccgagatcatgccaccgcacttcagcctgggtgacagagaaggactccgtctcaaaaaaaaaa

SEQ ID NO: 173122 - DNA, 3272 bp, Homo sapiens
  Payload ID: 14027
  Gene Symbol: RAB29
  Gene Name: RAB29, member RAS oncogene family
  Uniprot ID: O14966
  ENST ID: ENST00000367139
  CDS Start-End: 305-916
ggaaggggagagagaggcgcgcgggagggcgtctagggaatcgaggtgccggctgctccttcctcacaatttggtttgtgctgcaaggggagggtccccatcatctggccccagtggtgtaaggagctgactgggattcagtcactgacttggagccgctcgggggaagtcccgcccagacaggcggtgggtgggaatgcctcacttcagtttgaagagggtccggatccaaaggggttaaaacgagcgacccccgatccccgaccacacttcccgcctccctaaaacgcacaccccgctagccatgggcagccgcgaccacctgttcaaagtgctggtggtgggggacgccgcagtgggcaagacgtcgctggtgcagcgatattcccaggacagcttcagcaaacactacaagtccacggtgggagtggattttgctctgaaggttctccagtggtctgactacgagatagtgcggcttcagctgtgggatattgcagggcaggagcgcttcacctctatgacacgattgtattatcgggatgcctctgcctgtgttattatgtttgacgttaccaatgccactaccttcagcaacagccagaggtggaaacaggacctagacagcaagctcacactacccaatggagagccggtgccctgcctgctcttggccaacaagtgtgatctgtccccttgggcagtgagccgggaccagattgaccggttcagtaaagagaacggtttcacaggttggacagaaacatcagtcaaggagaacaaaaatattaatgaggctatgagagtcctcattgaaaagatgatgagaaattccacagaagatatcatgtctttgtccacccaaggggactacatcaatctacaaaccaagtcctccagctggtcctgctgctagtagtgtttggcttattttccatcccagttctgggaggtcttttaagtctcttccctttggttgcccacctgacaattttattaagtacatttgaattgtctcctgactactgtccagtaaggaggcccattgtcacttagaaaagacacctggaacccatgtgcatttctgcatctcctggattagcctttcacatgttgctggctcacattagtgccagttagtgccttcggtgtaagatcttctcatcagccctcaatttgtgatccggaattttatgagaaggattagaaatcagcacctgcgttttagagatcataattctcacctacttctgagcttatttttccatttgatattcattgatatcatgacttccaattgagaggaaaatgagatcaaatgtcatttcccaaatttcttgtaggccgttgtttcagattctttctgtcttggaatgtaaacatctgattctggaatgcagaaggagggggtctgggcatctgtggatttttggctactagaagtgtcccagaagtcactgtatttttgaaacttctaacgtcataattaagtttctcttgtcttggcatcaagaatagtcaagttttttggccgggcatggtggctcatgcctgtaatcccagcacttggggaggccaaggcaggcggatcacatgaggccaggaattcgagaccaacctggtcagcatggcaaaaccccgtctctactaaaagtacaaaaattagccaggcgtgatggcacgtgtctgtaatcccagctactctggagactgaggtgggagaatcgcttgagactgggaggcagaggttgcagtgaaccgagatcatgccaccgcacttcagcctgggtgacagagaaggactccgtctcaaaaaaaaaagaaaaaagaatagtcatttttaaactacctatctcatgcaatgaaagcattttcttccacaaagagcttaatcctcatgataggattgcctagtgtctcccatttgcaggtttctgggttgatgtcttaatgcataatactgcaagtgacatcagctggctgtgatgcttcgaaataggtctgctcctcacagctttgggaatctgaatggaagaagaaaagagagaagttaacaacctccactggggcaactttgtgaacacgtaggcacttagtcataggaaacatattatgtgcaggtcctagcctgggggaggaaagtagatagacagaaaatcattaggtaatttaagtactaaattgggcagggctttttagtatcaaatcactactagaccatttaatttgttaaattatctctaggatggtgatttataacctacccaaagttatcgatattcttactaaactctgaggcctgaagttctgtgatagaccttaaataagtgtcctaagtcagtggttcccaaatctggctggtcgggaatacctgggaagtttgttaaaattttttaaaaatgttttaagatttttgggtcctgagccagccgtggtggctcacacctgtaatcccagcactttgggaggctgaggcaggtggatcgcctgaggtcaggagttcaagatcaacctggccaacatactgaaaccccgtctctactaaaaataagaaaaattagctgggcgtggtggcgggcacctgtaatcccagctacttgggagactgaggcaggagaatcgcttgaacctgggagttagaggttgcagtgagctgagatcacaccattgcgcttcagcctgggcaacaagagtgaaactccatctccaaaaaaaaaaaacaaaaagaaaaagatttttgggtcccgacctcaaacctactgaatcagaatttctagggatgaagcctaggaatgtgttgttgttttcagagcttccctggtgattgtgataagcctggtttggaaaccattgctggagaactttgtaaagatacagagacccagaccttttgtatttacatttaaatacaaatacaaatcctgggtttctatatattctgttagcttttcaggtgattctgctacacagacgttgaaaaccactgccctaagaaagagatcagaggccacatatcagagagaaaagggaccaaaccttcggtggtttgttgtgtgtcgttttaatgccaattattttaacttgcacagtcttctgaaaccttgtattaatagttctcttttgtattaccattttcaggtagggttttgatcactatgattctgaagataatagtgaaatagtgaatttcattgatatgaagagataattgattttcattcattggtttgaacacctgcaaaatcacaaataaatgagaactaagtcttgta

SEQ ID NO: 173123 - DNA, 1441 bp, Homo sapiens
  Payload ID: 14027
  Gene Symbol: RAB29
  Gene Name: RAB29, member RAS oncogene family
  Uniprot ID: O14966
  ENST ID: ENST00000446390
  CDS Start-End: 278-817
agtcaggccaggagggggtggggaaggtgcgaacagccgggggctcggagctcgcgccctgcgccccacccaggttgcggccgcccggggaggaagcgcgtataggttgagtgcaaagtttccttttttgctttctcgtcagagcagcccagacaggcggtgggtgggaatgcctcacttcagtttgaagagggtccggatccaaaggggttaaaacgagcgacccccgatccccgaccacacttcccgcctccctaaaacgcacaccccgctagccatgggcagccgcgaccacctgttcaaagtgctggtggtgggggacgccgcagtgggcaagacgtcgctggtgcagcgatattcccaggacagcttcagcaaacactacaagtccacggtgggagggcaggagcgcttcacctctatgacacgattgtattatcgggatgcctctgcctgtgttattatgtttgacgttaccaatgccactaccttcagcaacagccagaggtggaaacaggacctagacagcaagctcacactacccaatggagagccggtgccctgcctgctcttggccaacaagtgtgatctgtccccttgggcagtgagccgggaccagattgaccggttcagtaaagagaacggtttcacaggttggacagaaacatcagtcaaggagaacaaaaatattaatgaggctatgagagtcctcattgaaaagatgatgagaaattccacagaagatatcatgtctttgtccacccaaggggactacatcaatctacaaaccaagtcctccagctggtcctgctgctagtagtgtttggcttattttccatcccagttctgggaggtcttttaagtctcttccctttggttgcccacctgacaattttattaagtacatttgaattgtctcctgactactgtccagtaaggaggcccattgtcacttagaaaagacacctggaacccatgtgcatttctgcatctcctggattagcctttcacatgttgctggctcacattagtgccagttagtgccttcggtgtaagatcttctcatcagccctcaatttgtgatccggaattttatgagaaggattagaaatcagcacctgcgttttagagatcataattctcacctacttctgagcttatttttccatttgatattcattgatatcatgacttccaattgagaggaaaatgagatcaaatgtcatttcccaaatttcttgtaggccgttgtttcagattctttctgtcttggaatgtaaacatctgattctggaatgcagaaggagggggtctgggcatctgtggatttttggctactagaagtgtcccagaagtcactgtatttttgaaacttctaacgtcataattaagtttctcttgtcttggcatcaagaatagtcaagttttttggccgggcatg

SEQ ID NO: 173124 - DNA, 1157 bp, Homo sapiens
  Payload ID: 14027
  Gene Symbol: RAB29
  Gene Name: RAB29, member RAS oncogene family
  Uniprot ID: O14966
  ENST ID: ENST00000414729
  CDS Start-End: 504-1115
tgacgcttgcggaggaaggggagagagaggcgcgcgggagggcgtctagggaatcgaggtgccggctgctccttcctcacaatttggtttgtgctgcaaggggagggtccccatcatctggccccagtggtgtaaggagctgactgggattcagtcactgacttggagccgctcgggggaagtcccggtgggtgaggttccgcggcgcctggtccagtttctcggcagtcaggccaggagggggtggggaaggtgcgaacagccgggggctcggagctcgcgccctgcgccccacccaggttgcggccgcccggggaggaagcgcgtataggttgagtgcaaagtttccttttttgctttctcgtcagagcagcccagacaggcggtgggtgggaatgcctcacttcagtttgaagagggtccggatccaaaggggttaaaacgagcgacccccgatccccgaccacacttcccgcctccctaaaacgcacaccccgctagccatgggcagccgcgaccacctgttcaaagtgctggtggtgggggacgccgcagtgggcaagacgtcgctggtgcagcgatattcccaggacagcttcagcaaacactacaagtccacggtgggagtggattttgctctgaaggttctccagtggtctgactacgagatagtgcggcttcagctgtgggatattgcagggcaggagcgcttcacctctatgacacgattgtattatcgggatgcctctgcctgtgttattatgtttgacgttaccaatgccactaccttcagcaacagccagaggtggaaacaggacctagacagcaagctcacactacccaatggagagccggtgccctgcctgctcttggccaacaagtgtgatctgtccccttgggcagtgagccgggaccagattgaccggttcagtaaagagaacggtttcacaggttggacagaaacatcagtcaaggagaacaaaaatattaatgaggctatgagagtcctcattgaaaagatgatgagaaattccacagaagatatcatgtctttgtccacccaaggggactacatcaatctacaaaccaagtcctccagctggtcctgctgctagtagtgtttggcttattttccatcccagttctgggaggtcttt

SEQ ID NO: 173125 - DNA, 1306 bp, Homo sapiens
  Payload ID: 14027
  Gene Symbol: RAB29
  Gene Name: RAB29, member RAS oncogene family
  Uniprot ID: O14966
  ENST ID: ENST00000437324
  CDS Start-End: 272-667
gcggaggaaggggagagagaggcgcgcgggagggcgtctagggaatcgaggtgccggctgctccttcctcacaatttggtttgtgctgcaaggggagggtccccatcatctggccccagtggtgtaaggagctgactgggattcagtcactgacttggagccgctcgggggaagtcccgtggattttgctctgaaggttctccagtggtctgactacgagatagtgcggcttcagctgtgggatattgcagggcaggagcgcttcacctctatgacacgattgtattatcgggatgcctctgcctgtgttattatgtttgacgttaccaatgccactaccttcagcaacagccagaggtggaaacaggacctagacagcaagctcacactacccaatggagagccggtgccctgcctgctcttggccaacaagtgtgatctgtccccttgggcagtgagccgggaccagattgaccggttcagtaaagagaacggtttcacaggttggacagaaacatcagtcaaggagaacaaaaatattaatgaggctatgagagtcctcattgaaaagatgatgagaaattccacagaagatatcatgtctttgtccacccaaggggactacatcaatctacaaaccaagtcctccagctggtcctgctgctagtagtgtttggcttattttccatcccagttctgggaggtcttttaagtctcttccctttggttgcccacctgacaattttattaagtacatttgaattgtctcctgactactgtccagtaaggaggcccattgtcacttagaaaagacacctggaacccatgtgcatttctgcatctcctggattagcctttcacatgttgctggctcacattagtgccagttagtgccttcggtgtaagatcttctcatcagccctcaatttgtgatccggaattttatgagaaggattagaaatcagcacctgcgttttagagatcataattctcacctacttctgagcttatttttccatttgatattcattgatatcatgacttccaattgagaggaaaatgagatcaaatgtcatttcccaaatttcttgtaggccgttgtttcagattctttctgtcttggaatgtaaacatctgattctggaatgcagaaggagggggtctgggcatctgtggatttttggctactagaagtgtcccagaagtcactgtatttttgaaacttctaacgtcataattaagtttctcttgtcttggcatcaagaatagtcaagttttttggccgggcatggtggctcatgcctgt

SEQ ID NO: 173126 - DNA, 1571 bp, Homo sapiens
  Payload ID: 14027
  Gene Symbol: RAB29
  Gene Name: RAB29, member RAS oncogene family
  ENST ID: ENST00000528078
  CDS Start-End: 319-447
gtgacgcttgcggaggaaggggagagagaggcgcgcgggagggcgtctagggaatcgaggtgccggctgctccttcctcacaatttggtttgtgctgcaaggggagggtccccatcatctggccccagtggtgtaaggagctgactgggattcagtcactgacttggagccgctcgggggaagtcccgcccagacaggcggtgggtgggaatgcctcacttcagtttgaagagggtccggatccaaaggggttaaaacgagcgacccccgatccccgaccacacttcccgcctccctaaaacgcacaccccgctagccatgggcagccgcgaccacctgttcaaagtgctggtggtgggggacgccgcagtgggcaagacgtcgctggtgcagcgatattcccaggacagcttcagcaaacactacaagtccacggtgggagtgtgatctgtccccttgggcagtgagccgggaccagattgaccggttcagtaaagagaacggtttcacaggttggacagaaacatcagtcaaggagaacaaaaatattaatgaggctatgagagtcctcattgaaaagatgatgagaaattccacagaagatatcatgtctttgtccacccaaggggactacatcaatctacaaaccaagtcctccagctggtcctgctgctagtagtgtttggcttattttccatcccagttctgggaggtcttttaagtctcttccctttggttgcccacctgacaattttattaagtacatttgaattgtctcctgactactgtccagtaaggaggcccattgtcacttagaaaagacacctggaacccatgtgcatttctgcatctcctggattagcctttcacatgttgctggctcacattagtgccagttagtgccttcggtgtaagatcttctcatcagccctcaatttgtgatccggaattttatgagaaggattagaaatcagcacctgcgttttagagatcataattctcacctacttctgagcttatttttccatttgatattcattgatatcatgacttccaattgagaggaaaatgagatcaaatgtcatttcccaaatttcttgtaggccgttgtttcagattctttctgtcttggaatgtaaacatctgattctggaatgcagaaggagggggtctgggcatctgtggatttttggctactagaagtgtcccagaagtcactgtatttttgaaacttctaacgtcataattaagtttctcttgtcttggcatcaagaatagtcaagttttttggccgggcatggtggctcatgcctgtaatcccagcacttggggaggccaaggcaggcggatcacatgaggccaggaattcgagaccaacctggtcagcatggcaaaaccccgtctctactaaaagtacaaaaattagccaggcgtgatggcacgtgtctgtaatcccagctactctggagactgaggtgggagaatcgcttgagactgggaggcagaggttgcagtgaaccgagatcatgccaccgcacttcagcctgggtgacagagaaggactccgtctc

SEQ ID NO: 173127 - DNA, 3848 bp, Homo sapiens
  Payload ID: 14028
  Gene Symbol: RAB2A
  Gene Name: RAB2A, member RAS oncogene family
  Uniprot ID: P61019
  ENST ID: ENST00000262646
  CDS Start-End: 352-990
tggcggggcgcggccagcgtgcagggctgggccagcgtgcggggctcctcccctttcctccggcggcgccggcggccgcagaacttccgggtcggcgcggaggcggggcggaggcgccgcggcggctgttattgttcggctgggctcggtcgggcgctgtctccctcggctctgcgggtgtcagttcgtccggcttcctcacagcccctcactcccggcggctgacagcagcagcggcggcggcgggcggcgcctggcgtttcgaggctgagcggcaccggggttggggcgcggaggaggagcagcagcgggaggaggagccgtgtgccctggcactgagcggccgcggccatggcgtacgcctatctcttcaagtacatcataatcggcgacacaggtgttggtaaatcatgcttattgctacagtttacagacaagaggtttcagccagtgcatgaccttactattggtgtagagttcggtgctcgaatgataactattgatgggaaacagataaaacttcagatatgggatacggcagggcaagaatcctttcgttccatcacaaggtcgtattacagaggtgcagcaggagctttactagtttacgatattacacggagagatacattcaaccacttgacaacctggttagaagatgcccgccagcattccaattccaacatggtcattatgcttattggaaataaaagtgatttagaatctagaagagaagtaaaaaaagaagaaggtgaagcttttgcacgagaacatggactcatcttcatggaaacgtctgctaagactgcttccaatgtagaagaggcatttattaatacagcaaaagaaatttatgaaaaaattcaagaaggagtctttgacattaataatgaggcaaatggcattaaaattggccctcagcatgctgctaccaatgcaacacatgcaggcaatcagggaggacagcaggctgggggcggctgctgttgagtctgtttttactgtctagctgcccaacggggcctactcacttattctttcaccccctctcctcctgctcagctgagacatgaaactatttgaaatggctttatgtcacagaagactttaatccgtcaaattcttgtataactttgaataaatggttaatgttcacttaaaagacagattttggagattgtattcatatctatttgcatttgatttctaggtcaattgatgtgattatttttgttaaatgttgtcttgtgcccttaactacgaactgaattgtattaaacactacaaagtcatcttgagtattttaaatcggtttgtgtagttaggtttcccaacatctgtggttacctaatgtttaatattatagaactgtcctcagaaactttgtcaattttcacggctataaggaaacagaaggactcttttaattctgtatttatcatttactttctgtatatatagtttaataacctgcttgggtgtaatttgccaagcttgaattctttaatgcatttgcataaattctatactgtttagagcttaaagctacagaagcattgttaggaattgcttggacactgaattttaaactttttgacattgttaacaagcatgttcatcttttcttgtcactagtccaagaaaaatatgcttaatgtatattacaaaggctttgtatatgttaacctgttttaatgccaaaagtttgctttgtccacaatttccttaagacctcttcagaaagggatttgtttgccttaatgaatactgttgggaaaaaacacagtataatgagtgaaaagggcagaagcaagaaatttctacatcttagcgactccaagaagaatgagtatccacatttagatggcacattatgaggactttaatctttccttaaacacaataatgttttcttttttcttttattcacatgatttctaagtatatttttcatgcaggacagtttttcaaccttgatgtacagtgactgtgtaaaatttttctttcagtggcaacctctataatctttaaaatatggtgagcatcttgtctgttttgaaggggatatgacaataaatctatcagatggaaaatcctgttacaaagtagaaaagctttagtaatttactcagtgtggtggttttatcctttttttctttttctcccttggtctataatgaaattgttacagcagtgcaaaataaaatcctatgtataaaagtgttctttttttttattatgaccacctcttttttaatgtatttttagtccacttacagcttttacatgggtttaagcatgttttttaaaagggtcagaatggttaacactcaaccctttttaaaaattttgctaaaatgcgacaaatctcaccatactgaaattatttttgttgatggtgtaagcagtgtaagcaagtgttttctcctgaactagcacaaaagcacttatgcctgaaagaaagcataaagaagttctaactctgaaactaactactttcatttcgctcatggccttcaactttctacaggtcttccctgaagattcagcagtactctctcaaaggtttgacagtactcttgtgggaaatcaccaaatgctgtcatagttttgttttaactgtctccttgagggcagagggaagggtgagagaaaatctgttttcatgggtatttgtagtacagcctttttttctttcaagtggctgtatcaaattcactggtcttactaatcactgtctttaccagtgagtacaaaaagttaaggcaactaggacaggtactgctctataccaagaagagaatgattctttggaaattgttatttttaagcttctgttaatttttccagaagtttagtgcgtttcttttccatactttctcccctaattcttttatttgaagaagagaacttaatggcaaataaacaacaaaccaggacatgcattttaataccctaaggaaaaatggaaccctcaaatataactcctcccacaaccaccctaatgtgcctcagtctggggcagcaggtggacttctcaatagttcttttccacattctctacaaatcacatctaccgttaaggaatatgttatgaatcctttctgttaattgagaaagcaatgttattgtctgtgatttccagtctttgctcattttattatccctgtcaaataatgtaatattggtacctgcagttgaatttgtaatattgtaattgaatttttagttgatcttcgatcagtttttatagcatctatggacatagaaaatcagtcactgaaaaaaataaacacagctttcaatgtctcactcaacatgtaacattcaaaattgtgatcttcataaagacattgttaccattcgtcttgcaaatttaagacaactgaatgaaaagccaattttttgaaagaatgtggcatataattagatatacaactgaaacaggatatacaactgcatacaatttgtttttaatgatattttaaaatagcctgttagcaggaaaatagtccctatttatctgctaatggtcaaaaagagttaggatataaatcgtaccaaaatgtttccaatcactcagaaaaactgattcatgtctggctttgcaacaccttaaacatttattctgtcatagatagtaaagccccatctcagtttatttagtcctgaggttggcagcatggggtttgactatatgagctaaaagatacacaaagagataacgctgtttcataataaacaggaattgactatacaaataggtaaaccagcatatctacctgtatttctcagagtttagatgtgtgctttatgtttacattaaaataaagcctaacgccacagta

SEQ ID NO: 173128 - DNA, 737 bp, Homo sapiens
  Payload ID: 14028
  Gene Symbol: RAB2A
  Gene Name: RAB2A, member RAS oncogene family
  ENST ID: ENST00000452437
  CDS Start-End: 1-313
gagagatacattcaaccacttgacaacctggttagaagatgcccgccagcattccaattccaacatggtcattatgcttattggaaataaaagtgatttagaatctagaagagaagtaaaaaaagaagaaggtgaagcttttgcacgagaacatggactcatcttcatggaaacgtctgctaagactgcttccaatgtagaagaggcatttattaatacagcaaaagaaatttatgaaaaaattcaagaaggagtctttgacattaataatgaggtatatacatataaatattgttggtcaatattaatttagagttcacttttgattactattttatattttttattttataattcattattttataatttttttaattcctaaaatcaatcatgataatcagttaacaccattagtttacagtcatccaactgaaaaattggtatatgtggtatagtagttaaatatttatgttctagtagagcaacactttgtctatggaaatggattaaagtaagtggccctatccattcattgcaagcaatgcaaaataatataaatcccccaaagagaaaagaaaatccacttttatccacatgaccatatggtgtcatctgctttgggaataatgttctggtatataaatgcatgtactatgtactaatgcaagatgctctctctgttatctggcaggaaagagggaaataccaaatttggaaattactcccaatatagc

SEQ ID NO: 173129 - DNA, 680 bp, Homo sapiens
  Payload ID: 14028
  Gene Symbol: RAB2A
  Gene Name: RAB2A, member RAS oncogene family
  ENST ID: ENST00000529579
  CDS Start-End: 28-573
gtgccctggcactgagcggccgcggccatggcgtacgcctatctcttcaagtacatcataatcggcgacacaggtgttggtaaatcatgcttattgctacagtttacagacaagaggtttcagccagtgcatgaccttactattggtgtagagttcggtgctcgaatgataactattgatgggaaacagataaaacttcagatatgggatacggcagggcaagaatcctttcgttccatcacaaggtcgtattacagaggtgcagcaggagctttactagtttacgatattacacggagagatacattcaaccacttgacaacctggttagaagatgcccgccagcattccaattccaacatggtcattatgcttattggaaataaaaggcatttattaatacagcaaaagaaatttatgaaaaaattcaagaaggagtctttgacattaataatgaggcaaatggcattaaaattggccctcagcatgctgctaccaatgcaacacatgcaggcaatcagggaggacagcaggctgggggcggctgctgttgagtctgtttttactgtctagctgcccaacggggcctactcacttattctttcaccccctctcctcctgctcagctgagacatgaaactatttgaaatggctttatgtcacagaagactttaatccgt

SEQ ID NO: 173130 - DNA, 1058 bp, Homo sapiens
  Payload ID: 14028
  Gene Symbol: RAB2A
  Gene Name: RAB2A, member RAS oncogene family
  Uniprot ID: P61019
  ENST ID: ENST00000531289
  CDS Start-End: 273-839
agaacttccgggtcggcgcggaggcggggcggaggcgccgcggcggctgttattgttcggctgggctcggtcgggcgctgtctccctcggctctgcgggtgtcagttcgtccggcttcctcacagcccctcactcccggcggctgacagcagcagcggcggcggcgggcggcgcctggcgtttcgaggctgagcggcaccggggttggggcgcggaggaggagcagcagcgggaggaggagccgtgtgccctggcactgagcggccgcggccatggcgtacgcctatctcttcaagtacatcataatcggcgacacaggtgtagagttcggtgctcgaatgataactattgatgggaaacagataaaacttcagatatgggatacggcagggcaagaatcctttcgttccatcacaaggtcgtattacagaggtgcagcaggagctttactagtttacgatattacacggagagatacattcaaccacttgacaacctggttagaagatgcccgccagcattccaattccaacatggtcattatgcttattggaaataaaagtgatttagaatctagaagagaagtaaaaaaagaagaaggtgaagcttttgcacgagaacatggactcatcttcatggaaacgtctgctaagactgcttccaatgtagaagaggcatttattaatacagcaaaagaaatttatgaaaaaattcaagaaggagtctttgacattaataatgaggcaaatggcattaaaattggccctcagcatgctgctaccaatgcaacacatgcaggcaatcagggaggacagcaggctgggggcggctgctgttgagtctgtttttactgtctagctgcccaacggggcctactcacttattctttcaccccctctcctcctgctcagctgagacatgaaactatttgaaatggctttatgtcacagaagactttaatccgtcaaattcttgtataactttgaataaatggttaatgttcacttaaaagacagattttggagattgtattcatatctatttgcatttgatttcta

SEQ ID NO: 173131 - DNA, 566 bp, Homo sapiens
  Payload ID: 14028
  Gene Symbol: RAB2A
  Gene Name: RAB2A, member RAS oncogene family
  ENST ID: ENST00000531098
  CDS Start-End: 537-566
gcttttcccagaaaagtagatctcagacacttattgctggcttatttgtttgttcataggggagtatgataaaatgaactattaactatgctttaaatattttcactgtaacacaaaaaacaaaagtgcacaaaaacagtactgtagtagaggctaccagaaggacctggttagttgtcatctgtgagtttagctgccatatttatctttcacattgaaatattaaatgtgtaagaaagggtgaaaatgtactttagattggtttacagcttccacctaaatcatcagtcctcttattttgcaagaaattagagtactgaggaaatcatggtagattattcacagtgcaccagaaaccctggctgcctcttttccatgtcctttttgtaaagcatcttaatttctgtgaattttgtctcttatttatttttttttaactttcaggtgttggtaaatcatgcttattgctacagtttacagacaagaggtttcagccagtgcatgaccttactattggtgtagagttcggtgctcgaatgataactattgatgggaaacagataaaa

SEQ ID NO: 173132 - DNA, 866 bp, Homo sapiens
  Payload ID: 14028
  Gene Symbol: RAB2A
  Gene Name: RAB2A, member RAS oncogene family
  ENST ID: ENST00000466595
  CDS Start-End: 1-407
tcttcaagtacatcataatcggcgacacaggtgttggtaaatcatgcttattgctacagtttacagacaagaggtttcagccagtgcatgaccttactattggtgtagagttcggtgctcgaatgataactattgatgggaaacagataaaacttcagatatgggatacggggaagtcaaagaagaaacatacgttgcccctggtttctgttcattggcagaaaaaaggcagaggcagggcaagaatcctttcgttccatcacaaggtcgtattacagaggtgcagcaggagctttactagtttacgatattacacggagagatacattcaaccacttgacaacctggttagaagatgcccgccagcattccaattccaacatggtcattatgcttattggaaataaaagtgatttagaatctagaagagaagtaaaaaaagaagaaggtgaagcttttgcacgagaacatggactcatcttcatggaaacgtctgctaagactgcttccaatgtagaagaggcatttattaatacagcaaaagaaatttatgaaaaaattcaagaaggagtctttgacattaataatgaggcaaatggcattaaaattggccctcagcatgctgctaccaatgcaacacatgcaggcaatcagggaggacagcaggctgggggcggctgctgttgagtctgtttttactgtctagctgcccaacggggcctactcacttattctttcaccccctctcctcctgctcagctgagacatgaaactatttgaaatggctttatgtcacagaagactttaatccgtcaaattcttgtataactttgaataaatggttaatgttcacttaaaagacagat

SEQ ID NO: 173133 - DNA, 410 bp, Homo sapiens
  Payload ID: 14028
  Gene Symbol: RAB2A
  Gene Name: RAB2A, member RAS oncogene family
  ENST ID: ENST00000534260
  CDS Start-End: 1-209
gtgttggtaaatcatgcttattgctacagtttacagacaagaggtttcagccagtgcatgaccttactattggaacaaagcatcttggagcccaggaagcagaaactgttaagagctatcctgcagcaggagcagttgtgttagcttctcatctgctcggatggaatggtcacaggtgtagagttcggtgctcgaatgataactattgatgggaaacagataaaacttcagatatgggatacggcagggcaagaatcctttcgttccatcacaaggtcgtattacagaggtgcagcaggagctttactagtttacgatattacacggagagatacattcaaccacttgacaacctggttagaagatgcccgccagcattccaattccaacatggtcattatgcttattgg

SEQ ID NO: 173134 - DNA, 2928 bp, Homo sapiens
  Payload ID: 14029
  Gene Symbol: RAB2B
  Gene Name: RAB2B, member RAS oncogene family
  Uniprot ID: Q8WUD1
  ENST ID: ENST00000397762
  CDS Start-End: 102-752
aagggggagaagaagaagatcggtagattgagtggctagagaggtcggaggtaagtggctatagaagtcgggcggacccggaacccagaggacgcgacaccatgacttatgcttatctcttcaagtatatcatcatcggagacacaggtgtggggaagtcatgtctcctcctgcagtttacagataagcggttccagcctgtccacgacctcacaataggtgtggagtttggagctcgtatggtcaacattgatggaaaacaaatcaaactgcaaatctgggatacggctgggcaagaatccttccgttctatcacccgttcctactacaggggagcagctggagcactgctggtgtacgacattacaaggcgtgaaaccttcaaccacctgacctcatggttagaggatgcccggcagcactctagttccaacatggttatcatgctcattgggaataagagtgacctagagtcccgcagggatgtgaagagagaagaaggagaggcctttgctagggagcatggacttatattcatggaaacttcagccaaaacagcctgcaatgttgaagaggccttcattaacacagccaaagaaatatataggaagatccagcagggtttatttgatgtccacaatgaggcaaatggcatcaagattgggccccaacagtcaatttcaacatcagtgggacccagtgcctcccagcggaactctcgtgacatagggtccaactctggctgctgctgaacatctggcttgaactttttttgtccttcctggaatagcttcagatcaataggcttaatgaaagaggtctttcttgctttggctgagagcagcctctttttaaagtgtgatgttttgcctttccacctaaagaccaggagagaatttgggcccttactgacctgtcctccttcagggacatgagcattccctatagattagggttcttcttatcctcctatacaaatttcttaaattgttaggatcaaagttgattatcacagtagttaaaaaataatttcatggcggggcgccatggctcatgcctgtaatcctagcactttgggaggccaaggtgggcagatcacctgaggtcaagagttcgagaccagcctgaccaacttggagaaatgccatctcaactgaaaatacaaaattagctgggtgtggtggtgcatgcctgtaatcccaggtactcgggaggccaaggcaggagaatcgcttgaacccaggaggtgaaggttacgctaagccaagatcacgccattgcactgcagcctgggcaacaagagcaaaactctgtctcaaataaataaataattttttttttctttttttttttttttttttggggggatggagtctcactctgtctccaggctggagtgcagtggcatgatcttggctcactgcaacctccactttccaggttcaagcagttctcctgcctcaacctcccgagtagctgggactacaggcatgtgccaccacacctggctcatttttgtatttttagtagagacagggtttcaccatgttggccaggatggtcttgatctcttgacctcgtgatccgcccaccttggcctcccaaagtgctggattacaggtgtgagccaccgtgcctggcctaaataaataatttcgtaagcatatacaatccacttcccactaagaattagggtcaaagacattctatttgaacacttgcaattacctagatctagttggcctttggttgatagatcctctgcctcggaatttcattgagtttttttcttccttgcctttgggtgtctgcttgccacttcctaagaattcttgtagaaggcagtttcctctacttgcccaagagcactgagtacttctctactatcctattattagcttctatctcttagtgtaacttcaaaacttttaagagcagtgaagttggtcagggacatgtggccacttattattacctaaagaaaacatttgttccctgttcattttattttaggggccagatctaacattgtagtgtctttcaccagatagacttctactgtttcatcaaactcccttcttaactagacctagactttctactccaatcaggctaatctacttactgaatgtgacatatttattcctagttccatacctttgcacatgccctactctccactaattatacttaaaagtccaaaaattttttctttagtaacagacttaggtactgctaagcagttattaacacaatattccttagttttcatatgttggttattcatatgtctatttatatgtatatttatttttatgtatgttactatgtaaatatggtttgcagttgtttttgtgtggaatcttgtctttccgtataagttgtaagctccttgagagcaggatccatgtcattcctttatttttataaattattccccctatcattcctttacagtgcctagtgctactcattatgtgttcattgaatttgactgacatagttaaaaacttaaggtttattttagactttcaaggaaacaaaagactttagagtcctctctctgtaattctgccccactcatttgtttaccctgggttttatacagttctcttccttctcccctcccacctttccctggctttttgcctccattccatgaggcatacagtaaggctgcctgctagtaagcagtcacataagtgggtacctatccagccattctcttttcagagcatataatactatcttagccaaacttgcctttgcttcactcatcatgcagccttctgggttggttgctatatatatcttttttccttgatgtcccgttctcttccacagccctgaggtcttacgaatttttctactttctttttgctgttgatgaattgtttcattattaaatatatgcatgtatcaaagcta

SEQ ID NO: 173135 - DNA, 559 bp, Homo sapiens
  Payload ID: 14029
  Gene Symbol: RAB2B
  Gene Name: RAB2B, member RAS oncogene family
  ENST ID: ENST00000417141
  CDS Start-End: 87-275
aagatcggtagattgagtggctagagaggtcggaggtaagtggctatagaagtcgggcggacccggaacccagaggacgcgacaccatgacttatgcttatctcttcaagtatatcatcatcggagacacaggtgtggggaagtcatgtctcctcctgcagtttacagataagcggttccagcctgtccacgacctcacaataggtgtggagtttggagctcgtatggtcaacattgatggaaaacaaatcaaactgcaaatctgggatacgtgacctagagtcccgcagggatgtgaagagagaagaaggagaggcctttgctagggagcatggacttatattcatggaaacttcagccaaaacagcctgcaatgttgaagaggccttcattaacacagccaaagaaatatataggaagatccagcagggtttatttgatgtccacaatgaggcaaatggcatcaagattgggccccaacagtcaatttcaacatcagtgggacccagtgcctcccagcggaactctcgtgacatagggtccaactctggctgctgct

SEQ ID NO: 173136 - DNA, 1987 bp, Homo sapiens
  Payload ID: 14029
  Gene Symbol: RAB2B
  Gene Name: RAB2B, member RAS oncogene family
  ENST ID: ENST00000622293
  CDS Start-End: 63-692
agaggtcggaggtaagtggctatagaagtcgggcggacccggaacccagaggacgcgacaccatgacttatgcttatctcttcaagtatatcatcatcggagacacaggtgtggggaagtcatgtctcctcctgcagtttacagataagcggttccagcctgtccacgacctcacaataggtgtggagtttggagctcgtatggtcaacattgatggaaaacaaatcaaactgcaaatctgggatacggctgggcaagaatccttccgttctatcacccgttcctactacaggggagcagctggagcactgctggtgtacgacattacaaggcgtgaaaccttcaaccacctgacctcatggttagaggatgcccggcagcactctagttccaacatggttatcatgctcattgggaataagagtgacctagagtcccgcagggatgtgaagagagaagaaggagaggcctttgctagggagcatggacttatattcatggaaacttcagccaaaacagcctgcaatgttgaagaggccttcattaacacagccaaagaaatatataggaagatccagcagggtttatttgatgtccacaatgaggcaaatggcatcaagattgggccccaacagtcaatttcaacatcagtgggacccagtgcctcccaaagtgctggattacaggtgtgagccaccgtgcctggcctaaataaataatttcgtaagcatatacaatccacttcccactaagaattagggtcaaagacattctatttgaacacttgcaattacctagatctagttggcctttggttgatagatcctctgcctcggaatttcattgagtttttttcttccttgcctttgggtgtctgcttgccacttcctaagaattcttgtagaaggcagtttcctctacttgcccaagagcactgagtacttctctactatcctattattagcttctatctcttagtgtaacttcaaaacttttaagagcagtgaagttggtcagggacatgtggccacttattattacctaaagaaaacatttgttccctgttcattttattttaggggccagatctaacattgtagtgtctttcaccagatagacttctactgtttcatcaaactcccttcttaactagacctagactttctactccaatcaggctaatctacttactgaatgtgacatatttattcctagttccatacctttgcacatgccctactctccactaattatacttaaaagtccaaaaattttttctttagtaacagacttaggtactgctaagcagttattaacacaatattccttagttttcatatgttggttattcatatgtctatttatatgtatatttatttttatgtatgttactatgtaaatatggtttgcagttgtttttgtgtggaatcttgtctttccgtataagttgtaagctccttgagagcaggatccatgtcattcctttatttttataaattattccccctatcattcctttacagtgcctagtgctactcattatgtgttcattgaatttgactgacatagttaaaaacttaaggtttattttagactttcaaggaaacaaaagactttagagtcctctctctgtaattctgccccactcatttgtttaccctgggttttatacagttctcttccttctcccctcccacctttccctggctttttgcctccattccatgaggcatacagtaaggctgcctgctagtaagcagtcacataagtgggtacctatccagccattctcttttcagagcatataatactatcttagccaaacttgcctttgcttcactcatcatgcagccttctgggttggttgctatatatatcttttttccttgatgtcccgttctcttccacagccctgaggtcttacgaatttttctactttctttttgctgttgatgaattgtttcattattaaatatatgcatgtatc

SEQ ID NO: 173137 - DNA, 4914 bp, Homo sapiens
  Payload ID: 14030
  Gene Symbol: RAB3GAP1
  Gene Name: RAB3 GTPase activating protein subunit 1 (catalytic)
  Uniprot ID: Q15042
  ENST ID: ENST00000264158
  CDS Start-End: 44-2989
cttcttcccggcagccttagcgccaggcccggcgctcctcaagatggctgccgacagtgagcccgaatccgaggtatttgagatcacggacttcaccactgcctcggaatgggaaaggtttatttccaaagttgaagaagtcttgaatgactggaaactgattggaaactctttgggaaagccactcgaaaagggtatatttacttctggcacatgggaagagaaatcagatgaaatttcctttgctgacttcaagttctcagtcactcatcattatcttgtacaagagtccactgataaagaaggaaaggatgagttattagaggatgttgttccacaatctatgcaagatttgctgggtatgaataatgactttcctccaagagcacattgcctggtaagatggtatgggctacgtgagttcgtggtgattgcccctgctgcacacagtgacgctgttctcagcgaatctaagtgcaaccttcttctgagttctgtttctattgccttgggaaacactggctgtcaggtgccactctttgtgcaaattcaccacaaatggcgaagaatgtatgtaggagaatgtcaaggtcctggtgtacgaactgatttcgaaatggttcatcttagaaaagtgccaaatcagtacactcacttatcaggtctgctggatatcttcaaatcaaagattggatgtcctttaactccattgcctccagttagtattgctattcgatttacctatgtacttcaagattggcagcagtatttttggcctcagcaacctccagacatagatgcccttgtaggaggagaagttggaggcttggagtttggcaagttaccatttggtgcctgcgaagatcctattagtgaactccatttagctactacatggcctcatctgaccgaagggatcattgtggataatgatgtttattctgatttggatcctattcaagctccacattggtctgttagagttcgaaaagctgagaatcctcagtgtttgctaggtgattttgtcactgaattttttaaaatttgccgtcgaaaggagtcaactgatgagattcttggacgatctgcatttgaggaagaaggcaaagaaactgctgatataactcatgctttgtcaaaattgacagagccggcatcagttccaattcataaattatcagtttcaaatatggtacacactgcaaagaagaaaatccgaaaacacagaggtgtagaggagtcaccgctaaataatgatgttcttaatactattctcctgttcttattccctgatgctgtttctgagaaaccattagatggaactacttcaacagataataataatcctccatcagagagtgaagactataatctctacaatcagttcaagtctgcaccatctgacagtttaacatacaaactggctttgtgtctctgtatgatcaatttttaccatggagggttgaaaggagtggcacacctctggcaggaatttgttcttgaaatgcgtttccgatgggaaaacaactttctgattccaggattagcaagtggacccccagatctgaggtgttgtttactgcatcagaaactacagatgttaaattgttgtattgaaagaaagaaggcacgtgatgaggggaaaaagacaagtgcttcagatgtcactaatatatatccaggggatgctggaaaagcaggagaccagttggtgccagataatctaaaagaaacagataaggaaaagggagaggtaggaaaatcttgggattcctggagtgacagcgaagaagaattttttgaatgcctaagtgatactgaagaacttaaaggaaatggacaagagagtggcaagaaaggaggacctaaggagatggcaaatttaaggccggaaggacggctctatcagcatgggaaacttacactgctgcataatggagaacctctctacattccagtaacccaggaaccagcacctatgacagaagatctgctagaagagcagtctgaagttttagctaaattaggtacatcggcagagggggctcaccttcgagcacgcatgcagagtgcctgtctgctctcagatatggagtcttttaaggcagctaatccaggttgctccctggaagattttgtgaggtggtattcaccccgggattatattgaagaggaggtgattgatgaaaagggcaatgtggtgctgaaaggagaactgagtgcccggatgaagattccaagcaatatgtgggtagaagcctgggaaacagctaagccaattcctgctagaaggcaaaggagactctttgatgatacacgggaagcagaaaaggtgctgcactatctggcaatccagaaacctgcagaccttgctcggcacctgttaccttgtgtgattcatgcagctgtactcaaggtaaaggaagaagaaagtctcgaaaacatttcttcagttaagaagatcataaagcagataatatcccattccagtaaagttttgcacttccccaatccagaagacaagaaattggaagaaatcattcaccagattactaatgtggaagctctcattgccagagctcggtcactaaaagccaagtttggaactgagaaatgtgaacaggaggaggaaaaggaagatcttgaaaggtttgtgagttgcctgctggagcagcctgaagtgttagtcaccggtgcaggaagaggacatgctggcaggatcattcacaagctgtttgtgaatgcccagagggctgcagctatgactccaccagaggaggaattgaagagaatgggctccccagaggaaagaaggcagaactccgtgtcagacttcccaccccctgctggccgggaattcattttgcgcaccactgtgccgcgccctgctccctactccaaagctctgcctcagcggatgtacagtgttctcaccaaagaggactttagacttgcaggtgccttttcatcagatacttccttcttctgattcttctagcattactcgttggtggcttcagagacagtgctgcctcctcctgagggagggaaggtaccagggagaacctgggaggtcctggagagggccctgtccagttgggtgatcaggaatcaaaccagcatcggaaagacttcccagcaccaagcttgagctgtgtcgtttcgtggagggggcagcgaggatgggcttgagctgttgagagatttctgccctagagatggcctttgtatatgggggggtggtggggggacacaaacacatcagacactccgtcctcacactggcaggacggtgttcatcgcattctcttctgtgaccagcctctaggctagcggctgcattcgtggtctgtgcaaacacttcgtggttctatatatcagcagcaagtgtgcaaaataaaggacctgttaactcagatttctggatattttggtggtagcttctagtcccagaatctgtgtttttaaaatactacatgacattctgtctattcaatcacctggtggtcatctttcttgtactaattaactgttgatgagcattttggatattctaggagaaagcctataatttcacatagtttctctttttcatgtaactgtaacctaaatgtattacttctgataaaactatatatcaaatgtcactgcaaattagttttatatctgtcatgtgagatttgtcttacttatttttcttttggttgccatggaagttatggccctgaaaatcgtctccctccccttctcttgctgtacagcatgcgttctctttttgtggttgctggctgggtactgtatttaatgaagtagagaatagcacttgcaaaaatacagtcttggtacctagagactgtcatgcagatagtataatttggtatatgtgctaatgcattgagtagaggattattttaacacactattttgcttttgtattttagttaaaataatcgatggggatgtgtagcccccccgtgtgaggatgacatcaccacatttctagtttcatggagctcaagatgtcttgtgtctgtgtggctagatggcctctgcttggtaatcttatttttaggcctaaaattcccacttaaatccaaagtaaaaatggttatactgaagcataaaccttgcctgtgtaattttaaaaaattaatagagctgtgcaaaccctgttatttttgtaaaaaaaaaaaaaaatacatatctatatataatatgtgtgtgtgtgtgacatatgcacacgtctctgtgtatgtgaagtaggggaggccctgggggatgacctcccagcctttatgatgcttttctctatgctgctggacttcattcttactggtccacgcagatgcaggcggcctgaggccagtgctgtaccaagtagaagacggttcctaaggacagagtttgtctgttttctaacaaagaaaaattctacaaaggagaggttgggcgttacaaaggcattgtgaatctaataaaaggaaagtgtcgctttctgtggcgttttctttcattttctcccgctgaggcatttcagtctaatttcatgtggttttgtgctgtctcagctctaatgtttgcagcctgctgagcctaacaaggcagtggtctcaagaacattctttgtgcctttttaaagtactccattttatttttatgatagttatgtatttatttcacagatatatttaagtacccactttgtgtcaggtacagtacaagcaatgaagataaaacagaaaccaaaacacactcccttacagggaaaactgacaccacgttgccacaaaatgttgagtatagtcaactctgctgtgtggatcggagggcctgcatttatcctacaaataattgaatgtaatcctacattcatgtattcattggcagtacggagtaataaatgcagcaatgtca

SEQ ID NO: 173138 - DNA, 1139 bp, Homo sapiens
  Payload ID: 14030
  Gene Symbol: RAB3GAP1
  Gene Name: RAB3 GTPase activating protein subunit 1 (catalytic)
  ENST ID: ENST00000425393
  CDS Start-End: 10-186
ctcctcaagatggctgccgacagtgagcccgaatccgaggtatttgagatcacggacttcaccactgcctcggaatgggaaaggtttatttccaaagttgaagaagtcttgaatgactggaaactgattggaaactctttgggaaagccactcgaaaaggtcagatctatttgctggtgtctctaaatgactatttactttgaaacctctattttccagccctttgctgcatttggcacatttgaattaaatgttttttaaagttacgtataatctataaacatcaaatagcatttggaagaatttggatttaaatctgtggcaaatgatatatgtaagacatttgtgaaatgtttaataaagttatatatatgtgtgtgtgtatatatatatatataaaatgtcattctttgtgagtgattctttgtgagtgaagtttgcttctcttttgccttctcccttggaatgttaaaacatgtttttaaaagttttttatttggtcagagaaacattgcagtgaccatcttctttggtagcatattttgcttactaatgaggaaaattctagtacttaccattgacttactgtagttaacaactatttcactcagtttttgtattttataatatcactaataacatcccccttcccttttaagctttttaacttatggatgttttaaggattttatttaagaatgaaaaaattactctttgaaattgaggtagaaatcaaattctaatctaaagtattggtagttttattcataaaccacaccccaaatgtttactgaagaatgtactctgagaacaaacctggattcactgtgaagggatctaacaatttgattttaagtttatgtagatgcttagtttgttagataaattcttttgaaataaaatttatggttggttttattacaactcaatattactaactcagtgataacttattaactcagtaattattaattcaatagtaatttaattataatttaccctgtgttaggaactttgagttctcaatatttgctaggggttttcagctttgtgatggtgatactatcaaaaaagagactgtcaaaatgcattaggaagccaggcaacatggtgagaccctgtctcttaaggaaaaaaaa

SEQ ID NO: 173139 - DNA, 4185 bp, Homo sapiens
  Payload ID: 14030
  Gene Symbol: RAB3GAP1
  Gene Name: RAB3 GTPase activating protein subunit 1 (catalytic)
  Uniprot ID: Q15042
  ENST ID: ENST00000442034
  CDS Start-End: 11-2977
gctcctcaagatggctgccgacagtgagcccgaatccgaggtatttgagatcacggacttcaccactgcctcggaatgggaaaggtttatttccaaagttgaagaagtcttgaatgactggaaactgattggaaactctttgggaaagccactcgaaaagggtatatttacttctggcacatgggaagagaaatcagatgaaatttcctttgctgacttcaagttctcagtcactcatcattatcttgtacaagagtccactgataaagaaggaaaggatgagttattagaggatgttgttccacaatctatgcaagatttgctgggtatgaataatgactttcctccaagagcacattgcctggtaagatggtatgggctacgtgagttcgtggtgattgcccctgctgcacacagtgacgctgttctcagcgaatctaagtgcaaccttcttctgagttctgtttctattgccttgggaaacactggctgtcaggtgccactctttgtgcaaattcaccacaaatggcgaagaatgtatgtaggagaatgtcaaggtcctggtgtacgaactgatttcgaaatggttcatcttagaaaagtgccaaatcagtacactcacttatcaggtctgctggatatcttcaaatcaaagattggatgtcctttaactccattgcctccagttagtattgctattcgatttacctatgtacttcaagattggcagcagtatttttggcctcagcaacctccagacatagatgcccttgtaggaggagaagttggaggcttggagtttggcaagttaccatttggtgcctgcgaagatcctattagtgaactccatttagctactacatggcctcatctgaccgaagggatcattgtggataatgatgtttattctgatttggatcctattcaagctccacattggtctgttagagttcgaaaagctgagaatcctcagtgtttgctaggtgattttgtcactgaattttttaaaatttgccgtcgaaaggagtcaactgatgagattcttggacgatctgcatttgaggaagaaggcaaagaaactgctgatataactcatgctttgtcaaaattgacagagccggcatcagttccaattcataaattatcagtttcaaatatggtacacactgcaaagaagaaaatccgaaaacacagaggtgtagaggagtcaccgctaaataatgatgttcttaatactattctcctgttcttattccctgatgctgtttctgagaaaccattagatggaactacttcaacagataataataatcctccatcagagagtgaagactataatctctacaatcagttcaagtctgcaccatctgacagtttaacatacaaactggctttgtgtctctgtatgatcaatttttaccatggagggttgaaaggagtggcacacctctggcaggaatttgttcttgaaatgcgtttccgatgggaaaacaactttctgattccaggattagcaagtggacccccagatctgaggtgttgtttactgcatcagaaactacagatgttaaattgttgtattgaaagaaagaaggcacgtgatgaggggaaaaagacaagtgcttcagatgtcactaatatatatccaggggatgctggaaaagcaggagaccagttggtgccagataatctaaaagaaacagataaggaaaagggagaggtaggaaaatcttgggattcctggagtgacagcgaagaagaattttttgaatgcctaagtgatactgaagaacttaaaggaaatggacaagagagtggcaagaaaggaggacctaaggagatggcaaatttaaggccggaaggacggctctatcagcatgggaaacttacactgctgcataatggagaacctctctacattccagtaacccaggaaccagcacctatgacagaagatctgctagaagagcagtctgaagttttagctaaattaggtacatcggcagagggggctcaccttcgagcacgcatgcagagtgcctgtctgctctcagatatggagtcttttaaggcagctaatccaggttgctccctggaagattttgtgaggtggtattcaccccgggattatattgaagaggaggtgattgatgaaaagggcaatgtggtgctgaaaggagaactgagtgcccggatgaagattccaagcaatatgtgggtagaagcctgggaaacagctaagccaattcctgctagaaggcaaaggagactctttgatgatacacgggaagcagaaaaggtgctgcactatctggcaatccagaaacctgcagaccttgctcggcacctgttaccttgtgtgattcatgcagctgtactcaaggtaaaggaagaagaaagtctcgaaaacatttcttcagttaagaagatcataaagcagataatatcccattccagtaaagttttgcacttccccaatccagaagacaagaaattggaagaaatcattcaccagattactaatgtggaagctctcattgccagagctcggtcactaaaagccaagtttggaactgagaaatgtgaacaggaggaggaaaaggaagatcttgaaaggtttgtgagttgcctgctggagcagcctgaagtgttagtcaccggtgcaggaagaggacatgctggcaggatcattcacaagctgtttgtgaatgcccagaggctgactgaatcttctgatgaggctgcagctatgactccaccagaggaggaattgaagagaatgggctccccagaggaaagaaggcagaactccgtgtcagacttcccaccccctgctggccgggaattcattttgcgcaccactgtgccgcgccctgctccctactccaaagctctgcctcagcggatgtacagtgttctcaccaaagaggactttagacttgcaggtgccttttcatcagatacttccttcttctgattcttctagcattactcgttggtggcttcagagacagtgctgcctcctcctgagggagggaaggtaccagggagaacctgggaggtcctggagagggccctgtccagttgggtgatcaggaatcaaaccagcatcggaaagacttcccagcaccaagcttgagctgtgtcgtttcgtggagggggcagcgaggatgggcttgagctgttgagagatttctgccctagagatggcctttgtatatgggggggtggtggggggacacaaacacatcagacactccgtcctcacactggcaggacggtgttcatcgcattctcttctgtgaccagcctctaggctagcggctgcattcgtggtctgtgcaaacacttcgtggttctatatatcagcagcaagtgtgcaaaataaaggacctgttaactcagatttctggatattttggtggtagcttctagtcccagaatctgtgtttttaaaatactacatgacattctgtctattcaatcacctggtggtcatctttcttgtactaattaactgttgatgagcattttggatattctaggagaaagcctataatttcacatagtttctctttttcatgtaactgtaacctaaatgtattacttctgataaaactatatatcaaatgtcactgcaaattagttttatatctgtcatgtgagatttgtcttacttatttttcttttggttgccatggaagttatggccctgaaaatcgtctccctccccttctcttgctgtacagcatgcgttctctttttgtggttgctggctgggtactgtatttaatgaagtagagaatagcacttgcaaaaatacagtcttggtacctagagactgtcatgcagatagtataatttggtatatgtgctaatgcattgagtagaggattattttaacacactattttgcttttgtattttagttaaaataatcgatggggatgtgtagcccccccgtgtgaggatgacatcaccacatttctagtttcatggagctcaagatgtcttgtgtctgtgtggctagatggcctctgcttggtaatcttatttttaggcctaaaattcccacttaaatccaaagtaaaaatggttatactgaagcataaaccttgcctgtgtaattttaaaaaattaatagagctgtgcaaaccctgttatttttgtaaaaaaaaaaaaaaa

SEQ ID NO: 173140 - DNA, 3161 bp, Homo sapiens
  Payload ID: 14030
  Gene Symbol: RAB3GAP1
  Gene Name: RAB3 GTPase activating protein subunit 1 (catalytic)
  Uniprot ID: Q15042
  ENST ID: ENST00000539493
  CDS Start-End: 1-2808
atgttctcactcataagtggtatatttacttctggcacatgggaagagaaatcagatgaaatttcctttgctgacttcaagttctcagtcactcatcattatcttgtacaagagtccactgataaagaaggaaaggatgagttattagaggatgttgttccacaatctatgcaagatttgctgggtatgaataatgactttcctccaagagcacattgcctggtaagatggtatgggctacgtgagttcgtggtgattgcccctgctgcacacagtgacgctgttctcagcgaatctaagtgcaaccttcttctgagttctgtttctattgccttgggaaacactggctgtcaggtgccactctttgtgcaaattcaccacaaatggcgaagaatgtatgtaggagaatgtcaaggtcctggtgtacgaactgatttcgaaatggttcatcttagaaaagtgccaaatcagtacactcacttatcaggtctgctggatatcttcaaatcaaagattggatgtcctttaactccattgcctccagttagtattgctattcgatttacctatgtacttcaagattggcagcagtatttttggcctcagcaacctccagacatagatgcccttgtaggaggagaagttggaggcttggagtttggcaagttaccatttggtgcctgcgaagatcctattagtgaactccatttagctactacatggcctcatctgaccgaagggatcattgtggataatgatgtttattctgatttggatcctattcaagctccacattggtctgttagagttcgaaaagctgagaatcctcagtgtttgctaggtgattttgtcactgaattttttaaaatttgccgtcgaaaggagtcaactgatgagattcttggacgatctgcatttgaggaagaaggcaaagaaactgctgatataactcatgctttgtcaaaattgacagagccggcatcagttccaattcataaattatcagtttcaaatatggtacacactgcaaagaagaaaatccgaaaacacagaggtgtagaggagtcaccgctaaataatgatgttcttaatactattctcctgttcttattccctgatgctgtttctgagaaaccattagatggaactacttcaacagataataataatcctccatcagagagtgaagactataatctctacaatcagttcaagtctgcaccatctgacagtttaacatacaaactggctttgtgtctctgtatgatcaatttttaccatggagggttgaaaggagtggcacacctctggcaggaatttgttcttgaaatgcgtttccgatgggaaaacaactttctgattccaggattagcaagtggacccccagatctgaggtgttgtttactgcatcagaaactacagatgttaaattgttgtattgaaagaaagaaggcacgtgatgaggggaaaaagacaagtgcttcagatgtcactaatatatatccaggggatgctggaaaagcaggagaccagttggtgccagataatctaaaagaaacagataaggaaaagggagaggtaggaaaatcttgggattcctggagtgacagcgaagaagaattttttgaatgcctaagtgatactgaagaacttaaaggaaatggacaagagagtggcaagaaaggaggacctaaggagatggcaaatttaaggccggaaggacggctctatcagcatgggaaacttacactgctgcataatggagaacctctctacattccagtaacccaggaaccagcacctatgacagaagatctgctagaagagcagtctgaagttttagctaaattaggtacatcggcagagggggctcaccttcgagcacgcatgcagagtgcctgtctgctctcagatatggagtcttttaaggcagctaatccaggttgctccctggaagattttgtgaggtggtattcaccccgggattatattgaagaggaggtgattgatgaaaagggcaatgtggtgctgaaaggagaactgagtgcccggatgaagattccaagcaatatgtgggtagaagcctgggaaacagctaagccaattcctgctagaaggcaaaggagactctttgatgatacacgggaagcagaaaaggtgctgcactatctggcaatccagaaacctgcagaccttgctcggcacctgttaccttgtgtgattcatgcagctgtactcaaggtaaaggaagaagaaagtctcgaaaacatttcttcagttaagaagatcataaagcagataatatcccattccagtaaagttttgcacttccccaatccagaagacaagaaattggaagaaatcattcaccagattactaatgtggaagctctcattgccagagctcggtcactaaaagccaagtttggaactgagaaatgtgaacaggaggaggaaaaggaagatcttgaaaggtttgtgagttgcctgctggagcagcctgaagtgttagtcaccggtgcaggaagaggacatgctggcaggatcattcacaagctgtttgtgaatgcccagagggctgcagctatgactccaccagaggaggaattgaagagaatgggctccccagaggaaagaaggcagaactccgtgtcagacttcccaccccctgctggccgggaattcattttgcgcaccactgtgccgcgccctgctccctactccaaagctctgcctcagcggatgtacagtgttctcaccaaagaggactttagacttgcagttaaaataatcgatggggatgtgtagcccccccgtgtgaggatgacatcaccacatttctagtttcatggagctcaagatgtcttgtgtctgtgtggctagatggcctctgcttgctccccaggtgtgtcctggtagacaactgctcccaggagctggcatagaagcaaacctgcaggaaaagccaacccactccaggtgtgtggaagctgctggcaggaacccagcaaggatccagctgggttgtaatggaaacaatgcaaccaacaatccttgagcgagccgggatagatgtggcctcatcactgaagatttcatctgagacctctgcaaatatccaaattgtatatgctcttagagcagatcattttctcacaggt

SEQ ID NO: 173141 - DNA, 7257 bp, Homo sapiens
  Payload ID: 14031
  Gene Symbol: RAB3GAP2
  Gene Name: RAB3 GTPase activating protein subunit 2 (non-catalytic)
  Uniprot ID: Q9H2M9
  ENST ID: ENST00000358951
  CDS Start-End: 118-4299
ggtttctccgccttctgcttggctagagctattggggctcggtggcggccgcagtggggtggagggggcagggcgtggtgaggtaaggtgagtgccgtagtggggttccctggagccatggcctgctccattgtccagttctgctacttccaggacctccaggccgcccgggacttcctctttcctcacctgcgggaggagatcctcagcggcgccttgcggagggaccccagtaaatcaacagactgggaagatgatggttggggagcatgggaagaaaatgaaccacaagaacctgaagaagaaggaaatacttgcaaaacacaaaaaacttcctggctccaagattgtgttttatccttatctccaaccaatgatcttatggtgatagctcgagagcaaaaagctgtatttctagtgccaaaatggaaatatagtgataaaggaaaggaagaaatgcaatttgctgttggctggagtggttccttaaatgtcgaagaaggggaatgtgtaaccagtgctctatgtatcccactagcaagccaaaagaggagttccactgggcgtcctgactggacctgcattgtggtgggttttacttcaggttatgtacgcttctacactgagaatggtgtgctcttgcttgcacagcttttgaatgaggacccagtacttcaacttaaatgcagaacctatgaaataccacgacatcccggcgtgactgagcagaatgaagagttgagtatcttatatccagctgccattgtgactattgatggatttagcctttttcaatctcttcgtgcttgtcgaaatcaggtagcaaaagctgcagcatcaggcaatgagaacatacaaccaccaccattagcttataagaaatggggtctacaagatattgacactattattgatcatgctagtgttggtattatgactctgtccccctttgatcaaatgaagactgcctccaatataggtggatttaatgcagcaattaaaaatagtccacctgccatgtctcagtatatcactgtagggtccaatccatttactggcttcttctatgctttagagggaagcacacaaccattattatcccatgttgcactagcagttgcaagtaaactcacttctgctttatttaatgctgccagtggttggcttggttggaaaagtaagcacgaagaagaagctgtccaaaagcaaaagccgaaggttgagccagctaccccattagctgtaagatttggacttccagattctagacgccatggtgaaagcatatgtctgtctccatgtaacacactggcagcagtaacagatgatttcggcagagttattttattggatgtagctagaggaattgcaatacgcatgtggaaagggtaccgcgacgcacaaattggatggattcaaactgtagaggacctccatgaaagagtgccagaaaaggcagatttttccccctttggaaattctcagggtccaagtcgagtagctcaattccttgtgatctatgcgccaagaaggggaattttagaagtgtggagcacacagcagggacctagagtaggagctttcaatgtggggaagcactgcaggctgctgtatcctggctataaaataatgggtttaaataatgttaccagtcagagttggcagccacagacttatcagatctgtctggttgatccagtgtctggaagtgtgaaaacagtgaacgttcccttccatttagcactgagtgataagaagagtgaacgagccaaggatatgcacctagtgaagaaactagcagccttactgaaaacaaaatctcccaatcttgatttggttgaaacagaaataaaggaattaattcttgatattaaataccctgcaaccaaaaaacaagctttggaaagcattttggcaagtgaacgtttaccattttcttgccttagaaacatcactcagactttaatggacactttaaaaagtcaagaacttgagtctgttgatgaaggattgctacagttttgtgccaataaactaaaactgctgcaactctatgagtctgtcagtcaattaaattcccttgattttcatttagacacaccattctctgataatgacttggctctgttactaaggcttgatgaaaaagaactgcttaagctccaggcattactagagaaatataagcaagagaacaccaggacaaatgttcgattttctgatgataaagatggtgtgttgcctgtaaaaacattcttggaatatttagaatatgaaaaggatgtgctcaacataaagaaaataagtgaagaggaatatgtggctttaggtagtttctttttttggaagtgtttgcatggagaaagctccactgaggatatgtgtcacactttggagtcggctggtcttagccctcagctgttgttgtctctgctcctgagtgtttggctttcaaaggaaaaggatattttggataaaccacagtcaatctgctgtcttcataccatgctgtccctcctgagcaagatgaaagtggccatcgatgagacctgggattctcagtctgtgtccccatggtggcagcagatgcgcacagcctgtattcagtctgagaacaatggagccgctctgttgtctgcgcatgttgggcattctgttgctgcacagatatcaaacaacatgacagagaaaaaattttcccaaacagttttgggtgctgattcagaggccctcactgattcctgggaggcactttctcttgacactgagtactggaaactccttctgaaacagctggaggattgtctcatacttcagactctgcttcacagcaaagggaacactcagacctccaaagtgtcatcactgcaggctgagccacttccaaggctttctgttaaaaagttattagaaggaggaaaaggtggcattgcagacagtgtagccaagtggatatttaaacaggacttcagccctgaagtattaaaactggctaatgaagaaagagatgcagaaaacccagatgaacccaaagaaggtgttaacagaagtttccttgaggtatcagagatggagatggacttaggagccataccagacttactgcatttagcctatgagcagtttccttgtagccttgagctcgatgtcttgcatgcacattgctgctgggagtacgttgttcagtggaataaagatccagaggaagcacgtttttttgttaggtcaatagaacacttgaagcaaatatttaatgcacatgttcaaaatggcattgcactgatgatgtggaatacgttcttagttaaaagattttctgctgctacatacttaatggataaggttggaaaatcaccaaaagataggttatgccgaagggatgtgggaatgagtgacacagcaatgacatctttcctcggctcctgtttggatcttcttcagatcttaatggaggcagatgttagcagggatgaaatacaggtgcctgtgctggatactgaggatgcgtggctctccgtggaaggaccaatctccatagtggaactggcccttgaacagaagcacatccactacccactggtggagcaccactccatcctgtgctccatcttgtatgcagtcatgaggttttctctgaagaccgtgaagccactttcactttttgacagtaagggaaaaaatgcatttttcaaagacctaacttcaattcagttattacctagtggggaaatggatccaaattttatttctgtacgacaacagttcttattgaaagttgtcagtgcagctgtccaggcccaacattcagccacaaaggtcaaagatcccacagaagaggccacacccactccttttgggaaagaccaagattggccagctctagctgtggatttagcccatcaccttcaagttagtgaagatgttgttagaaggcattatgtgggggaactatacaactatggagttgaccacttaggagaagaggccattctacaggttcatgacaaagaggtccttgcctctcagctgctggtgctcacggggcaaaggctggctcatgcgcttctccacacccagacaaaagaaggaatggagctgcttgccagacttccacccacactgtgtacttggctgaaagcaatggacccccaggaccttcaaaacactgaagtgccaattgcaacaacagctaaactagtaaataaagtaattgagcttttaccagaaaaacatgggcaatatggtctagccttacacctcattgaagctgtggaagccatatctcttccttctttatgacacttacctactggaaatagtctaaaattatgattataacatgaagtagtgcatggttattttacatagtaagacctggaattttatgggaaaagtatgtctttttttttccttttgtaaaataaataaaagtatatacaacttttaaaaagtgcaaccctggctaaattccactcctttggttaatactgaagataaaatataaacaaatgtcaactctgttataattaatacagatgttttactgtttatttctaattcaaacacttaagtagctttattgttaaactttgctatttaaaattggttataatttagattatgttcttataagattctatatttcctatctaaaatgttgttgtaattcaatttaaatgtgttcatgtacagtccccatcagtagcgtatagaacaccccactctcctttagtaaatgttgagaaaatgcctttgttgtcatgctccaaatcccacactgggctgccacctgggagttctggataccgaaaggttcctttcccagaggttctgctgttgccatcagaggaggatgaccgtgcttgaggaggaagaatgggttcaagatcatcatattcatcagaaggggacactaaatagaacccttaacctgttgtacttgccaaaattgagaatcagagatgtgtaaaatgcagcaaattaattataatgtaagttaagatttgctttttgccaagttgcaaagttgtatccacatcaggtcactgtaaaaatgtattatcttgtaaaacttatgtaaaaaaaaaaaaaaaaaaaaggcaaagatactaaaaattttaagtccgactttatttttcctacaagtgtttagaaatgcttctgggatttgctaatattatctgtccttgggaacagtattgaaaaaactgcttagtggtattacagctttagcaaacctacctcacagctgggatgagaggataaaatacaactaattttgtaccctatagtgcctagagcagtccaagtgctaaataaatatttactgattaaaaccaaactatagctactcgggaggctggaggaggatcgcttgagcccaggagtttgaggccattctgggcaatatagcaagaccctgtctcgaaaaaaaaaaaaaaaagaaaaaaccaaactaaccaaaactctgtaaaagagtgctttgagctctacaaataccaagtatttattgtggtatatttttagaatgtagccatacagtgtaattatgggtatctgtcatggatcacaattattattcatagtaagtcattgtgatacagaagtttgtttcttcacttccccttaagaagccaactatagtaatcatgcaaagttgaggagtatgtccttcagggatataaaaagaaaaacaaatctgttttttgagctaaaagagcacatccaaacaagaatttaactggctaaaatttagtaattactgttaagtaactatcaaacttgaaatcttacaagataaatggttaagatgtcttgagtatttgggatgggggcctgtgagtctgattgagacatacattttacagagtagcagcactggaaagggctagtccaacctcccagcctctgcttgggtctccgctgccccagccacacacatcctagaattcttgtaaacatatctggctctgtgttaacagtcacttgttatatgttttctaagagattagttcttcctgtgatttttccaagtacgctgaaagtagtagtatgaacttaaggaggctagtcaaagaaacttggagttataggtatttttaaagaataaatcctcaattccatcatcacttggcggggagggggcacttattaagcattttagataataaaactggttaagcttactctggtagaacagacaatcaaatctggggattgctgagaacaataataagctgaagtatggctcacagaatcctaacacaaatcattaagtctctagttagatttgttatcctaaaatttttcatagaattttaaaatctaattctgacttgtatggttaagaaaagcagttaaatattttactacttatcaagggcttttaaaataaataaatctgattgataggaagaaaggcaaataaatacctatgtagacattctataataacaaagagccatagatgataaaggaattagattttaatgtagaatgggtggtttctgaaacaaaggtatgtggtactttgtagttattgatgagaagccagtaaccagtagtgttttcctagatatatgcccaccctcacacaactttcttcattaacaaacattaaatatgcatttgtatcttattaaattatattgtataatgctgaaggaaaacaaaaagtgttcaaataatcataacttctacattacaggttctgtttagatgcagaactagaggggccagggtaaatgtagataaagagatatatagcaccatgcttcttaatgcttcatacttttgcaaacagaaaaaaaaagttttacttttattataaaacttcatctatggtcaaagtaaacactgttacatttaaattgctttttaaaaacaattgcgatctaaaaagtcaaaaatctgaaatttaataatatgagacttacactgaatataatgttcatttagaagttgctgtggtccacttcatttataaggaacaaatatttttacagtacactatagcaacagcaaaagccctctctcaccctgataggaatgggtttgctgggtgtctagaagttagattcctgctgaatagaattagccatccttaaaagattttaatccaatactgaactgtttataaaatgctttctctattgtaatgtactgtaagtagtgaaattctgtatatactgctattttctgtctgttcattgttgtgaacttcttatgtatattagtgaaataaattttcagctttca

SEQ ID NO: 173142 - DNA, 515 bp, Homo sapiens
  Payload ID: 14031
  Gene Symbol: RAB3GAP2
  Gene Name: RAB3 GTPase activating protein subunit 2 (non-catalytic)
  ENST ID: ENST00000484658
  CDS Start-End: 1-515
agctgaagcagaggagagagagagagatagtaggaaatggctgcgtggggatcatttgagctttgctcagttgtgtatacagtcagttgtggaatgtgtaaccagtgctctatgtatcccactagcaagccaaaagaggagttccactgggcgtcctgactggacctgcattgtggtgggttttacttcaggttatgtacgcttctacactgagaatggtgtgctcttgcttgcacagcttttgaatgaggacccagtacttcaacttaaatgcagaacctatgaaataccacgacatcccggcgtgactgagcagaatgaagagttgagtatcttatatccagctgccattgtgactattgatggatttagcctttttcaatctcttcgtgcttgtcgaaatcaggtagcaaaagctgcagcatcaggcaatgagaacatacaaccaccaccattagcttataagaaatggggtctacaagatattgacactattattgatcatgctagtgttg

SEQ ID NO: 173143 - DNA, 539 bp, Homo sapiens
  Payload ID: 14031
  Gene Symbol: RAB3GAP2
  Gene Name: RAB3 GTPase activating protein subunit 2 (non-catalytic)
  ENST ID: ENST00000474178
  CDS Start-End: 34-282
aaggtgagtgccgtagtggggttccctggagccatggcctgctccattgtccagttctgctacttccaggacctccaggccgcccgggacttcctctttcctcacctgcgggaggagatcctcagcggcgccttgcggagggaccccagtaaatcaacagactgggaagatgatggttggggagcatgggaagaaaatgaaccacaagaacctggaatgtgtaaccagtgctctatgtatcccactagcaagccaaaagaggagttccactgggcgtcctgactggacctgcattgtggtgggttttacttcaggttatgtacgcttctacactgagaatggtgtgctcttgcttgcacagcttttgaatgaggacccagtacttcaacttaaatgcagaacctatgaaataccacgacatcccggcgtgactgagcagaatgaagagttgagtatcttatatccagctgccattgtgactattgatggatttagcctttttcaatctcttcgtgcttgtcgaaatcaggtagcaaaag

SEQ ID NO: 173144 - DNA, 1393 bp, Homo sapiens
  Payload ID: 14032
  Gene Symbol: RAB30
  Gene Name: RAB30, member RAS oncogene family
  Uniprot ID: Q15771
  ENST ID: ENST00000260056
  CDS Start-End: 407-1018
gtttcataatctgttggctcaaatctgctgctgccacaccctgtgcctctcagggtccctgggtcctgttgcagttatcatatgcctcacctttaacctaaatgactctgcgaagtggctgctatggaaggatttactgagtgcaaaatggattttcttccctgctctttggggcaaagctggctcagagattcttagctgcagggggaggggctggcaggcctgaaccgcagttggacttagcagccaggggttttctggttttcattaaaattctctggctgtcttttgggatagctccattggatatgactgtgcactggagccggttgtgctgttctctcagctgtacacacccatcaaatcacagtgcccctgaggacgagagaaaattgaagctgtgtaaatgagtatggaagattatgatttcctgttcaaaattgttttaattggcaacgctggtgtggggaagacgtgcctcgtccgaagattcactcagggtcttttccccccaggtcaaggagccacaattggagttgattttatgattaagacagtggagattaatggtgaaaaagtaaagctacagatctgggacacagcaggtcaagagagatttcggtccattacccagagttactaccgaagcgccaatgccttgatcctcacctatgacattacctgtgaggaatccttccgttgccttcctgagtggctgcgggagatagaacaatatgccagcaacaaggtcatcactgtgttagtgggcaacaagattgacctggctgaaaggagagaggtttcccagcagcgagctgaagaattctcagaagctcaggacatgtattatctggagacctcagccaaggaatctgataatgtggagaaactcttccttgacttagcatgccgactcatcagtgaagccagacagaacacacttgtgaacaatgtatcctcacccttacctggagaagggaaaagcatcagctatttgacttgttgtaatttcaactaaaggctgaggcacggagaagaaaaggaatcagcaactgccctgatgggccatgagatgctggggagatctggcgatgactgtggctcccgctctctgaccttctgactcctgtgggctcctgagcttacaaagcatggcaggccaagggcctcgaccacaggccagcattagcagaacatataatggtttcacccttttccagtctggagttggagcaaggagaaaattgcactaggcactccatgatctgcagagcatgttgcttttgtttttttaaaaagcaagtaaaagcgcattcctaaacagagtccggggggaaatgtactgtagggatccctcctgcacatcagtgggtgcatgtgggaactcttcttt

SEQ ID NO: 173145 - DNA, 580 bp, Homo sapiens
  Payload ID: 14032
  Gene Symbol: RAB30
  Gene Name: RAB30, member RAS oncogene family
  ENST ID: ENST00000534301
  CDS Start-End: 163-580
tttctgtctagctggcagggtcaccggaggggagctttaaattgctctttaaatgagtcagacctgttcccccggagagaaggctggtgcagcttgagctctgtgggcaagtctgactgggcctttctcacttttgcctgtgtttgccttgcagctgtgtaaatgagtatggaagattatgatttcctgttcaaaattgttttaattggcaacgctggtgtggggaagacgtgcctcgtccgaagattcactcagggtcttttccccccaggtcaaggagccacaattggagttgattttatgattaagacagtggagattaatggtgaaaaagtaaagctacagatctgggacacagcaggtcaagagagatttcggtccattacccagagttactaccgaagcgccaatgccttgatcctcacctatgacattacctgtgaggaatccttccgttgccttcctgagtggctgcgggagatagaacaatatgccagcaacaaggtcatcactgtgttagtgggcaacaagattgacctggctgaaaggagagaggtttcccagcagcgagctgaagaat

SEQ ID NO: 173146 - DNA, 591 bp, Homo sapiens
  Payload ID: 14032
  Gene Symbol: RAB30
  Gene Name: RAB30, member RAS oncogene family
  ENST ID: ENST00000526205
  CDS Start-End: 250-591
aagtgtagcagcagcaccagggcagggactgactccagcccttggactcaggacatcgcagaccttcccttgcgtgcgtgactcattcgcacatccatttctgtttatgcctggggtggggagaaaaatcccaaaccaggttggatggagtgcagtggcgcaatctcggctcacggcaacctccgcctcccgggttcaagcaattctcctgcctcagcctccggagtagctgggattacagctgtgtaaatgagtatggaagattatgatttcctgttcaaaattgttttaattggcaacgctggtgtggggaagacgtgcctcgtccgaagattcactcagggtcttttccccccaggtcaaggagccacaattggagttgattttatgattaagacagtggagattaatggtgaaaaagtaaagctacagatctgggacacagcaggtcaagagagatttcggtccattacccagagttactaccgaagcgccaatgccttgatcctcacctatgacattacctgtgaggaatccttccgttgccttcctgagtggctgcgggagatagaacaatatgccagcaacaag

SEQ ID NO: 173147 - DNA, 937 bp, Homo sapiens
  Payload ID: 14032
  Gene Symbol: RAB30
  Gene Name: RAB30, member RAS oncogene family
  ENST ID: ENST00000525117
  CDS Start-End: 98-382
gttcccccggagagaaggctggtgcagcttgagctctgtgggcaagtctgactgggcctttctcacttttgcctgtgtttgccttgcagctgtgtaaatgagtatggaagattatgatttcctgttcaaaattgttttaattggcaacgctggtgtggggaagacgtgcctcgtccgaagattcactcagctacagatctgggacacagcaggtcaagagagatttcggtccattacccagagttactaccgaagcgccaatgccttgatcctcacctatgacattacctgtgaggaatccttccgttgccttcctgagtggctgcgggagatagaacaatatgccagcaacaaggtcatcactgtgttagtgggtaagtaagggctaacgaggagggaaattgatttgtgggcattagaggatttataatcacataaagcttatacattggtgccttccaagaatatagtctttagctaataattcatgcagtcaaccttcagttcttctgcaattgaagagaaaatgaaataggtcctatcccatggtgacagtttagaaaaataaagtagaaaacattttctatcaatgtaggctctagggaagaagttggatggccatgaaagttatgtgagctgctaaaaatttaaaaagtctaattacaagatgaaaggaatggctgttctagaagaaaaatgtatcttttaagttgatatggaattcattattgaagcaattgtttattgcctaaaaggtggattttggtaattttttttcccttcctaacatttaggctgatttgagaaattctgtgtttcagaaagaatctgctaagggcaatgctgtagtttgtttcatcttgtaggagaataaaacctctatttagtatggggggaaagcacaaaacaacccttgattttctatcatgactgatat

SEQ ID NO: 173148 - DNA, 580 bp, Homo sapiens
  Payload ID: 14032
  Gene Symbol: RAB30
  Gene Name: RAB30, member RAS oncogene family
  ENST ID: ENST00000533014
  CDS Start-End: 1-504
tactgcagagacatccacaccaaatacagcagtgaatggggagctggagcactggaagataaaagcaggctacagatctgggacacagcaggtcaagagagatttcggtccattacccagagttactaccgaagcgccaatgccttgatcctcacctatgacattacctgtgaggaatccttccgttgccttcctgagtggctgcgggagatagaacaatatgccagcaacaaggtcatcactgtgttagtgggcaacaagattgacctggctgaaaggagagaggtttcccagcagcgagctgaagaattctcagaagctcaggacatgtattatctggagacctcagccaaggaatctgataatgtggagaaactcttccttgacttagcatgccgactcatcagtgaagccagacagaacacacttgtgaacaatgtatcctcacccttacctggagaagggaaaagcatcagctatttgacttgttgtaatttcaactaaaggctgaggcacggagaagaaaaggaatcagcaactgccctgatgggccatgagatgctggggagatctggcgatg

SEQ ID NO: 173149 - DNA, 558 bp, Homo sapiens
  Payload ID: 14032
  Gene Symbol: RAB30
  Gene Name: RAB30, member RAS oncogene family
  ENST ID: ENST00000528379
  CDS Start-End: 392-558
gaggttgctgcttgaggttgcatgggcctatggagcagggcctggggaaagaagctgtctgcttctatactcatgtgagtctctggatcatggtggtggccttctccttcactcatgtcgggacaactgagtccatggtgcatgggaaggtagagacatagctatcaccttccccagagccagtgatactgtgcctccactgaagattgctgggaggaattgaaagtttacagttcccatctcacagtgaggatgaaatgagatcagagcacctgatacatactccattggatatgactgtgcactggagccggttgtgctgttctctcagctgtacacacccatcaaatcacagtgcccctgaggacgagagaaaattgaagctgtgtaaatgagtatggaagattatgatttcctgttcaaaattgttttaattggcaacgctggtgtggggaagacgtgcctcgtccgaagattcactcagggtcttttccccccaggtcaaggagccacaattggagttgattttatgattaagacagtggagattaatggtga

SEQ ID NO: 173150 - DNA, 548 bp, Homo sapiens
  Payload ID: 14032
  Gene Symbol: RAB30
  Gene Name: RAB30, member RAS oncogene family
  ENST ID: ENST00000533276
  CDS Start-End: 372-548
ttgtgctacggtctctccaccccctgctgctgctgggcttgcgattgccgctcgctccagctgagctaagtgtagcagcagcaccagggcagggactgactccagcccttggactcaggacatcgcagaccttcccttgcgtgcgtgactcattcgcacatccatttctgtttatgcctggggtggggagaaaaatcccaaaccagtttacagttcccatctcacagtgaggatgaaatgagatcagagcacctgatacatactccattggatatgactgtgcactggagccggttgtgctgttctctcagctgtacacacccatcaaatcacagtgcccctgaggacgagagaaaattgaagctgtgtaaatgagtatggaagattatgatttcctgttcaaaattgttttaattggcaacgctggtgtggggaagacgtgcctcgtccgaagattcactcagggtcttttccccccaggtcaaggagccacaattggagttgattttatgattaagacagtggagattaatggtgaaaaagtaaag

SEQ ID NO: 173151 - DNA, 588 bp, Homo sapiens
  Payload ID: 14032
  Gene Symbol: RAB30
  Gene Name: RAB30, member RAS oncogene family
  ENST ID: ENST00000531021
  CDS Start-End: 84-588
agtgcccctgaggacgagagaaaattgaaggtaggcaatagcctggctgagggctcttgctcagcaatctttgtgctgtgtaaatgagtatggaagattatgatttcctgttcaaaattgttttaattggcaacgctggtgtggggaagacgtgcctcgtccgaagattcactcagggtcttttccccccaggtcaaggagccacaattggagttgattttatgattaagacagtggagattaatggtgaaaaagtaaagctacagatctgggacacagcaggtcaagagagatttcggtccattacccagagttactaccgaagcgccaatgccttgatcctcacctatgacattacctgtgaggaatccttccgttgccttcctgagtggctgcgggagatagaacaatatgccagcaacaaggtcatcactgtgttagtgggcaacaagattgacctggctgaaaggagagaggtttcccagcagcgagctgaagaattctcagaagctcaggacatgtattatctggagacctcagccaaggaatctgataatgtggagaaactcttccttgacttagcatgcc

SEQ ID NO: 173152 - DNA, 3746 bp, Homo sapiens
  Payload ID: 14032
  Gene Symbol: RAB30
  Gene Name: RAB30, member RAS oncogene family
  Uniprot ID: Q15771
  ENST ID: ENST00000534141
  CDS Start-End: 242-736
gtcattgcaaaagccccactgcattcattgtgctacggtctctccaccccctgctgctgctgggcttgcgattgccgctcgctccagctgagctaagtgtagcagcagcaccagggcagggactgactccagcccttggactcaggacatcgcagaccttcccttgcgtgcgtgactcattcgcacatccatttctgtttatgcctggggtggggagaaaaatcccaaaccagctgtgtaaatgagtatggaagattatgatttcctgttcaaaattgttttaattggcaacgctggtgtggggaagacgtgcctcgtccgaagattcactcagggtcttttccccccaggtcaaggagccacaattggagttgattttatgattaagacagtggagattaatggtgaaaaagtaaagctacagatctgggacacagcaggtcaagagagatttcggtccattacccagagttactaccgaagcgccaatgccttgatcctcacctatgacattacctgtgaggaatccttccgttgccttcctgagtggctgcgggagatagaacaatatgccagcaacaaggtcatcactgtgttagcaacaagattgacctggctgaaaggagagaggtttcccagcagcgagctgaagaattctcagaagctcaggacatgtattatctggagacctcagccaaggaatctgataatgtggagaaactcttccttgacttagcatgccgactcatcagtgaagccagacagaacacacttgtgaacaatgtatcctcacccttacctggagaagggaaaagcatcagctatttgacttgttgtaatttcaactaaaggctgaggcacggagaagaaaaggaatcagcaactgccctgatgggccatgagatgctggggagatctggcgatgactgtggctcccgctctctgaccttctgactcctgtgggctcctgagcttacaaagcatggcaggccaagggcctcgaccacaggccagcattagcagaacatataatggtttcacccttttccagtctggagttggagcaaggagaaaattgcactaggcactccatgatctgcagagcatgttgcttttgtttttttaaaaagcaagtaaaagcgcattcctaaacagagtccggggggaaatgtactgtagggatccctcctgcacatcagtgggtgcatgtgggaactcttctttagggcttcggtggtaatcatctgggggccctggttttcttgtctaccagataaaccaaaactgggaaggccaagtacagtctctgtggtgcgtattgacgaccccatggagattttgaaaagtgttatttctcttgtccacaggcactttcaagaactttgggatgtaaaaatgaaatgaaacctttacccatgaccaacagtaacaatcattgttttaataatatatacaagctccataactccttttggtgctaatgattccgctatttcacagaccaaacgttttagtacattaatgtccttaaatgtgttatatagaaataaaaaaatgggggaagtccatgaatcagcactctttctcaaagtctcattactacctttttaaaggtggatttttgggaaaagagaatacttttccttttatgttcccctctgaatctctaccactttcttgtctctccagccctttatgtaaatgaaaacgtttgcaaaatgaaaaaaataaacaaatggttgatgacattctaatataaaaacttagctctaacacattttgagtagtatgaggaaacagaccagatatgaccaaaatactgtggattaatggactgtagtgcagggctcctagcagagcacagtccttgatagtaggtcacatcttttacttcctggtactctccatcttggacagaccaaggcttaggattttgtagattttttagtatgataagtgagaatagcaacagatgaaaagtctcacgacccatttttatatcttcgatgataaccttagaaaaattctgctcgtggaagcagattgaactgtcatttatcccctccttcttgtaataatgttaccttcagacgcttaaccatatgttctttcttttttctttctcttttcctctctatttttctggtctctccttttcttcttccctccctccctccctccttccctcccatccttatatgcctgtgttactgcaaatctccaattcaaatggaggtgtatatgcctttacttagccaatttaaaaacaggactcaaaatgggagatgtgctgctgaatatgtgtttctttttcttcagtgccatactttgatagcttccaatttgttcactgatataaatgcaaattgggaaaataattaaacctgtatgctgttgatgctgtcagatgtttctgtagcttgctgcttagcataactgagggatgagtaatggaataaggatatgatgtgtaattccactgttgctgtagatggtgacaatctcagttctgatatgttgatgtttgaaagctatttaattgtaaagaaattagtcatgtagagacatgatgtggataaagcatttctggcatttctctagcaggttctagattgaccagtgtcttgcacatgagattatgcatattttttaaggggctgatacttttggttggcctcactgtgtttttcctgatcctgtgggaaagagaaaggcatcccagaagtttgacttgtttttcttttagaatctgtctctgcaggaaagaaaagtcattttaataaaaaccaaaataatttataataattgttgcctttccctccccatcctctccactaagccagcaactaaatgtattcagaaaacaagttaatcaaggagggcagaagaattttttttaaactgtaagaaaatgttcctaagtttagatttattacctgtcatttagggcaaaaatccagtgtccccagcacatgatgacccaactttgtctcacagttgcaagtgtgttgaaaataaagttgctttgtgaacttagaggaaatggctgtgttagattggactgatttagttgcaaaataataccttttagggtcacacttgtattattccctagggtttagccttctctatatacccttggccagactcagaaggggattaaaaagctctggtcttggcctctatcttccttgttgctcctcccagcctttccataacttacccatccacagcccatcagcaggaacacatgagaatgtgggactttgtttctttttttcttagttgtatgaattccagattaggccttatggatacttgtctactaatatatctgaagtttgaaaacaatccctgacaatattgtaggtgcaataaatattagtcaaataaacatttaagtgccaaggtggggtggtagtggttgggggagctttttttgattaaacagaaattccttcaagtagaacttgagaaaggacactaaatacagtcatcttaacccaggccagaacctaaatttattggtttgcctaacagtcttattgtcatggcaatatttgctaagatgagccttctttagataaaaatgaactctcatttagtggtggatgaaaaaagagaaattgctttatcatatagtttaatttggctcggtctactaagaccaccagggttgatgtattcctccatttttggtgtgatctttttcttcattcaataaagttattaaatatatggcaaaa

SEQ ID NO: 173153 - DNA, 792 bp, Homo sapiens
  Payload ID: 14032
  Gene Symbol: RAB30
  Gene Name: RAB30, member RAS oncogene family
  Uniprot ID: Q15771
  ENST ID: ENST00000527633
  CDS Start-End: 173-784
gattgccgctcgctccagctgagctaagtgtagcagcagcaccagggcagggactgactccagcccttggactcaggacatcgcagaccttcccttgcgtgcgtgactcattcgcacatccatttctgtttatgcctggggtggggagaaaaatcccaaaccagctgtgtaaatgagtatggaagattatgatttcctgttcaaaattgttttaattggcaacgctggtgtggggaagacgtgcctcgtccgaagattcactcagggtcttttccccccaggtcaaggagccacaattggagttgattttatgattaagacagtggagattaatggtgaaaaagtaaagctacagatctgggacacagcaggtcaagagagatttcggtccattacccagagttactaccgaagcgccaatgccttgatcctcacctatgacattacctgtgaggaatccttccgttgccttcctgagtggctgcgggagatagaacaatatgccagcaacaaggtcatcactgtgttagtgggcaacaagattgacctggctgaaaggagagaggtttcccagcagcgagctgaagaattctcagaagctcaggacatgtattatctggagacctcagccaaggaatctgataatgtggagaaactcttccttgacttagcatgccgactcatcagtgaagccagacagaacacacttgtgaacaatgtatcctcacccttacctggagaagggaaaagcatcagctatttgacttgttgtaatttcaactaaaggctgag

SEQ ID NO: 173154 - DNA, 9929 bp, Homo sapiens
  Payload ID: 14032
  Gene Symbol: RAB30
  Gene Name: RAB30, member RAS oncogene family
  Uniprot ID: Q15771
  ENST ID: ENST00000533486
  CDS Start-End: 286-897
tgctgggcttgcgattgccgctcgctccagctgagctaagtgtagcagcagcaccagggcagggactgactccagcccttggactcaggacatcgcagaccttcccttgcgtgcgtgactcattcgcacatccatttctgtttatgcctggggtggggagaaaaatcccaaaccagctccattggatatgactgtgcactggagccggttgtgctgttctctcagctgtacacacccatcaaatcacagtgcccctgaggacgagagaaaattgaagctgtgtaaatgagtatggaagattatgatttcctgttcaaaattgttttaattggcaacgctggtgtggggaagacgtgcctcgtccgaagattcactcagggtcttttccccccaggtcaaggagccacaattggagttgattttatgattaagacagtggagattaatggtgaaaaagtaaagctacagatctgggacacagcaggtcaagagagatttcggtccattacccagagttactaccgaagcgccaatgccttgatcctcacctatgacattacctgtgaggaatccttccgttgccttcctgagtggctgcgggagatagaacaatatgccagcaacaaggtcatcactgtgttagtgggcaacaagattgacctggctgaaaggagagaggtttcccagcagcgagctgaagaattctcagaagctcaggacatgtattatctggagacctcagccaaggaatctgataatgtggagaaactcttccttgacttagcatgccgactcatcagtgaagccagacagaacacacttgtgaacaatgtatcctcacccttacctggagaagggaaaagcatcagctatttgacttgttgtaatttcaactaaaggctgaggcacggagaagaaaaggaatcagcaactgccctgatgggccatgagatgctggggagatctggcgatgactgtggctcccgctctctgaccttctgactcctgtgggctcctgagcttacaaagcatggcaggccaagggcctcgaccacaggccagcattagcagaacatataatggtttcacccttttccagtctggagttggagcaaggagaaaattgcactaggcactccatgatctgcagagcatgttgcttttgtttttttaaaaagcaagtaaaagcgcattcctaaacagagtccggggggaaatgtactgtagggatccctcctgcacatcagtgggtgcatgtgggaactcttctttagggcttcggtggtaatcatctgggggccctggttttcttgtctaccagataaaccaaaactgggaaggccaagtacagtctctgtggtgcgtattgacgaccccatggagattttgaaaagtgttatttctcttgtccacaggcactttcaagaactttgggatgtaaaaatgaaatgaaacctttacccatgaccaacagtaacaatcattgttttaataatatatacaagctccataactccttttggtgctaatgattccgctatttcacagaccaaacgttttagtacattaatgtccttaaatgtgttatatagaaataaaaaaatgggggaagtccatgaatcagcactctttctcaaagtctcattactacctttttaaaggtggatttttgggaaaagagaatacttttccttttatgttcccctctgaatctctaccactttcttgtctctccagccctttatgtaaatgaaaacgtttgcaaaatgaaaaaaataaacaaatggttgatgacattctaatataaaaacttagctctaacacattttgagtagtatgaggaaacagaccagatatgaccaaaatactgtggattaatggactgtagtgcagggctcctagcagagcacagtccttgatagtaggtcacatcttttacttcctggtactctccatcttggacagaccaaggcttaggattttgtagattttttagtatgataagtgagaatagcaacagatgaaaagtctcacgacccatttttatatcttcgatgataaccttagaaaaattctgctcgtggaagcagattgaactgtcatttatcccctccttcttgtaataatgttaccttcagacgcttaaccatatgttctttcttttttctttctcttttcctctctatttttctggtctctccttttcttcttccctccctccctccctccttccctcccatccttatatgcctgtgttactgcaaatctccaattcaaatggaggtgtatatgcctttacttagccaatttaaaaacaggactcaaaatgggagatgtgctgctgaatatgtgtttctttttcttcagtgccatactttgatagcttccaatttgttcactgatataaatgcaaattgggaaaataattaaacctgtatgctgttgatgctgtcagatgtttctgtagcttgctgcttagcataactgagggatgagtaatggaataaggatatgatgtgtaattccactgttgctgtagatggtgacaatctcagttctgatatgttgatgtttgaaagctatttaattgtaaagaaattagtcatgtagagacatgatgtggataaagcatttctggcatttctctagcaggttctagattgaccagtgtcttgcacatgagattatgcatattttttaaggggctgatacttttggttggcctcactgtgtttttcctgatcctgtgggaaagagaaaggcatcccagaagtttgacttgtttttcttttagaatctgtctctgcaggaaagaaaagtcattttaataaaaaccaaaataatttataataattgttgcctttccctccccatcctctccactaagccagcaactaaatgtattcagaaaacaagttaatcaaggagggcagaagaattttttttaaactgtaagaaaatgttcctaagtttagatttattacctgtcatttagggcaaaaatccagtgtccccagcacatgatgacccaactttgtctcacagttgcaagtgtgttgaaaataaagttgctttgtgaacttagaggaaatggctgtgttagattggactgatttagttgcaaaataataccttttagggtcacacttgtattattccctagggtttagccttctctatatacccttggccagactcagaaggggattaaaaagctctggtcttggcctctatcttccttgttgctcctcccagcctttccataacttacccatccacagcccatcagcaggaacacatgagaatgtgggactttgtttctttttttcttagttgtatgaattccagattaggccttatggatacttgtctactaatatatctgaagtttgaaaacaatccctgacaatattgtaggtgcaataaatattagtcaaataaacatttaagtgccaaggtggggtggtagtggttgggggagctttttttgattaaacagaaattccttcaagtagaacttgagaaaggacactaaatacagtcatcttaacccaggccagaacctaaatttattggtttgcctaacagtcttattgtcatggcaatatttgctaagatgagccttctttagataaaaatgaactctcatttagtggtggatgaaaaaagagaaattgctttatcatatagtttaatttggctcggtctactaagaccaccagggttgatgtattcctccatttttggtgtgatctttttcttcattcaataaagttattaaatatatggcaaaacttttttcagtttccagtgaaaatgcatgatactcatgtcatggagtcaggcttgggaaaatctatgaaataatagtttgctgataatgatattttcttatggctttgtatagactacatcctcaaaggattttgtgcttctttgcccatagaaggctttttctccctttgtgtgcttttattaaatctgttgaattatattaatattttttgaatttacagggccaattatcttttttgatggattacttagattaggccatgggttcttcctggcctttctttttctcggtcttttaatcatttcacgtttttatctctccctgagtaaagtggcaagaaaactaaaaatgaaagttaaatgggttgatttgacaatgtgtcaagttctgatttagagtttataaggaaggtagaaacgattggccaaaataagatatttggatgaggattatttaagccgtttagatttggccagagacgccagatttagcaaaggactgggttcttatcttctttcattcatgaatatatgccttgggaggacactggtgattcccacagaattaggccaatgatttgccacattaccctttaagctagcccataattccaccagatcccacaccaagtttcagttcatgactcatactgaataaacgtcagttgtaaatgatgtttgaattggtcttcctactaaagtgaaacatcttcttttaagccaagccacatgaatgaaatagcacaatcagaaaaaaatctttttttttttttttgcatatcaaaccaatggccttctccactaagccagcaactaaaggtattcagaaaacaagttaatcaaggtgggcagaactttttgaactgtgaggaaatgttcctaagtttagatttattacctgtcatttagggcaaaaatctaatgtcttttttatttcttaatcttgtagaactctgtatttcatagtaatgagtacttagggatcattgctctattagcctctgggagagatcttctagagtttgccattcctttttttccaaaattttttgttgttgttgttgttgttttaactgcaactggttacttttctcaaccatggtcctgacatgtttatactatgatacttttgagacttcgctaaagaattaaaagctgtgaaacaacatttgcttctcatccttcagacaaaatgtgttccatttaagcagcatggttaaacactaattttgggataagggagggatatgttttctttactttctttttggatttcatttctgtggcatgagcctatttgcgtttggaaggaaagatgccttcctttacattcttcacactggtaattttttcatactgaattaagaaattatcatcccttcaaaacacatattaatatagcaacattagagtaagggagatggcatttcatctcctctcctcagtcccttgatgttggaatgttattatcatttccaggagccatactttgaaattaaaaacaaattgaggcattaccagtctgatgaaggaattttaaatgcaagccatttaaagaatacttgaaggatttggggagacttaggttaggaaaaagaggggaatacaattagtgcattagaacaagatgctctgtggttcagaggggtggaatgaggcctactgaatgaggccgtagggacacagatttgggttccatgtcagggcgaccattctcaaaaagttggttcactatgggacagtctgcctcaggtaatagcctctgtcaagaggcaaagatgtggagaggatccaattggttggagattggagcaggtgacctattaacctaaattccatgttgtatgtagtactttgcctctcataacatgttcaattaaatatctgttaattcatagctaatgatttttttaatggggcctcgttcttctgccacaagtgcatcccacctttatctttcagggaagaggttggttgcacgttgttaggccaagagactggccctccattatgccctatgctggacttgctttgtcggtccattcattgatgtcctgttgaatcaaaaggtattgttttagtagaagttacatgaagtatattcatttatcacttgctaaacataggccttgctctgtttaataaataatgggtgtctctttcaagattttaggataggcctttttaacagagcagaatcttctgttaaagttctcacaaacagaccaactcccaagagagatgggctggtgggtcactgacataaagcagtccacaagatctattttagaaaagtatcaatgacatttccttagttggtttgattctcttgagaatacatgagtttaaaagaactgaggtcaaattgctttatgtggaaagcaataaaaacaagtatttttgacttgcaaattagaggtaactgtaagcaatttttgctattgaagcctatggcccaaattattccacctgcaaaataactttcacccttgcaaggctgatagacggctcttcattggtctttttttatggttttgttttgtttttttaagtcattggtcttaaatctgtatggtgacaaatctatttgagtttgattgagactttcttggactcctttggacaagaggtcagagcacaaaggctagtcaccacttctttgacttcttgaggtatgagccaaaattttacttttccattgatttaaagcagaatttttggagatgctgtgttctagttcctgacggaatcggtggtggttgctgactttgacactttggagagtgatgtggggagttatatagaaggggaaacactagtttaggtgtgaggagttctagtatgccacaaattagctgagactttagacgaagcacaatatttgagcatcaatcttctcatctatgagatagacctgtcaggattattgtgaaaattagatgagataagttgaaagtacagtgcttggtaaacagttagcactcaaatattagttctttttcactttaattaagagcagactttgaatggtctgatgccaagtgtagatccttaagagacaaaacaaagaaactttcctggcttcaaagaaaagaactccatttctgaaagggtgccttaaaaggaattcatttgtctgatccatccttttgcctttgggcattactactgtcaccctccatttctttacaaacttcaggcaaggtggtctctctctctctcccaataggcaattccagggttgtaaactcattatcaggaagcttaatcttagaactgaaatacctcacagagcaatttaaacctctttcttcttgttcctattcttcatgggaagaaaactgggttgatccctatcttctttttaaggagccacatttgccatttattattgctcttttgcctatttaaaaaaaataacagtcagaaaaaataatgattattaaaatgatagtcattatttacttagtgaatgtcaggataggtatttattactcttagcttcttattggtatcagatgtagatcacggtcttactgttgattaactcttcagttatatatacatactttgattctttagttacataattgataacaaagtgtgcttctgaagaattattctggctgtatggctcttgtttcctccccttggtaaaaatggaggcatgaatctcggttttgtgatctgcttttaatttcatatatgacattatttgatgtacataattaccaacatccaaaagcgtttcttcccctttctacgtgtgcactaaattctaaaacaaaaattggaatacaaaatgcctaataaagaaaaaattcatgtacagaaaagcaaaagataatctactttgttaagataatttgtcactagctggttgaataatgcacagtttttgtttaaggttacacatttatgcctggattaaataacaatagtaaaacttgacaagtcttttgaaaaacagctgctaaacatattgctttctggaatgtaatcattagcaacaaatattctcttattctatacaattgcagaatgctagtggaactttcttgtaggttatttgacaatgaatgttaattgatttattttttaaaaatgtaaaatcctcttatccctttaaggccggtttaggctttcatgtccctgtgatagaaaatttcaaatgctggcttctaatttctactcactgaagtgtcttccagacataccagatggttggagctcctttgatagtatataagggagctacataaatgtatttgaactaactcgtgagcaaaatttctgttttcagcaaaaaaaaaaaaaaaaagaaaaaacaacaaactctgctcaaaatttcagataatacaggagtaaaaagaggtttttgataatctgaagggaaaagtgtgccccatatatcttgtacacacttttaatgcatgacttttagtatagagatgaaataaaatgcaaaatatataattctggagatctcagcagctagttaaaatatttagagaagctgctttatgaagacttagagaatccttgatctcccccacatttcctatcactccattgaaacatggatctttaatattaatacatacatagttttaactaataaacaggttaatcactgagttttatgaactcgattcttgatatttggctattggttttaagcataggatatcagtattatttgtatacagcgttatataaaatctaaccaacttcaatataagaatagtacttgattttaaatgttaatatgcaaatattaacagtatactacatcatattttatgtgttcatatattgatctttttacttaacaaaaagcctgttagaaatataacccactgatgacccgagtccaattagctgaaaaccttctgtagaaaggtgattgtatgaaaaattcaatcaacattaaaaaagggaagtggggagggaatacaaacttgaacaaaatattcttaaatgaagttgcatctctttttaaaattaagatatcattcatgcaccatacggtttatcctattaaggtgtaaacttcaatgtttttaatcatattcactaagttgtgcaacatcaccactccctaacttcagaacactttcatcacctccaaaagaaaccccataccatttgcaatcactcctcctcctccttcccccagcatccggcaaccactaatctactttctgtccctatgaatttgcctatcctggacatttcatatagtcaaacaacatgtggccttttgtgtctggcttctctaagtaagcataatgtttttaaagctcatccatgttgtagcataaatcagtacattgttttcatgtttaaataatattccattgcatgtatatgccacattttatttgtccatttatcatttgatggacatttgggttttttccaccttttgattataataatgctgctgtgaacatttatgtaaaagttttttgtatgggtgtatgttttcacatctctcttaaaaacaattagtctgacaaatcaaatcaaatcatttatgtttatttacgtagaacctcttgcaatcctgtttggagagtgcaacttacgatcttagtttaattgatcaattaggagacctctgaataaagactaactccccaatacatccataagaatttttctatgagcctgtcatttagatgtgataagcaatcaatttcatgaagactgtttcagtcttgtagaaattgagttgccatcacatagaggatttcttgtcctctgcattgtttaaaggacaactacaaatcatgctggataagagtactcattcaatcttttaggattcaatgaagtagcattttaaatatgtaagttattttatatattgtctgtcttttaaaattggactttgcttcttgaaaaaagtttgtcaaatcaccaaaccatatgactgtccattcattgtagcctatgttttctattattaagaaataattcatactgagagtaaaagaaaaagaatgtattttgtgtgcaaaggatgaatgtattaaaaactttttatttgtaacaattttttaaaaaaactaaatggaaattgctttcccatgtacttgtatataaataaacatttcctgttgcccaca

SEQ ID NO: 173155 - DNA, 673 bp, Homo sapiens
  Payload ID: 14032
  Gene Symbol: RAB30
  Gene Name: RAB30, member RAS oncogene family
  ENST ID: ENST00000534103
  CDS Start-End: 374-673
catcgtgtggcccagtctggttgtcaagatagatgctgtgtctagacagtcatctcccttgggaaatcacagttgcttaaaaaggaggcacgtggtctcctgttaagaatacaaaacaggcctgtgagctgttgaggaagaggttgctgcttgaggttgcatgggcctatggagcagggcctggggaaagaagctgtctgcttctatactcatgtgagtctctggatcatggtggtggccttctccttcactcatgtcgggacaactgagtccatggtgcatgggaaggtagagacatagctatcaccttccccagagccagtgatactgtgcctccactgaagattgctgggaggaattgaaagctgtgtaaatgagtatggaagattatgatttcctgttcaaaattgttttaattggcaacgctggtgtggggaagacgtgcctcgtccgaagattcactcagggtcttttccccccaggtcaaggagccacaattggagttgattttatgattaagacagtggagattaatggtgaaaaagtaaagctacagatctgggacacagcaggtcaagagagatttcggtccattacccagagttactaccgaagcgccaatgccttgatcctcacctatgacattacctgtgaggaatccttccgttgcctt

SEQ ID NO: 173156 - DNA, 582 bp, Homo sapiens
  Payload ID: 14032
  Gene Symbol: RAB30
  Gene Name: RAB30, member RAS oncogene family
  ENST ID: ENST00000530224
  CDS Start-End: 471-582
gtatgcagctgtgggcagagagctttggcagaaggaaagactttttgtttttttttaaatgactgtttcataatctgttggctcaaatctgctgctgccacaccctgtgcctctcagggtccctgggtcctgttgcagttatcatatgcctcacctttaacctaaatgactctgcgaagtggctgctatggaaggatttactgagtgcaaaatggattttcttccctgctctttggggcaaagctggctcagagattcttagctgcagggggaggggctggcaggcctgaaccgcagttggacttagcagccaggggttttctggttttcattaaaattctctggctgtcttttgggatagctccattggatatgactgtgcactggagccggttgtgctgttctctcagctgtacacacccatcaaatcacagtgcccctgaggacgagagaaaattgaagctgtgtaaatgagtatggaagattatgatttcctgttcaaaattgttttaattggcaacgctggtgtggggaagacgtgcctcgtccgaagattcactcagctacagatctgggacacag

SEQ ID NO: 173157 - DNA, 495 bp, Homo sapiens
  Payload ID: 14032
  Gene Symbol: RAB30
  Gene Name: RAB30, member RAS oncogene family
  ENST ID: ENST00000524635
  CDS Start-End: 269-495
agtgtagcagcagcaccagggcagggactgactccagcccttggactcaggacatcgcagaccttcccttgcgtgcgtgactcattcgcacatccatttctgtttatgcctggggtggggagaaaaatcccaaaccagctgtgtaaatgagtatggaagattatgatttcctgttcaaaattgttttaattggcaacgctggtgtggggaagacgtgcctcgtccgaagattcactcaggtcaaggagccacaattggagttgattttatgattaagacagtggagattaatggtgaaaaagtaaagctacagatctgggacacagcaggtcaagagagatttcggtccattacccagagttactaccgaagcgccaatgccttgatcctcacctatgacattacctgtgaggaatccttccgttgccttcctgagtggctgcgggagatagaacaatatgccagcaacaaggtcatcactgtgttagtgggtaa

SEQ ID NO: 173158 - DNA, 644 bp, Homo sapiens
  Payload ID: 14032
  Gene Symbol: RAB30
  Gene Name: RAB30, member RAS oncogene family
  ENST ID: ENST00000532548
  CDS Start-End: 98-466
gttcccccggagagaaggctggtgcagcttgagctctgtgggcaagtctgactgggcctttctcacttttgcctgtgtttgccttgcagctgtgtaaatgagtatggaagattatgatttcctgttcaaaattgttttaattggcaacgctggtgtggggaagacgtgcctcgtccgaagattcactcagggtcttttccccccaggtcaaggagccacaattggagttgattttatgattaagacagtggagattaatggtgaaaaagtaaagctacagatctgggacacagcaggtcaagagagatttcggtccattacccagagttactaccgaagcgccaatgccttgatcctcacctatgacattacctgtgaggaatccttccgttgccttcctgagtggctgcgggagatagaacaatatgccagcaacaaggtcatcactgtgttagtgggtaagtaagggctaacgaggagggaaattgatttgtgggcattagaggatttataatcacataaagcttatacattggtgccttccaagaatatagtctttagctaataattcatgcagtcaaccttcagttcttctgcaattgaagagaaaatgaaataggtcctatcccatggtgacagtttag

SEQ ID NO: 173159 - DNA, 9783 bp, Homo sapiens
  Payload ID: 14032
  Gene Symbol: RAB30
  Gene Name: RAB30, member RAS oncogene family
  Uniprot ID: Q15771
  ENST ID: ENST00000612684
  CDS Start-End: 140-751
actcctctcaacctttttgaggcggagagagggggctgggctgggaaggatgttggggagtgctcttggaaaatctgaggaaggcagaggtgggggactgcagtcctgtcacacacggcccgagagctgagctgtgtaaatgagtatggaagattatgatttcctgttcaaaattgttttaattggcaacgctggtgtggggaagacgtgcctcgtccgaagattcactcagggtcttttccccccaggtcaaggagccacaattggagttgattttatgattaagacagtggagattaatggtgaaaaagtaaagctacagatctgggacacagcaggtcaagagagatttcggtccattacccagagttactaccgaagcgccaatgccttgatcctcacctatgacattacctgtgaggaatccttccgttgccttcctgagtggctgcgggagatagaacaatatgccagcaacaaggtcatcactgtgttagtgggcaacaagattgacctggctgaaaggagagaggtttcccagcagcgagctgaagaattctcagaagctcaggacatgtattatctggagacctcagccaaggaatctgataatgtggagaaactcttccttgacttagcatgccgactcatcagtgaagccagacagaacacacttgtgaacaatgtatcctcacccttacctggagaagggaaaagcatcagctatttgacttgttgtaatttcaactaaaggctgaggcacggagaagaaaaggaatcagcaactgccctgatgggccatgagatgctggggagatctggcgatgactgtggctcccgctctctgaccttctgactcctgtgggctcctgagcttacaaagcatggcaggccaagggcctcgaccacaggccagcattagcagaacatataatggtttcacccttttccagtctggagttggagcaaggagaaaattgcactaggcactccatgatctgcagagcatgttgcttttgtttttttaaaaagcaagtaaaagcgcattcctaaacagagtccggggggaaatgtactgtagggatccctcctgcacatcagtgggtgcatgtgggaactcttctttagggcttcggtggtaatcatctgggggccctggttttcttgtctaccagataaaccaaaactgggaaggccaagtacagtctctgtggtgcgtattgacgaccccatggagattttgaaaagtgttatttctcttgtccacaggcactttcaagaactttgggatgtaaaaatgaaatgaaacctttacccatgaccaacagtaacaatcattgttttaataatatatacaagctccataactccttttggtgctaatgattccgctatttcacagaccaaacgttttagtacattaatgtccttaaatgtgttatatagaaataaaaaaatgggggaagtccatgaatcagcactctttctcaaagtctcattactacctttttaaaggtggatttttgggaaaagagaatacttttccttttatgttcccctctgaatctctaccactttcttgtctctccagccctttatgtaaatgaaaacgtttgcaaaatgaaaaaaataaacaaatggttgatgacattctaatataaaaacttagctctaacacattttgagtagtatgaggaaacagaccagatatgaccaaaatactgtggattaatggactgtagtgcagggctcctagcagagcacagtccttgatagtaggtcacatcttttacttcctggtactctccatcttggacagaccaaggcttaggattttgtagattttttagtatgataagtgagaatagcaacagatgaaaagtctcacgacccatttttatatcttcgatgataaccttagaaaaattctgctcgtggaagcagattgaactgtcatttatcccctccttcttgtaataatgttaccttcagacgcttaaccatatgttctttcttttttctttctcttttcctctctatttttctggtctctccttttcttcttccctccctccctccctccttccctcccatccttatatgcctgtgttactgcaaatctccaattcaaatggaggtgtatatgcctttacttagccaatttaaaaacaggactcaaaatgggagatgtgctgctgaatatgtgtttctttttcttcagtgccatactttgatagcttccaatttgttcactgatataaatgcaaattgggaaaataattaaacctgtatgctgttgatgctgtcagatgtttctgtagcttgctgcttagcataactgagggatgagtaatggaataaggatatgatgtgtaattccactgttgctgtagatggtgacaatctcagttctgatatgttgatgtttgaaagctatttaattgtaaagaaattagtcatgtagagacatgatgtggataaagcatttctggcatttctctagcaggttctagattgaccagtgtcttgcacatgagattatgcatattttttaaggggctgatacttttggttggcctcactgtgtttttcctgatcctgtgggaaagagaaaggcatcccagaagtttgacttgtttttcttttagaatctgtctctgcaggaaagaaaagtcattttaataaaaaccaaaataatttataataattgttgcctttccctccccatcctctccactaagccagcaactaaatgtattcagaaaacaagttaatcaaggagggcagaagaattttttttaaactgtaagaaaatgttcctaagtttagatttattacctgtcatttagggcaaaaatccagtgtccccagcacatgatgacccaactttgtctcacagttgcaagtgtgttgaaaataaagttgctttgtgaacttagaggaaatggctgtgttagattggactgatttagttgcaaaataataccttttagggtcacacttgtattattccctagggtttagccttctctatatacccttggccagactcagaaggggattaaaaagctctggtcttggcctctatcttccttgttgctcctcccagcctttccataacttacccatccacagcccatcagcaggaacacatgagaatgtgggactttgtttctttttttcttagttgtatgaattccagattaggccttatggatacttgtctactaatatatctgaagtttgaaaacaatccctgacaatattgtaggtgcaataaatattagtcaaataaacatttaagtgccaaggtggggtggtagtggttgggggagctttttttgattaaacagaaattccttcaagtagaacttgagaaaggacactaaatacagtcatcttaacccaggccagaacctaaatttattggtttgcctaacagtcttattgtcatggcaatatttgctaagatgagccttctttagataaaaatgaactctcatttagtggtggatgaaaaaagagaaattgctttatcatatagtttaatttggctcggtctactaagaccaccagggttgatgtattcctccatttttggtgtgatctttttcttcattcaataaagttattaaatatatggcaaaacttttttcagtttccagtgaaaatgcatgatactcatgtcatggagtcaggcttgggaaaatctatgaaataatagtttgctgataatgatattttcttatggctttgtatagactacatcctcaaaggattttgtgcttctttgcccatagaaggctttttctccctttgtgtgcttttattaaatctgttgaattatattaatattttttgaatttacagggccaattatcttttttgatggattacttagattaggccatgggttcttcctggcctttctttttctcggtcttttaatcatttcacgtttttatctctccctgagtaaagtggcaagaaaactaaaaatgaaagttaaatgggttgatttgacaatgtgtcaagttctgatttagagtttataaggaaggtagaaacgattggccaaaataagatatttggatgaggattatttaagccgtttagatttggccagagacgccagatttagcaaaggactgggttcttatcttctttcattcatgaatatatgccttgggaggacactggtgattcccacagaattaggccaatgatttgccacattaccctttaagctagcccataattccaccagatcccacaccaagtttcagttcatgactcatactgaataaacgtcagttgtaaatgatgtttgaattggtcttcctactaaagtgaaacatcttcttttaagccaagccacatgaatgaaatagcacaatcagaaaaaaatctttttttttttttttgcatatcaaaccaatggccttctccactaagccagcaactaaaggtattcagaaaacaagttaatcaaggtgggcagaactttttgaactgtgaggaaatgttcctaagtttagatttattacctgtcatttagggcaaaaatctaatgtcttttttatttcttaatcttgtagaactctgtatttcatagtaatgagtacttagggatcattgctctattagcctctgggagagatcttctagagtttgccattcctttttttccaaaattttttgttgttgttgttgttgttttaactgcaactggttacttttctcaaccatggtcctgacatgtttatactatgatacttttgagacttcgctaaagaattaaaagctgtgaaacaacatttgcttctcatccttcagacaaaatgtgttccatttaagcagcatggttaaacactaattttgggataagggagggatatgttttctttactttctttttggatttcatttctgtggcatgagcctatttgcgtttggaaggaaagatgccttcctttacattcttcacactggtaattttttcatactgaattaagaaattatcatcccttcaaaacacatattaatatagcaacattagagtaagggagatggcatttcatctcctctcctcagtcccttgatgttggaatgttattatcatttccaggagccatactttgaaattaaaaacaaattgaggcattaccagtctgatgaaggaattttaaatgcaagccatttaaagaatacttgaaggatttggggagacttaggttaggaaaaagaggggaatacaattagtgcattagaacaagatgctctgtggttcagaggggtggaatgaggcctactgaatgaggccgtagggacacagatttgggttccatgtcagggcgaccattctcaaaaagttggttcactatgggacagtctgcctcaggtaatagcctctgtcaagaggcaaagatgtggagaggatccaattggttggagattggagcaggtgacctattaacctaaattccatgttgtatgtagtactttgcctctcataacatgttcaattaaatatctgttaattcatagctaatgatttttttaatggggcctcgttcttctgccacaagtgcatcccacctttatctttcagggaagaggttggttgcacgttgttaggccaagagactggccctccattatgccctatgctggacttgctttgtcggtccattcattgatgtcctgttgaatcaaaaggtattgttttagtagaagttacatgaagtatattcatttatcacttgctaaacataggccttgctctgtttaataaataatgggtgtctctttcaagattttaggataggcctttttaacagagcagaatcttctgttaaagttctcacaaacagaccaactcccaagagagatgggctggtgggtcactgacataaagcagtccacaagatctattttagaaaagtatcaatgacatttccttagttggtttgattctcttgagaatacatgagtttaaaagaactgaggtcaaattgctttatgtggaaagcaataaaaacaagtatttttgacttgcaaattagaggtaactgtaagcaatttttgctattgaagcctatggcccaaattattccacctgcaaaataactttcacccttgcaaggctgatagacggctcttcattggtctttttttatggttttgttttgtttttttaagtcattggtcttaaatctgtatggtgacaaatctatttgagtttgattgagactttcttggactcctttggacaagaggtcagagcacaaaggctagtcaccacttctttgacttcttgaggtatgagccaaaattttacttttccattgatttaaagcagaatttttggagatgctgtgttctagttcctgacggaatcggtggtggttgctgactttgacactttggagagtgatgtggggagttatatagaaggggaaacactagtttaggtgtgaggagttctagtatgccacaaattagctgagactttagacgaagcacaatatttgagcatcaatcttctcatctatgagatagacctgtcaggattattgtgaaaattagatgagataagttgaaagtacagtgcttggtaaacagttagcactcaaatattagttctttttcactttaattaagagcagactttgaatggtctgatgccaagtgtagatccttaagagacaaaacaaagaaactttcctggcttcaaagaaaagaactccatttctgaaagggtgccttaaaaggaattcatttgtctgatccatccttttgcctttgggcattactactgtcaccctccatttctttacaaacttcaggcaaggtggtctctctctctctcccaataggcaattccagggttgtaaactcattatcaggaagcttaatcttagaactgaaatacctcacagagcaatttaaacctctttcttcttgttcctattcttcatgggaagaaaactgggttgatccctatcttctttttaaggagccacatttgccatttattattgctcttttgcctatttaaaaaaaataacagtcagaaaaaataatgattattaaaatgatagtcattatttacttagtgaatgtcaggataggtatttattactcttagcttcttattggtatcagatgtagatcacggtcttactgttgattaactcttcagttatatatacatactttgattctttagttacataattgataacaaagtgtgcttctgaagaattattctggctgtatggctcttgtttcctccccttggtaaaaatggaggcatgaatctcggttttgtgatctgcttttaatttcatatatgacattatttgatgtacataattaccaacatccaaaagcgtttcttcccctttctacgtgtgcactaaattctaaaacaaaaattggaatacaaaatgcctaataaagaaaaaattcatgtacagaaaagcaaaagataatctactttgttaagataatttgtcactagctggttgaataatgcacagtttttgtttaaggttacacatttatgcctggattaaataacaatagtaaaacttgacaagtcttttgaaaaacagctgctaaacatattgctttctggaatgtaatcattagcaacaaatattctcttattctatacaattgcagaatgctagtggaactttcttgtaggttatttgacaatgaatgttaattgatttattttttaaaaatgtaaaatcctcttatccctttaaggccggtttaggctttcatgtccctgtgatagaaaatttcaaatgctggcttctaatttctactcactgaagtgtcttccagacataccagatggttggagctcctttgatagtatataagggagctacataaatgtatttgaactaactcgtgagcaaaatttctgttttcagcaaaaaaaaaaaaaaaaagaaaaaacaacaaactctgctcaaaatttcagataatacaggagtaaaaagaggtttttgataatctgaagggaaaagtgtgccccatatatcttgtacacacttttaatgcatgacttttagtatagagatgaaataaaatgcaaaatatataattctggagatctcagcagctagttaaaatatttagagaagctgctttatgaagacttagagaatccttgatctcccccacatttcctatcactccattgaaacatggatctttaatattaatacatacatagttttaactaataaacaggttaatcactgagttttatgaactcgattcttgatatttggctattggttttaagcataggatatcagtattatttgtatacagcgttatataaaatctaaccaacttcaatataagaatagtacttgattttaaatgttaatatgcaaatattaacagtatactacatcatattttatgtgttcatatattgatctttttacttaacaaaaagcctgttagaaatataacccactgatgacccgagtccaattagctgaaaaccttctgtagaaaggtgattgtatgaaaaattcaatcaacattaaaaaagggaagtggggagggaatacaaacttgaacaaaatattcttaaatgaagttgcatctctttttaaaattaagatatcattcatgcaccatacggtttatcctattaaggtgtaaacttcaatgtttttaatcatattcactaagttgtgcaacatcaccactccctaacttcagaacactttcatcacctccaaaagaaaccccataccatttgcaatcactcctcctcctccttcccccagcatccggcaaccactaatctactttctgtccctatgaatttgcctatcctggacatttcatatagtcaaacaacatgtggccttttgtgtctggcttctctaagtaagcataatgtttttaaagctcatccatgttgtagcataaatcagtacattgttttcatgtttaaataatattccattgcatgtatatgccacattttatttgtccatttatcatttgatggacatttgggttttttccaccttttgattataataatgctgctgtgaacatttatgtaaaagttttttgtatgggtgtatgttttcacatctctcttaaaaacaattagtctgacaaatcaaatcaaatcatttatgtttatttacgtagaacctcttgcaatcctgtttggagagtgcaacttacgatcttagtttaattgatcaattaggagacctctgaataaagactaactccccaatacatccataagaatttttctatgagcctgtcatttagatgtgataagcaatcaatttcatgaagactgtttcagtcttgtagaaattgagttgccatcacatagaggatttcttgtcctctgcattgtttaaaggacaactacaaatcatgctggataagagtactcattcaatcttttaggattcaatgaagtagcattttaaatatgtaagttattttatatattgtctgtcttttaaaattggactttgcttcttgaaaaaagtttgtcaaatcaccaaaccatatgactgtccattcattgtagcctatgttttctattattaagaaataattcatactgagagtaaaagaaaaagaatgtattttgtgtgcaaaggatgaatgtattaaaaactttttatttgtaacaattttttaaaaaaactaaatggaaattgctttcccatgtacttgtatataaataaacatttcctgttgcccaca

SEQ ID NO: 173160 - DNA, 4055 bp, Homo sapiens
  Payload ID: 14033
  Gene Symbol: RAB31
  Gene Name: RAB31, member RAS oncogene family
  Uniprot ID: Q13636
  ENST ID: ENST00000578921
  CDS Start-End: 242-829
ccgtccgggggcgttcctgggagctgggggccggcgaggctggacccgacgcgcccgggaggagccggccggcggccacgtgacccaccgcggcggggccggcggcccagaaatagcagcggcggcggttccgcccgcgggcggcgcgagcgaggggcagaggcgagagacgccggcggggcgcgggcgcggcggccccggaggatgctgctgagccccggcactgcctggctgcgagcacatgatggcgatacgggagctcaaagtgtgccttctcggggacactggggttgggaaatcaagcatcgtgtgtcgatttgtccaggatcactttgaccacaacatcagccctactattggggcatcttttatgaccaaaactgtgccttgtggaaatgaacttcacaagttcctcatctgggacactgctggtcaggaacggtttcattcattggctcccatgtactatcgaggctcagctgcagctgttatcgtgtatgatattaccaagcaggattcattttataccttgaagaaatgggtcaaggagctgaaagaacatggtccagaaaacattgtaatggccatcgctggaaacaagtgcgacctctcagatattagggaggttcccctgaaggatgctaaggaatacgctgaatccataggtgccatcgtggttgagacaagtgcaaaaaatgctattaatatcgaagagctctttcaaggaatcagccgccagatcccacccttggacccccatgaaaatggaaacaatggaacaatcaaagttgagaagccaaccatgcaagccagccgccggtgctgttgacccaagggccgtggtccacggtacttgaagaagccagagcccacatcctgtgcactgctgaaggaccctacgctcggtggcctggcacctcactttgagaagagtgagcacactggctttgcatcctggaagacctgcagggggcggggcaggaaatgtacctgaaaaggattttagaaaaccctgggaaaacccaccacaccaccacaaaatggcctttagtgtatgaaatgcacatggaggggatgtagttgcatttttgctaaaaaaaaaaaaaaacctttaaaaattgttggatgtgtacaaaagtcttactgccttattatgtgtatgggattctaaagtggcattccacttggatttcctgtgctacctatccaaattccagtaactacttcagtgtcattgcctttgttacctaaccaaccttcactgaaaggcaaatttagttcaggaggttagtttttagctagctttggaagtaagcctttatttattactttttggaggaaatcagagaagtgtcaatggaccgtcactcagactgagacttgagttattacagaagccaggaaaagtgtattagaaactgttgtctacaccacttttaattggtgaacaatttttctaagttatggtcatatatacccaaacaaaccaaatcaaactaaattactgcatataattttgggattgggtggcctagtttgaaagagtgatttaagtaatcactatgtaagtggtgagagatgcaggacatacacattattcaagagaccacctgacatgcatctcctccgcaggaatacattcgtcctctcttagagaagtttaacgcacatagtattattttactaagagaatatctcttggtgtcatatctaggggaagagaattaactagaattaaatttaatgtttgaatctaaatcattgggcaaacttctaataataacaattaataataggttacaggaaagccagccagaggaagtgtcagcactttaaaattctagaccccaaaaaactacaaaatcagaaaaagtatttttatgtttctagcttgaggagaagggctttagggctaaccagaggtctgaccctagaatgccaaggaactgagaatgggctccgatgaaaaccttccttttcagattccctgtctgctcaattaaagatgtttgaatccaaaggaagtcaaggaagaaaaagcatggaaaggaagagaactgattcctactgaaaattcaaattctattaccattctaactttcataaaaagttgggatcaagaagcagctgatttcctgccagggcttatattagggggtgattcttaaaggacattaggattggtgctcagaaatggttaatcatgctgtgtgctagccagggccagctggtaccttctttgccatgagcattcaagggacggctaacctttattgacaatctatatcgcaaaagtcaggaaagaggttgtgagctgattggattaaagacctggcacttcagtaactcagcacgcttccacttcactcaacttaagagagttcattgacagtgttaggatgtgaaggctgggaaacacttattttgcttcaagagttccacttggctctcccaaataggtacctcaaaaactgttagcaagcggcatttggatgtcttgacaggggctttgcagggatttttagggttttttccacattgtccacattaatggttggcatgattgtgcttgcaggccaagaaatgatcataccccttgccaaaggtaaaaaaaaaaaaaaaaaaatgagttgaaaattgaagtgacctctttccagctgagttgcaggcttattttgtaacctttcctcatccagttttccctgagaacctgggtttatctctagatagctgttcaggttttttagctgaggggtaagtatcctagctgagagttttgcatctttgggctgggtttgcagtggttgtgttttgcataaaatgtctagtctttgccacagatagtgagctacccactaatgagcccatggttttatttcagaagcacatgagggtgtgaaaccactctgttacctttctgtattgtcttagctattcaagccagtcagaggataatatatatattctcatcagcactcagagtagtcagtgaagagagtagatcacacttgggcacaccaggattcacataaacattgtatcttctctgtggatgctcaggccttgtctacaatgaggctttacaaccttcctttgttttggctcgggattacttcctggctgtctaataattgaaccataaccatgtaatattatgtaaaggcctggaaattactgttgctaaaaaaagtcatgtagtttcatgtagtgtagcatccttggcatcgttttccaaaatttgttccttctcccttttttttttctttcgtgtgtggcatgagtgtgtatctgtgtaaatatgattgtatatgtgttactccgatatgtaatccatttcactggctgagtttggcccctagccatgtgttaatataaagtaggcatggcttcccaatggaaatctctgagaatgacagtggagttgtgcaagcattttacattgccacataattgacttgccattttatggttaaaaacggcacattaggcagttgaatatgacgttaccttgcagactaaaaggttgaaggcccgaaactaacttttagctaacaataagggctgtgccccaatggaaactgagttcattttctgagaaaggtttggatgactgaaatatttcctctacagtcaaggactttggcatgtggtggctgaaactgagcttttttgtgtgggctccagttctcactgttctgcaatgctcatggcaagttgaatggtgagctagcttataaattaaagagctctgaactgtattcagaccgactgggtatctagcttactgttttaacatcattgttgaaaccagaccctgtagtccagtggtgctgccctgttgtgcaaactgctcctttttctcgtgtttttgtaaagagcttccatctgggctggacccagttcttgcacatacaagacaccgctgcagtcagctaggacctttccgccatgtattctattctgtagtaaagcatttccatcaacaatgcctaattgtatctgttatttttggtttaacacacactgattcatactaataaatattttcagtttta

SEQ ID NO: 173161 - DNA, 783 bp, Homo sapiens
  Payload ID: 14033
  Gene Symbol: RAB31
  Gene Name: RAB31, member RAS oncogene family
  ENST ID: ENST00000578734
  CDS Start-End: 132-209
aaatagcagcggcggcggttccgcccgcgggcggcgcgagcgaggggcagaggcgagagacgccggcggggcgcgggcgcggcggccccggaggatgctgctgagccccggcactgcctggctgcgagcacatgatggcgatacgggagctcaaagtgtgccttctcgggggcatcttttatgaccaaaactgtgccttgtggaaatgaacttcacaagttcctcatctgggacactgctggtcaggaacggtttcattcattggctcccatgtactatcgaggctcagctgcagctgttatcgtgtatgatattaccaagcaggattcattttataccttgaagaaatgggtcaaggagctgaaagaacatggtccagaaaacattgtaatggccatcgctggaaacaagtgcgacctctcagatattagggaggttcccctgaaggatgctaaggaatacgctgaatccataggtgccatcgtggttgagacaagtgcaaaaaatgctattaatatcgaagagctctttcaaggaatcagccgccagatcccacccttggacccccatgaaaatggaaacaatggaacaatcaaagttgagaagccaaccatgcaagccagccgccggtgctgttgacccaagggccgtggtccacggtacttgaagaagccagagcccacatcctgtgcactgctgaaggaccctacgctcggtggcctggcacctcactttgagaagagtgagcacactggctttgcatcctggaagacctgcaggggg

SEQ ID NO: 173162 - DNA, 714 bp, Homo sapiens
  Payload ID: 14033
  Gene Symbol: RAB31
  Gene Name: RAB31, member RAS oncogene family
  ENST ID: ENST00000583137
  CDS Start-End: 84-263
agaggcgagagacgccggcggggcgcgggcgcggcggccccggaggatgctgctgagccccggcactgcctggctgcgagcacatgatggcgatacgggagctcaaagtgtgccttctcgggggactgatggaaccgatctgttcccttacgaagtgtcacagtattggcaggactctggacaaggacaaggaaggctgcattcctgtggcaccaccaggtggaagatggaggtatgttctcagaacacctgcgactgggtaatatataaagaaattggctcacgattctggtggctggaaagtccaggacggggcagctgcatctggtgagggcctcagtctgcttccactcatggcagaaagtggaagcgaagtgggtgtgtgcaaagagatcacatggtgtgaaggacagaggcttagccatgtgaaatgtttttgctcaatgtcataaaggccatgtgggaagtggaccctaagccaggcagtgtgactgctccagggttcccagctccacagtgcaggaggtcaaaacaaccttgatgttatcgtacttaccgtaaatcttgctgtaaagcagttgttccgcacatcccttctgaagcacggacactgtccccctgtggtgcgtaagccctgggcctggggatggtagcacagggatcccccatttcgcctgtgggccacccgagacgcggctcctgttcatacgtccc

SEQ ID NO: 173163 - DNA, 469 bp, Homo sapiens
  Payload ID: 14033
  Gene Symbol: RAB31
  Gene Name: RAB31, member RAS oncogene family
  ENST ID: ENST00000581109
  CDS Start-End: 100-324
ggcgcgagcgaggggcagaggcgagagacgccggcggggcgcgggcgcggcggccccggaggatgctgctgagccccggcactgcctggctgcgagcacatgatggcgatacgggagctcaaagtgtgccttctcggggacactggggttgggaaatcaagcatcgtgtgtcgatttgtccaggatcactttgaccacaacatcagccctactattggggcatcttttatgaccaaaactgtgccttgtggaaatgaacttcacaagttcctcatctgggacactgctggtcaggaacggggaggttcccctgaaggatgctaaggaatacgctgaatccataggtgccatcgtggttgagacaagtgcaaaaaatgctattaatatcgaagagctctttcaaggaatcagccgccagatcccacccttggacccccatgaaaatggaaacaatggaacaatcaaagtt

SEQ ID NO: 173164 - DNA, 1217 bp, Homo sapiens
  Payload ID: 14034
  Gene Symbol: RAB32
  Gene Name: RAB32, member RAS oncogene family
  Uniprot ID: Q13637
  ENST ID: ENST00000367495
  CDS Start-End: 180-857
ggccgcgagcactggcgggttctgggtcctgtgaccggtcaggcggcgtcagcgggcgcggcggagggctggccggcctcgggggagtttccgcggccgccgggggcgcggcggcagagcgcgaggccgggcagggggccagactcggagtcgaggcgcgcccgacagccgcagcgctcatggcgggcggaggagccggggaccccggcctgggggcggccgccgccccagcgcccgagacccgcgagcacctcttcaaggtgctggtgatcggcgagcttggcgtgggcaagaccagcatcatcaagcgctacgtccaccagctcttctcccagcactaccgggccaccatcggggtggacttcgccctcaaggtcctcaactgggacagcaggactctggtgcgcctgcagctgtgggacatcgcggggcaggagcgatttggcaacatgacccgagtatactacaaggaagctgttggtgcttttgtagtctttgatatatcaagaagttccacatttgaggcagtcttaaaatggaaaagtgatctggatagtaaagttcatcttccaaatggcagccctatccctgctgtcctcttggctaacaaatgtgaccagaacaaggacagtagccagagtccttcccaggtggaccaattctgcaaagaacatggctttgccggatggtttgaaacctctgcaaaggataacataaacatagaggaagctgcccggttcctagtggagaagattcttgtaaaccaccaaagctttcctaatgaagaaaacgatgtggacaaaattaagctagatcaagagaccttgagagcagagaacaaatcccagtgttgctgatatatggcttctgcttctcttgtgtgtgcctcagctctgaagaagttcctgagaatgggttacagatgtcatgttagctgggagtcttcccacatgtggcacttcaaaaggcagcaccactgggcgcctgcacttatttgaaaatggaactttgggagaagtatccctgctagtggctctgtaacttaacagatgacaattaggcttttgtcattgttgccatcatatggaagataatgtttacatccttttaaacatttttatatgacaattcctcaggatttggtaaggcttccaagttgtagcttttagtgtaagtgctggggtggtaataaaatgttacctccagtcttatggtca

SEQ ID NO: 173165 - DNA, 1258 bp, Homo sapiens
  Payload ID: 14035
  Gene Symbol: RAB33A
  Gene Name: RAB33A, member RAS oncogene family
  Uniprot ID: Q14088
  ENST ID: ENST00000257017
  CDS Start-End: 415-1128
cgggtccgtcccgggaatgcaggcaggggagggtgtgggccgaggcgcggcggcggctggagcagcgcggtagggtccttcgccagagcatccggtccgagggcgcacacaggcagaaggctcgcggctcgtccactctcctccctctctcctcctctccctggcttttgtgttggtgcctccgagctgcaaggagggtgcgctggaggaggaggaggggggcccggagtgagaggcacccccttcacgcgcgcgcgcgcacacggtgccggcgcacgcacacacgggcggacacacacacacgcgcgcacacacacacgcacagagctcgctcgcctcgagcgcacgaacgtggacgttctctttgtgtggagccctcaaggggggttggggccccggttcggtccgggggagatggcgcagcccatcctgggccatgggagcctgcagcccgcctcggccgctggcctggcgtccctggagctcgactcgtcgctggaccagtacgtgcagattcgcatcttcaaaataatcgtgattggggactccaacgtgggcaagacctgcctgaccttccgcttctgcgggggtaccttcccagacaagactgaagccaccatcggcgtggacttcagggagaagaccgtggaaatcgagggcgagaagatcaaggttcaggtgtgggacacagcaggtcaggaacgtttccgcaaaagcatggtcgagcattactaccgcaacgtacatgccgtggtcttcgtctatgacgtcaccaagatgacatctttcaccaacctcaaaatgtggatccaagaatgcaatgggcatgctgtgcccccactagtccccaaagtgcttgtgggcaacaagtgtgacttgagggaacagatccaggtgccctccaacttagccctgaaatttgctgatgcccacaacatgctcttgtttgagacatcggccaaggaccccaaagagagccagaacgtggagtcgattttcatgtgcttggcttgccgattgaaggcccagaaatccctgctgtatcgtgatgctgagaggcagcaggggaaggtgcagaaactggagttcccacaggaagctaacagtaaaacttcctgtccttgttgaaaccaaacgatataaatacaagataaattatcactggagttttttctttcccttttttctgtgcctgcataatgctgacacctgcttgtttccatacaaattgatatcaaaataaaatttgtatagatta

SEQ ID NO: 173166 - DNA, 4562 bp, Homo sapiens
  Payload ID: 14036
  Gene Symbol: RAB33B
  Gene Name: RAB33B, member RAS oncogene family
  Uniprot ID: Q9H082
  ENST ID: ENST00000305626
  CDS Start-End: 390-1079
gcttcctccagagggcgggaaccttggacgtggcggggctgggtcagtcagggcgctgggcccagcctctctgcaggctggccttccgcgctgccgtgaagcccccgacaggtcccacgcctgcctaggtagaccggcgccagcccgagtgacgcctggcgtgtggccgcgggcaggcggctccgtgcggcggggcgggcgggtgccacacctgtgcgggcaagggcggggcgggaaggtgcgcaggcgcgctcggggctggtgggcggtggctcctgggaagttgcgcagccgaactggccggctgggcgcgcgctcttgcggtggcgtaatctctcagcctttctgtgtctcctttcctccgcctcagtttggggcgggtcgggggaatggctgaggagatggagtcgtcgctcgaggcaagcttttcgtccagcggggcagtgtcaggggcctcagggtttttgcctcctgcccgctcccgcatcttcaagataatcgtgatcggcgactccaatgtgggcaagacatgcctgacctaccgcttctgcgctggccgcttccccgaccgcaccgaggccacgataggggtggatttccgagaacgagcggtggagattgatggggagcgcatcaagatccagctatgggacacagcaggacaagaacgattcagaaagagcatggttcagcactactacagaaatgtacatgctgttgtcttcgtgtatgatatgaccaacatggctagttttcatagcctaccatcttggatagaagaatgcaaacaacatttgctagccaatgatataccacggattcttgttggaaataaatgtgacttgagaagtgccatacaggtacccacagacttggcacaaaaatttgctgacacacacagtatgcctttgtttgaaacgtctgctaaaaaccccaatgataatgaccatgtggaagctatatttatgaccttggctcataagcttaagagccacaaaccattaatgcttagtcagccccctgataatggaattatcctgaagcctgaaccaaagcctgcaatgacgtgctggtgctaaataacagtctttattatattatctaattttgactaaagaaatacttttgaagtatgacagtattaagtcataagatttaatctcaactataatgggtcatcttgacactttgctgtttgtcattgtcacgcttttgtattttgtatctacttaagtttgtcactgtgacaacacaggaaaagttggttttcaggtgagattgaaaatgaagcaaagataggatgaatctgaacatctctccatctagagcccaatgaaggaagcttcaaatgagaacatgatggaatcagtaaccattcaatcttttgtcctaggattggaaaaaaatgttaaaggtttaggacacacctaatagtatgtcctttgaatgggaagtgttcttaataggataaaaactggtatttgcctctccccagagtactttttttgttttttcatagagacggggtcttgctatgttgtccaggctggccttgagctcctgggctcaagcaatcctcccacctcagcctccccagtactgggactgtaggtactcaccactgcatctggcctttctttgttttattaacatatttagttttgttattattggtatgttttagagccaagactttagttccagtgggataagaaggcatagaatgttttctggttcccagtccataaagaatgacttttccaagagttctagatgtttgattttctaattaatacttatcagatctacaaaaatcattattattttaaaagagttatttgagtttctttctttctttttttttttttttttttttgagatggagtctcgctctgtctccaggctggagtgcagtggcgtcatctcggctcactgcaacctccgcctcccaggttcaagtgattctcctgcctcagcctcccgagtagctgggattacaggcgtgcactaccacacccagctgatttttgtatttttagtatagatggggtttcaccatgttggccaggatggtctcgatctcttgacctcatgatccacccgcctcagcttcccaaagtgctgggattacaggtgtgagtcactgcacccagccgagttgctttcttactaaatcctattaaaatatgcaaaaataagtcagattttaaggcaaataaagtgacataaggtgctttatattttattttggtatatttaaacagtgaaaaactaactgaaagcacatgaagagttgtaacttgggggaaaataggtaaacatagcttctagctaacacaggagacctattcttagcctttactaatttcaagcagtgtatcccatatggtatctcttgctcttccttcaactccaataaatttaatgactaaatgccaagttaacaaatcaacttccatttggattgtaggtgtgaaggcacaactctaattgctattagtctacatgtatttctgtaatagtattgtgtcatatcaatttttaagatgtctaaattttatggtcacaagttatccctcctcagtatgaaaaataaattagatattgaaaaatgtctaaacttcagtgatggaaagaatatttcaagaagttttttaacctaaatacttttattttgaatttaagtctttgcacataaaatatagcaagcttacatattaaactatttacgtaaatggaatgtaagccatgactttaactgaagtgttcacattcactaattttgatagattgctgtccttaataattttggaggaaattaagccaaatgattattgtactacagtattttcagaatatgggaaatcaattaaaaatgtaatctaatctagtttaagatttttgtttaatcatcatggtggtcctacctggataatttaactataaagacaaagtaattctattaaatgaactaactgaaaataataattataggaagtgattattccattttaagtattagagctcaaattggctttatttgcatttagggagatcatgttttcttaatcatgctggaatttaaaaattgttttacttgtatcgaaattaaccttgatttataactatttttgtaataaaacaatgacagctgtagtaactatgatgggtgtaacaacatttttttaaagaagggaatctgtttatcgcttttcaaaatattttctaaagtgggggaagaaagtttatagactttccaagcacatttatggttttttattactattattatggttttaaaaagagtaactttatttctttttgtaaggaattaagtaatatcctttacagttctgtgaaaggacttattttttaactgtaatatttattagttttaaaatatttgtatctcatttgtaacaatttgttttaattttttatatatatgtttttatttttaaaaaacataccagttgaatggggttaaagctttcaatatcttaaaatatttataaaacatttcactgttgcaaaatcacttccaaaatgatagctatctaacaactaattactaatttttaaagaacaaatcacacatttaaaaaatctgtagaatttattttaactatgacctttaattgaaaataaataattaaaatatcagacatgttttggaaaagtcttaatttgagaacaccaaaggaaactaccccagaatctaatgtagttcgctattaataacaatgcattattgaaagtatattgcaaatacatgtttcctcatgaaatctaagtaattttgttgtggaatagtgtcactgttacatttcccccatgaagttcaataaaccagcttagccacaaagaaattgtgttttattttctttgtttggttactgggtagagtataaaataaaacaatctttttttcctcctggtttccagataatattatatatatgatacacttttgaaaacaacaaaaagcccccaacccattggacaattattttcttgtatacatttgaggtcaaagaacacttcaggaaaaaaactcaacaaagtattaaaattagctgataacacagcttttgtatttgtgtgttttagtaatccagcttgttttagaatagttcagtgcaaaaagcaaatggtgcaagaggagttgatgtgtatttagacgtaaaagcatttaacagaatgaataactatagaaagtatgagaaaagagaacgaactacgtctcaggtataagattgcagttactgatttagacaccataggattagggatgtgggggcctctgatgttgattctgcttcccctggtcagtttattttacgtataagttacccttgtgttcaaacacaaaattgacattattcatgaaggactgctttcttaatcagatattaagaagttcgtcatgtattttgggagcacgtttgctacagcctgtgtggcaagggcgaatgcacttggtttgttggaataacctgatttatcaaacatttatcaagtatgggtcatgtgttctctatttgtgttagtggagctacata

SEQ ID NO: 173167 - DNA, 1060 bp, Homo sapiens
  Payload ID: 14037
  Gene Symbol: RAB34
  Gene Name: RAB34, member RAS oncogene family
  ENST ID: ENST00000353676
  CDS Start-End: 429-1060
ctccttgggccccttctctccccctttcccctccctgctggttcctggcatcgccagatgctgcgcagcagtctccgattccccatcaccaattcggctggggtctgcgcgggcccggcccccaccagacgggactccccgcccccaattggcggccgaagagtctcctcgccccagagtcatcttcgggacgcccagggcccgggtgattttgggctcgccgcggccccgggtgattgtttcatctccgtggcccgcggtggtcgtagcgtctccgagaccgcggactcccgtagggtccccgtggccccgagttgtagtcgggacaccccggccgcgggtgatcgtcgggtctccacgcgcccgggtcgctgacgcggatccggcctcggcgccttctcagggcgccctgcaaggccgcaggcaggatgaacattctggcacccgtgcggagggatcgcgtcctggcggagctgccccagtgcctgaggaaggaggccgctttgcacgggcacaaagacttccacccccgcgtcacctgcgcctgccaggagcaccggacaggcaccgtgggatttaagatctccaaggtcattgtggtgggggacctgtcggtggggaagacttgcctcattaataggttctgcaaagacacctttgataagaattacaaggccaccattggagtggacttcgagatggaacgatttgaggtgctgggcattcccttcagtttgcagctttgggataccgctgggcaggagaggttcaaatgcattgcatcaacctactatagaggagctcaagccatcatcattgtcttcaacctgaatgatgtggcatctctggaacataccaagcagtggctggccgatgccctgaaggagaatgacccttccagtgtgcttctcttccttgtaggttccaagaaggatctgagtacccctgctcagtatgcgctgatggagaaagacgccctccaggtggcccaggagatgaaggctgagtactgggcagtctcatctctcactggtgagaatgtccgagaattcttcttccg

SEQ ID NO: 173168 - DNA, 1592 bp, Homo sapiens
  Payload ID: 14037
  Gene Symbol: RAB34
  Gene Name: RAB34, member RAS oncogene family
  Uniprot ID: Q9BZG1
  ENST ID: ENST00000301043
  CDS Start-End: 454-1233
cagccttgaaggaaaagacgccagacttcagacgtctctctcctcggtgggcacctcattctaaccctggcacccccttcgcacgcttcccctccaccatcctcacccccgacctcccagggcagaagggcgagagggggcagactctatgagtcacctcccaggcctggagttgaggagggaagcgccgcctctccttgggccccttctctccccctttcccctccctgctggttcctggcatcgccagatgctgcgcagcagtctccgattccccatcaccaattcggctggcgtctccgagaccgcggactcccgtagggtccccgtggccccgagttgtagtcgggacaccccggccgcgggtgatcgtcgggtctccacgcgcccgggtcgctgacgcggatccggcctcggcgccttctcagggcgccctgcaaggccgcaggcaggatgaacattctggcacccgtgcggagggatcgcgtcctggcggagctgccccagtgcctgaggaaggaggccgctttgcacgggcacaaagacttccacccccgcgtcacctgcgcctgccaggagcaccggacaggcaccgtgggatttaagatctccaaggtcattgtggtgggggacctgtcggtggggaagacttgcctcattaataggttctgcaaagacacctttgataagaattacaaggccaccattggagtggacttcgagatggaacgatttgaggtgctgggcattcccttcagtttgcagctttgggataccgctgggcaggagaggttcaaatgcattgcatcaacctactatagaggagctcaagccatcatcattgtcttcaacctgaatgatgtggcatctctggaacataccaagcagtggctggccgatgccctgaaggagaatgacccttccagtgtgcttctcttccttgtaggttccaagaaggatctgagtacccctgctcagtatgcgctgatggagaaagacgccctccaggtggcccaggagatgaaggctgagtactgggcagtctcatctctcactggtgagaatgtccgagaattcttcttccgtgtggcagcactgacctttgaggccaatgtgctggctgagctggagaaatcgggggctcgacgcattggggatgttgtccgcatcaacagtgatgacagcaacctctacctaactgccagcaagaagaagcccacatgttgcccatgagggctgaggagactgttcagagactgcccagccctagggcactgtgccaccctcattcctccagagcttgacccctggacatttgcactgactttatccagaccaaagagctgcctcttggtggcagtattcccacagaggggtagctgggatcatgctagtcacttcctgcccccaggcaccgtgccaaagactggatgccccctactcctcaggggactgtccagggcgcccagtggtagtgagggagagtgtctctgttcttttgctcagcctgctgggccctttgtgtttgaggatgcttaatgattccagcctctcactgtgccttatgcattaaaatttctttgttacgagca

SEQ ID NO: 173169 - DNA, 1713 bp, Homo sapiens
  Payload ID: 14037
  Gene Symbol: RAB34
  Gene Name: RAB34, member RAS oncogene family
  ENST ID: ENST00000395242
  CDS Start-End: 586-1368
cgagcggagtgggactcgaggccctgtagccggactgggcccctcgccccctcctccagcggcctgcgggccttggcagcgccgcccctgcccacactgaccccgtgtggcggggccgctccgcgcccccgggccgctctgtaatggtagggcagcctcagccccgagatgacgtcgggtctccgcggccccgggttattgtaggaaccatccggccccgcgtaatcgtaggaactatccggccccgcgtaatcgtagggtctgcgcgggcccggcccccaccagacgggactccccgcccccaattggcggccgaagagtctcctcgccccagagtcatcttcgggacgcccagggcccgggtgattttgggctcgccgcggccccgggtgattgtttcatctccgtggcccgcggtggtcgtagcgtctccgagaccgcggactcccgtagggtccccgtggccccgagttgtagtcgggacaccccggccgcgggtgatcgtcgggtctccacgcgcccgggtcgctgacgcggatccggcctcggcgccttctcagggcgccctgcaaggccgcaggcaggatgaacattctggcacccgtgcggagggatcgcgtcctggcggagctgccccagtgcctgaggaaggaggccgctttgcacgggcacaaagacttccacccccgcgtcacctgcgcctgccaggagcaccggacaggcaccgtgggcagatttaagatctccaaggtcattgtggtgggggacctgtcggtggggaagacttgcctcattaataggttctgcaaagacacctttgataagaattacaaggccaccattggagtggacttcgagatggaacgatttgaggtgctgggcattcccttcagtttgcagctttgggataccgctgggcaggagaggttcaaatgcattgcatcaacctactatagaggagctcaagccatcatcattgtcttcaacctgaatgatgtggcatctctggaacataccaagcagtggctggccgatgccctgaaggagaatgacccttccagtgtgcttctcttccttgtaggttccaagaaggatctgagtacccctgctcagtatgcgctgatggagaaagacgccctccaggtggcccaggagatgaaggctgagtactgggcagtctcatctctcactggtgagaatgtccgagaattcttcttccgtgtggcagcactgacctttgaggccaatgtgctggctgagctggagaaatcgggggctcgacgcattggggatgttgtccgcatcaacagtgatgacagcaacctctacctaactgccagcaagaagaagcccacatgttgcccatgagggctgaggagactgttcagagactgcccagccctagggcactgtgccaccctcattcctccagagcttgacccctggacatttgcactgactttatccagaccaaagagctgcctcttggtggcagtattcccacagaggggtagctgggatcatgctagtcacttcctgcccccaggcaccgtgccaaagactggatgccccctactcctcaggggactgtccagggcgcccagtggtagtgagggagagtgtctctgttcttttgctcagcctgctgggccctttgtgtttgaggatgcttaatgattccagcctctcactgtgccttatgcattaaaattt

SEQ ID NO: 173170 - DNA, 1597 bp, Homo sapiens
  Payload ID: 14037
  Gene Symbol: RAB34
  Gene Name: RAB34, member RAS oncogene family
  Uniprot ID: Q9BZG1
  ENST ID: ENST00000395243
  CDS Start-End: 483-1238
cgtgtggcggggccgctccgcgcccccgggccgctctgtaatggtagggcagcctcagccccgagatgacgtcgggtctccgcggccccgggttattgtaggaaccatccggccccgcgtaatcgtaggaactatccggccccgcgtaatcgtagggtctgcgcgggcccggcccccaccagacgggactccccgcccccaattggcggccgaagagtctcctcgccccagagtcatcttcgggacgcccagggcccgggtgattttgggctcgccgcggccccgggtgattgtttcatctccgtggcccgcggtggtcgtagcgtctccgagaccgcggactcccgtagggtccccgtggccccgagttgtagtcgggacaccccggccgcgggtgatcgtcgggtctccacgcgcccgggtcgctgacgcggatccggcctcggcgccttctcagggcgccctgcaaggccgcaggcaggatgaacattctggcacccgtgcggagggatcgcgtcctggcggagctgccccagtgcctgaggaaggaggccgctttgcacgggcacaaagacttccacccccgcgtcacctgcgcctgccaggagcaccggacaggcaccgtgggatttaagatctccaaggtcattgtggtgggggacctgtcggtggggaagacttgcctcattaataggttctgcaaagacacctttgataagaattacaaggccaccattggagtggacttcgagatggaacgatttgaggtgctgggcattcccttcagtttgcagctttgggataccgctgggcaggagaggttcaaatgcattgcatcaacctactatagaggagctcaagccatcatcattgtcttcaacctgaatgatgtggcatctctggaacataccaagcagtggctggccgatgccctgaaggagaatgacccttccagtgtgcttctcttccttacccctgctcagtatgcgctgatggagaaagacgccctccaggtggcccaggagatgaaggctgagtactgggcagtctcatctctcactggtgagaatgtccgagaattcttcttccgtgtggcagcactgacctttgaggccaatgtgctggctgagctggagaaatcgggggctcgacgcattggggatgttgtccgcatcaacagtgatgacagcaacctctacctaactgccagcaagaagaagcccacatgttgcccatgagggctgaggagactgttcagagactgcccagccctagggcactgtgccaccctcattcctccagagcttgacccctggacatttgcactgactttatccagaccaaagagctgcctcttggtggcagtattcccacagaggggtagctgggatcatgctagtcacttcctgcccccaggcaccgtgccaaagactggatgccccctactcctcaggggactgtccagggcgcccagtggtagtgagggagagtgtctctgttcttttgctcagcctgctgggccctttgtgtttgaggatgcttaatgattccagcctctcactgtgccttatgcattaaaatttctttgttacgagca

SEQ ID NO: 173171 - DNA, 1736 bp, Homo sapiens
  Payload ID: 14037
  Gene Symbol: RAB34
  Gene Name: RAB34, member RAS oncogene family
  Uniprot ID: Q9BZG1
  ENST ID: ENST00000395245
  CDS Start-End: 628-1407
tccaggaatttccggggatcgtgttacagcgttggcggagcccgagcggagtgggactcgaggccctgtagccggactgggcccctcgccccctcctccagcggcctgcgggccttggcagcgccgcccctgcccacactgaccccgtgtggcggggccgctccgcgcccccgggccgctctgtaatggtagggcagcctcagccccgagatgacgtcgggtctccgcggccccgggttattgtaggaaccatccggccccgcgtaatcgtaggaactatccggccccgcgtaatcgtagggtctgcgcgggcccggcccccaccagacgggactccccgcccccaattggcggccgaagagtctcctcgccccagagtcatcttcgggacgcccagggcccgggtgattttgggctcgccgcggccccgggtgattgtttcatctccgtggcccgcggtggtcgtagcgtctccgagaccgcggactcccgtagggtccccgtggccccgagttgtagtcgggacaccccggccgcgggtgatcgtcgggtctccacgcgcccgggtcgctgacgcggatccggcctcggcgccttctcagggcgccctgcaaggccgcaggcaggatgaacattctggcacccgtgcggagggatcgcgtcctggcggagctgccccagtgcctgaggaaggaggccgctttgcacgggcacaaagacttccacccccgcgtcacctgcgcctgccaggagcaccggacaggcaccgtgggatttaagatctccaaggtcattgtggtgggggacctgtcggtggggaagacttgcctcattaataggttctgcaaagacacctttgataagaattacaaggccaccattggagtggacttcgagatggaacgatttgaggtgctgggcattcccttcagtttgcagctttgggataccgctgggcaggagaggttcaaatgcattgcatcaacctactatagaggagctcaagccatcatcattgtcttcaacctgaatgatgtggcatctctggaacataccaagcagtggctggccgatgccctgaaggagaatgacccttccagtgtgcttctcttccttgtaggttccaagaaggatctgagtacccctgctcagtatgcgctgatggagaaagacgccctccaggtggcccaggagatgaaggctgagtactgggcagtctcatctctcactggtgagaatgtccgagaattcttcttccgtgtggcagcactgacctttgaggccaatgtgctggctgagctggagaaatcgggggctcgacgcattggggatgttgtccgcatcaacagtgatgacagcaacctctacctaactgccagcaagaagaagcccacatgttgcccatgagggctgaggagactgttcagagactgcccagccctagggcactgtgccaccctcattcctccagagcttgacccctggacatttgcactgactttatccagaccaaagagctgcctcttggtggcagtattcccacagaggggtagctgggatcatgctagtcacttcctgcccccaggcaccgtgccaaagactggatgccccctactcctcaggggactgtccagggcgcccagtggtagtgagggagagtgtctctgttcttttgctcagcctgctgggccctttgtgtttgaggatgcttaatgattccagcctctcactgtgcc

SEQ ID NO: 173172 - DNA, 1184 bp, Homo sapiens
  Payload ID: 14037
  Gene Symbol: RAB34
  Gene Name: RAB34, member RAS oncogene family
  Uniprot ID: Q9BZG1
  ENST ID: ENST00000450529
  CDS Start-End: 71-826
gatgctgcgcagcagtctccgattccccatcaccaattcggctggggcgccctgcaaggccgcaggcaggatgaacattctggcacccgtgcggagggatcgcgtcctggcggagctgccccagtgcctgaggaaggaggccgctttgcacgggcacaaagacttccacccccgcgtcacctgcgcctgccaggagcaccggacaggcaccgtgggatttaagatctccaaggtcattgtggtgggggacctgtcggtggggaagacttgcctcattaataggttctgcaaagacacctttgataagaattacaaggccaccattggagtggacttcgagatggaacgatttgaggtgctgggcattcccttcagtttgcagctttgggataccgctgggcaggagaggttcaaatgcattgcatcaacctactatagaggagctcaagccatcatcattgtcttcaacctgaatgatgtggcatctctggaacataccaagcagtggctggccgatgccctgaaggagaatgacccttccagtgtgcttctcttccttacccctgctcagtatgcgctgatggagaaagacgccctccaggtggcccaggagatgaaggctgagtactgggcagtctcatctctcactggtgagaatgtccgagaattcttcttccgtgtggcagcactgacctttgaggccaatgtgctggctgagctggagaaatcgggggctcgacgcattggggatgttgtccgcatcaacagtgatgacagcaacctctacctaactgccagcaagaagaagcccacatgttgcccatgagggctgaggagactgttcagagactgcccagccctagggcactgtgccaccctcattcctccagagcttgacccctggacatttgcactgactttatccagaccaaagagctgcctcttggtggcagtattcccacagaggggtagctgggatcatgctagtcacttcctgcccccaggcaccgtgccaaagactggatgccccctactcctcaggggactgtccagggcgcccagtggtagtgagggagagtgtctctgttcttttgctcagcctgctgggccctttgtgtttgaggatgcttaatgattccagcctctcactgtgccttatgcattaaaatttctttgttacgagc

SEQ ID NO: 173173 - DNA, 1201 bp, Homo sapiens
  Payload ID: 14037
  Gene Symbol: RAB34
  Gene Name: RAB34, member RAS oncogene family
  ENST ID: ENST00000422279
  CDS Start-End: 128-643
ccgtggccccgagttgtagtcgggacaccccggccgcgggtgatcgtcgggtctccacgcgcccgggtcgctgacgcggatccggcctcggcgccttctcagggcgccctgcaaggccgcaggcaggatgaacattctggcacccgtgcggagggatcgcgtcctggcggagctgccccagtgcctgaggaaggaggccgctttgcacgggcacaaagacttccacccccgcgtcacctgcgcctgccaggagcaccggacaggcaccgtgggatttaagatctccaaggtcattgtggtgggggacctgtcggtggggaagacttgcctcattaataggttctgcaaagacacctttgataagaattacaaggccaccattggagtggacttcgagatggaacgatttgaggtgctgggcattcccttcagtttgcagctttgggataccgctgggcaggagaggttcaaatgcattgcatcaacctactatagaggagctcaagccatcatcattgtcttcaacctgaatgatgtggcatctctggaacataccaagttccaagaaggatctgagtacccctgctcagtatgcgctgatggagaaagacgccctccaggtggcccaggagatgaaggctgagtactgggcagtctcatctctcactggtgagtgagaatgtccgagaattcttcttccgtgtggcagcactgacctttgaggccaatgtgctggctgagctggagaaatcgggggctcgacgcattggggatgttgtccgcatcaacagtgatgacagcaacctctacctaactgccagcaagaagaagcccacatgttgcccatgagggctgaggagactgttcagagactgcccagccctagggcactgtgccaccctcattcctccagagcttgacccctggacatttgcactgactttatccagaccaaagagctgcctcttggtggcagtattcccacagaggggtagctgggatcatgctagtcacttcctgcccccaggcaccgtgccaaagactggatgccccctactcctcaggggactgtccagggcgcccagtggtagtgagggagagtgtctctgttcttttgctcagcctgctgggccctttgtgtttgaggatgcttaatgattccagcctctcactgtgccttatgcattaaaatttctttgtt

SEQ ID NO: 173174 - DNA, 717 bp, Homo sapiens
  Payload ID: 14037
  Gene Symbol: RAB34
  Gene Name: RAB34, member RAS oncogene family
  ENST ID: ENST00000412625
  CDS Start-End: 86-717
cacaatctacacagcagccttgaaggaaaagacgccagacttcagacgtctctctcctcgggcgccctgcaaggccgcaggcaggatgaacattctggcacccgtgcggagggatcgcgtcctggcggagctgccccagtgcctgaggaaggaggccgctttgcacgggcacaaagacttccacccccgcgtcacctgcgcctgccaggagcaccggacaggcaccgtgggatttaagatctccaaggtcattgtggtgggggacctgtcggtggggaagacttgcctcattaataggttctgcaaagacacctttgataagaattacaaggccaccattggagtggacttcgagatggaacgatttgaggtgctgggcattcccttcagtttgcagctttgggataccgctgggcaggagaggttcaaatgcattgcatcaacctactatagaggagctcaagccatcatcattgtcttcaacctgaatgatgtggcatctctggaacataccaagcagtggctggccgatgccctgaaggagaatgacccttccagtgtgcttctcttccttgtaggttccaagaaggatctgagtacccctgctcagtatgcgctgatggagaaagacgccctccaggtggcccaggagatgaaggctgagtactgggcagtctcatctctcactggtgagaatgtccgagaattcttcttccg

SEQ ID NO: 173175 - DNA, 863 bp, Homo sapiens
  Payload ID: 14037
  Gene Symbol: RAB34
  Gene Name: RAB34, member RAS oncogene family
  Uniprot ID: Q9BZG1
  ENST ID: ENST00000436730
  CDS Start-End: 66-845
tgcgcagcagtctccgattccccatcaccaattcggctggggcgccctgcaaggccgcaggcaggatgaacattctggcacccgtgcggagggatcgcgtcctggcggagctgccccagtgcctgaggaaggaggccgctttgcacgggcacaaagacttccacccccgcgtcacctgcgcctgccaggagcaccggacaggcaccgtgggatttaagatctccaaggtcattgtggtgggggacctgtcggtggggaagacttgcctcattaataggttctgcaaagacacctttgataagaattacaaggccaccattggagtggacttcgagatggaacgatttgaggtgctgggcattcccttcagtttgcagctttgggataccgctgggcaggagaggttcaaatgcattgcatcaacctactatagaggagctcaagccatcatcattgtcttcaacctgaatgatgtggcatctctggaacataccaagcagtggctggccgatgccctgaaggagaatgacccttccagtgtgcttctcttccttgtaggttccaagaaggatctgagtacccctgctcagtatgcgctgatggagaaagacgccctccaggtggcccaggagatgaaggctgagtactgggcagtctcatctctcactggtgagaatgtccgagaattcttcttccgtgtggcagcactgacctttgaggccaatgtgctggctgagctggagaaatcgggggctcgacgcattggggatgttgtccgcatcaacagtgatgacagcaacctctacctaactgccagcaagaagaagcccacatgttgcccatgagggctgaggagactgttc

SEQ ID NO: 173176 - DNA, 914 bp, Homo sapiens
  Payload ID: 14037
  Gene Symbol: RAB34
  Gene Name: RAB34, member RAS oncogene family
  ENST ID: ENST00000430132
  CDS Start-End: 139-914
ggaaaagacgccagacttcagacgtctctctcctcggtgggcacctcattctaaccctggcacccccttcgcacgcttcccctccaccatcctcacccccgacctcccagggcagaagggcgagagggggcagactctatgagtcacctcccaggcctggagttgaggagggaagcgccgcctctccttgggccccttctctccccctttcccctccctgctggttcctggcatcgccagatgctgcgcagcagtctccgattccccatcaccaattcggctggatttaagatctccaaggtcattgtggtgggggacctgtcggtggggaagacttgcctcattaataggttctgcaaagacacctttgataagaattacaaggccaccattggagtggacttcgagatggaacgatttgaggtgctgggcattcccttcagtttgcagctttgggataccgctgggcaggagaggttcaaatgcattgcatcaacctactatagaggagctcaagccatcatcattgtcttcaacctgaatgatgtggcatctctggaacataccaagcagtggctggccgatgccctgaaggagaatgacccttccagtgtgcttctcttccttgtaggttccaagaaggatctgagtacccctgctcagtatgcgctgatggagaaagacgccctccaggtggcccaggagatgaaggctgagtactgggcagtctcatctctcactggtgagaatgtccgagaattcttcttccgtgtggcagcactgacctttgaggccaatgtgctggctgagctggagaaatcgggggctcgacgcattggggatgttgtccgcatcaacagtgatgacagcaacctctacctaactgccagcaagaagaagcccacatgttgccc

SEQ ID NO: 173177 - DNA, 1293 bp, Homo sapiens
  Payload ID: 14037
  Gene Symbol: RAB34
  Gene Name: RAB34, member RAS oncogene family
  Uniprot ID: Q9BZG1
  ENST ID: ENST00000415040
  CDS Start-End: 222-935
ggttcctggcatcgccagatgctgcgcagcagtctccgattccccatcaccaattcggctggcgtctccgagaccgcggactcccgtagggtccccgtggccccgagttgtagtcgggacaccccggccgcgggtgatcgtcgggtctccacgcgcccgggtcgctgacgcggatccggcctcggcgccttctcagggcgccctgcaaggccgcaggcaggatgaacattctggcacccgtgcggagggatcgcgtcctggcggagctgccccagtgcctgaggaaggaggccgctttgcacgggcacaaagacttccacccccgcgtcacctgcgcctgccaggagcaccggacaggcaccgtggggttctgcaaagacacctttgataagaattacaaggccaccattggagtggacttcgagatggaacgatttgaggtgctgggcattcccttcagtttgcagctttgggataccgctgggcaggagaggttcaaatgcattgcatcaacctactatagaggagctcaagccatcatcattgtcttcaacctgaatgatgtggcatctctggaacataccaagcagtggctggccgatgccctgaaggagaatgacccttccagtgtgcttctcttccttgtaggttccaagaaggatctgagtacccctgctcagtatgcgctgatggagaaagacgccctccaggtggcccaggagatgaaggctgagtactgggcagtctcatctctcactggtgagaatgtccgagaattcttcttccgtgtggcagcactgacctttgaggccaatgtgctggctgagctggagaaatcgggggctcgacgcattggggatgttgtccgcatcaacagtgatgacagcaacctctacctaactgccagcaagaagaagcccacatgttgcccatgagggctgaggagactgttcagagactgcccagccctagggcactgtgccaccctcattcctccagagcttgacccctggacatttgcactgactttatccagaccaaagagctgcctcttggtggcagtattcccacagaggggtagctgggatcatgctagtcacttcctgcccccaggcaccgtgccaaagactggatgccccctactcctcaggggactgtccagggcgcccagtggtagtgagggagagtgtctctgttcttttgctcagcctgctgggccctttgtgtttgaggatgcttaatgattccagcctctcactgtgccttatgcattaaaatttctttgttacgagc

SEQ ID NO: 173178 - DNA, 1099 bp, Homo sapiens
  Payload ID: 14037
  Gene Symbol: RAB34
  Gene Name: RAB34, member RAS oncogene family
  ENST ID: ENST00000453384
  CDS Start-End: 2-808
tatgagtcacctcccaggcctggagttgaggagggaagcgccgcctctccttgggccccttctctccccctttcccctccctgctggttcctggcatcgccagatgctgcgcagcagtctccgattccccatcaccaattcggctggggcgccctgcaaggccgcaggcaggatgaacattctggcacccgtgcggagggatcgcgtcctggcggagctgccccagtgcctgaggaaggaggccgctttgcacgggcacaaagacttccacccccgcgtcacctgcgcctgccaggagcaccggacaggcaccgtgggcagatttaagatctccaaggtcattgtggtgggggacctgtcggtggggaagacttgcctcattaataggttctgcaaagacacctttgataagaattacaaggccaccattggagtggacttcgagatggaacgatttgaggtgctgggcattcccttcagtttgcagctttgggataccgctgggcaggagaggttcaaatgcattgcatcaacctactatagaggagctcaagccatcatcattgtcttcaacctgaatgatgtggcatctctggaacataccaagcagtggctggccgatgccctgaaggagaatgacccttccagtgtgcttctcttccttgtaggttccaagaaggatctgagtacccctgctcagtatgcgctgatggagaaagacgccctccaggtggcccaggagatgaagactgttcagagactgcccagccctagggcactgtgccaccctcattcctccagagcttgacccctggacatttgcactgactttatccagaccaaagagctgcctcttggtggcagtattcccacagaggggtagctgggatcatgctagtcacttcctgcccccaggcaccgtgccaaagactggatgccccctactcctcaggggactgtccagggcgcccagtggtagtgagggagagtgtctctgttcttttgctcagcctgctgggccctttgtgtttgaggatgcttaatgattccagcctctcactgtgccttatgcattaaaatttctttgttacgagcactt

SEQ ID NO: 173179 - DNA, 467 bp, Homo sapiens
  Payload ID: 14037
  Gene Symbol: RAB34
  Gene Name: RAB34, member RAS oncogene family
  ENST ID: ENST00000583538
  CDS Start-End: 1-467
agatgctgcgcagcagtctccgattccccatcaccaattcggctggtttgcagctttgggataccgctgggcaggagaggttcaaatgcattgcatcaacctactatagaggagctcaagccatcatcattgtcttcaacctgaatgatgtggcatctctggaacataccaagcagtggctggccgatgccctgaaggagaatgacccttccagtgtgcttctcttccttacccctgctcagtatgcgctgatggagaaagacgccctccaggtggcccaggagatgaaggctgagtactgggcagtctcatctctcactggtgagaatgtccgagaattcttcttccgtgtggcagcactgacctttgaggccaatgtgctggctgagctggagaaatcgggggctcgacgcattggggatgttgtccgcatcaacagtgatgacagcaacctctacctaactgcc

SEQ ID NO: 173180 - DNA, 626 bp, Homo sapiens
  Payload ID: 14037
  Gene Symbol: RAB34
  Gene Name: RAB34, member RAS oncogene family
  ENST ID: ENST00000419712
  CDS Start-End: 179-626
agatgctgcgcagcagtctccgattccccatcaccaattcggctggggtccccgtggccccgagttgtagtcgggacaccccggccgcgggtgatcgtcgggtctccacgcgcccgggtcgctgacgcggatccggcctcggcgccttctcagggcgccctgcaaggccgcaggcaggatgaacattctggcacccgtgcggagggatcgcgtcctggcggagctgccccagtgcctgaggaaggaggccgctttgcacgggcacaaagacttccacccccgcgtcacctgcgcctgccaggagcaccggacaggcaccgtgggatttaagatctccaaggtcattgtggtgggggacctgtcggtggggaagacttgcctcattaataggttctgcaaagacacctttgataagaattacaaggccaccattggagtggacttcgagatggaacgatttgaggtgctgggcattcccttcagtttgcagctttgggataccgctgggcaggagaggttcaaatgcattgcatcaacctactatagaggagctcaagccatcatcattgtcttcaacctgaatgatgtggcatctctggaacataccaagcagtggctggccgatg

SEQ ID NO: 173181 - DNA, 582 bp, Homo sapiens
  Payload ID: 14037
  Gene Symbol: RAB34
  Gene Name: RAB34, member RAS oncogene family
  ENST ID: ENST00000580843
  CDS Start-End: 428-582
agatgctgcgcagcagtctccgattccccatcaccaattcggctgggaaccatccggccccgcgtaatcgtaggaactatccggccccgcgtaatcgtagggtctgcgcgggcccggcccccaccagacgggactccccgcccccaattggcggccgaagagtctcctcgccccagagtcatcttcgggacgcccagggcccgggtgattttgggctcgccgcggccccgggtgattgtttcatctccgtggcccgcggtggtcgtagcgtctccgagaccgcggactcccgtagggtccccgtggccccgagttgtagtcgggacaccccggccgcgggtgatcgtcgggtctccacgcgcccgggtcgctgacgcggatccggcctcggcgccttctcagggcgccctgcaaggccgcaggcaggatgaacattctggcacccgtgcggagggatcgcgtcctggcggagctgccccagtgcctgaggaaggaggccgctttgcacgggcacaaagacttccacccccgcgtcacctgcgcctgccaggagcaccggacaggcaccgtgggcagatttaa

SEQ ID NO: 173182 - DNA, 546 bp, Homo sapiens
  Payload ID: 14037
  Gene Symbol: RAB34
  Gene Name: RAB34, member RAS oncogene family
  ENST ID: ENST00000582934
  CDS Start-End: 401-546
agatgctgcgcagcagtctccgattccccatcaccaattcggctgggaactatccggccccgcgtaatcgtagggtctgcgcgggcccggcccccaccagacgggactccccgcccccaattggcggccgaagagtctcctcgccccagagtcatcttcgggacgcccagggcccgggtgattttgggctcgccgcggccccgggtgattgtttcatctccgtggcccgcggtggtcgtagcgtctccgagaccgcggactcccgtagggtccccgtggccccgagttgtagtcgggacaccccggccgcgggtgatcgtcgggtctccacgcgcccgggtcgctgacgcggatccggcctcggcgccttctcagggcgccctgcaaggccgcaggcaggatgaacattctggcacccgtgcggagggatcgcgtcctggcggagctgccccagtgcctgaggaaggaggccgctttgcacgggcacaaagacttccacccccgcgtcacctgcgcctgccaggagcaccggacaggcaccgtggg

SEQ ID NO: 173183 - DNA, 994 bp, Homo sapiens
  Payload ID: 14037
  Gene Symbol: RAB34
  Gene Name: RAB34, member RAS oncogene family
  ENST ID: ENST00000625712
  CDS Start-End: 71-706
gatgctgcgcagcagtctccgattccccatcaccaattcggctggggcgccctgcaaggccgcaggcaggatgaacattctggcacccgtgcggagggatcgcgtcctggcggagctgccccagtgcctgaggaaggaggccgctttgcacgggcacaaagacttccacccccgcgtcacctgcgcctgccaggagcaccggacaggcaccgtgggcagatttaagatctccaaggtcattgtggtgggggacctgtcggtggggaagacttgcctcattaataggttctgcaaagacacctttgataagaattacaaggccaccattggagtggacttcgagatggaacgatttgaggtgctgggcattcccttcagtttgcagctttgggataccgctgggcaggagaggttcaaatgcattgcatcaacctactatagaggagctcaagccatcatcattgtcttcaacctgaatgatgtggcatctctggaacataccaagcagtggctggccgatgccctgaaggagaatgacccttccagtgtgcttctcttccttgtaggttccaagaaggatctgagtacccctgctcagtatgcgctgatggagaaagacgccctccaggtggcccaggagatgaagactgttcagagactgcccagccctagggcactgtgccaccctcattcctccagagcttgacccctggacatttgcactgactttatccagaccaaagagctgcctcttggtggcagtattcccacagaggggtagctgggatcatgctagtcacttcctgcccccaggcaccgtgccaaagactggatgccccctactcctcaggggactgtccagggcgcccagtggtagtgagggagagtgtctctgttcttttgctcagcctgctgggccctttgtgtttgaggatgcttaatgattccagcctctcactgtgccttatgcattaaaatttctttgttacgagca
